United States Patent Application Publication US 2019/0348154 A1 - sequence listing, part 46

SEQ ID NO: 171793 - DNA, 16980 bp, Enterobacter cloacae
atgagtaacataaaggttgttgatgtcatcattcgcaaaacggcggagaaaacgaaattaaccggcgaaggaaatttgtcggtctctatttcctccccgagcgtgattgaaatccagggttctgctcaggatgtggtgcgatatgttcgccagggtaaagatctcctcatttatatgaaagatggcagcgtgattcgctgcaataactattttgttgaagatcctgagacgcacaaccagtcagagctggtgttcaacgatcgtcaggaactgacgcatatttcttttgccgataccggggaagcgtcaggcgttgcggtgaccgagctaaccgcgcaggccacaccgattagcagcgttcaacctttcctggagcagggaagcgtcttaagcgacgccccgtggggctggattgcgggagctgcattaggcggcggtgccatcggggcgctgctggcaaacggcggcgacggcgagactaaaacaaaagttattgataatacgaaagaggtggaaagcgccacgccaaccttcctgctgtcggataaagcgggcgacaagcagggcgtgctgacagcaaacgcgatcacggacgacaacacgccaacctttagcggtaccggccagccgggcgcgaccatccagatcaaagacagcagcggcagcaccatcgccagcgccatggtcggtaaagagggcacctggacggtaaaattaccgacccagacggacggggaacacacctggtcggtggtgcagatcgacggcagtaaaaccaccgatgcgggcaacattaccgtaacggtctcgaccgccgaggctgccattacgctggccaccacagcgggcgacaacgtgcttaacgccagcgagcaatccgcgggttttacgctctccggtgccagcaagaatctggcgcagggtaccgtactcaccgtgacgctgaacggtaaaacctatacgacggaagtgggggcggacgggacgtggagtgttaacgtgcccgcggctgacgcgcaggctctgggcgatggcacctggacggtcaacgtcatcggcaaagacgcgacaggtaacaccgtgagcggcagccagacaatcggcgtggatagcgtcgcgccaaccctctctgtcgataccctcgcgcaggacaacattattaatgccgccgagcacagccagccgctgacgctgaccggcaaaacgactgcggaagccggtcagatcgtcacggtcacgctgaacggtaaaaactacaacgccacggtgggcagcgacggtaactggtccgtcacgcttgctgcggacgacgtgcaggcgctcaacgagggtaatcacaccctgacggtgaacgtcagcgacaaagcgggcaacggttcgtctgtcaccgcagatttcacggtggataccaccgcgccggtggtcagcatcgataccgtggcgggcgacgacatactgaacaccagcgaacagggccaggcgcagattatttccgggcagacgagcggcgcgtcggcaggcgatgtggtcaccgtgaccgttggtggccagtccttcaccggcgtggtgctggcggacggcagctggagcgtgggcgttccggcatccgtgctgggcgcgctgggtgaaggcaaccacacgatttcagtatccgtgaccgacgcggcaggcaacaccggcagcgccacgcacggcattacgctgagcggcaatccgccagaatttacgattgacgccattagccaggacaacgtgctgaatgcccaggaggcgatgcagccgctgagcctgaccggtaccagcaacctgcctgacggcagcgccattaccgtgacgctgaacaacgtcagctatcaggccaccgttgaaaacggcatctgggcggtccaggtgccggtttccgacgtgctgaatctggcgaacaccctctacaccgtcagcgtcagcggcactgacagcgtgggtaacagcggctctgccggggcgacgctgctggtggataccgtgctgccgcaggtgatcatcaacacctttgcgggcgacaacctggtcaataacgccgaagcgggtgtcgatcaaaccctcagcggtcgcgttaccggcgcggcggcgggcgataccgtttctgtcaccgtgggcggcaagagcttcaccgccacggtgggcagcgatctgacctggagcgtgaaaatcccgtcagcggatcttaaggcgttcggcgacggcgatttaaccttcaccgcgtcggtgaccaattcgcacggcaataccggtaccggcgagcgcgatatcaacatcaacgcacagctgccgggcctgcgtgtgaacaccatttccggcgatgacgtggtcaacgccatcgaacagcagcaggatctgaccgtcaccggcgccagcacccacctggccgcgggcacgccgatcgtcgtcaccattaacaacgtcgaatataacgccgtggttaccgccagcggcggctggagcattggcgttcctgctacggacctgcaggcctggaccgcgggagaggtgacggttagcgtcagcgcaaaagatgcctggggcaataccgttgcggctgaacacccgattgaactcgatctcaacgccgtggcggtcaccattgataccgtctccggcgatgacctgctgaatgcggcagaaaaaggtgccgatttaaccctttccggaaagacgcagggcgtggaggcggggcagaccgtggtggtgaaattcgccgaccagacctttaccgcccaggtgcagcaggatggctcctggagcctgaccgtgcccgccagcgccatggaaaccctgatcgacgggcgggcgcaggtgagcgtcagcgtcacgaacgtcaacggtaacagtgccgacgcgtcgcgcgtggtcacggtggatacgctgccgccggcgattaccctcgataacctcaccagcgataacatcatcaatgcggcagaggcgcagcaggatttagccttaagcggcaccagtactgcggaaccgggccagacggtcaccgtgacgctgaacggcaaaacgtatcagaccacggtccagacggacggaacctggcagctgatcgtaccggcggctgacgtcggtgccctcaacgatggcatcgtgaccgtgacggccaccgtaagcgacgtggcgggcaatagcagcagcgccgaccgcgttgggctggtggacgccaccgtgccgcaggtgaccatcaaccacttcgtcaccgacaccaataccgttaaccagctcgcccatgcacaggctcagatcctgagcggctccgtcaccggggcggcagcgggcgatcgggtgactatcactattaacagcgtcgattacaccaccgtggtggatgcggcgggcaactggagccttggcctgccggcgtctgtcgtacaggggctgacggacggcacctggaccatcgacgtctccgtgaccgaccgatccggcaataccggaagcagttcactggatgtggtggtgaataccgtgacgcctgtcatcggtatcaacacgctggcggcggacgacgtgatcaacgcggcagagaaaggcgaagctctgcagatttccggcaccagcaaccagccggaaggcacgaccattacggtgaccctgaacggcattcactacacggctaccgctgacgcgagcggaaactggagcgtaaccgttccggcggcaaacgtctcggcgctgggcgaagcgaattacaccgtgacggcgaacgtcaccgatagcgtcggcaacagcgcttcaacctcgcacgacgtgctggtggacagctcgctgccggtggtaacgattgacacgctggcgggcgacaatatcgttaacgcggcggaagtgtcggcagggcaaaccctgaccggtaaggtgacaaatgcggcgccaggtgacactgtcacgattacccttggcggccagacctttactgccaccgtgcaggacgatctcacctggagcctgccgttaacccagagccagttgaccgcgctgggcaacggcgatctcaccgtatcggccagcgtcaccaacgcgcacggcaataccggttcttcttcgctcgacttcaccatcgacgcccagcttccggggctgcgtattgatacggtcgcaggcgacgacgtgatcaacgtgattgagcacgctcagaacctgattgtgtccggcaccagcaccgatctggcggctggcagcgccgtcaccgtgaccatcaacggaaaagcgtattccgcaacggtgctggcggacggcacctggcaggcggcggtaccggcggcggacgtgtcccagtgggcagatggctcgctggatatcaaggcaagcgcgcaggatgcctccggcaacccggtggctatcgggaccgtcgtggacgtcgatctcgcgccggttgccatcaccatcagcagcgtgaccgacgacaacgtccttaacgcagcggaaaaaggccaggatctggtgctgtccggcacgtcatctcacgttgaagcgggccagaccgtcaccattaccttcgcaggaaaaacgtacaccacgacggtggatgccaacggcaactggacctggaccgttccggctgccgatctgagcggcctgaaagacggcgacgccagcgtgcaggttagcgtcaccaacgtgaacggcaacgccgcgtcttcggcgcaggcattcagcgtcgacaccaccgcgccgacggtgaccatcaacaccatcagcggcgataacatgctgaatgcggcagaggcagcgcaggatctgaccctgagcgggacgtctactgccgaagcgggccagacggtcaccgtgaccttcaacggcaatcagtacaccgcgcaggtgcaggcggacggcagctggacgctcgacgtgcctgcggcggatctggcaggcatcaccgacggcaacgcggcggtcacggcgaccgtgtccgataaagcaggtaacccggccagcgcgggctcctcggtgctggtggacaccaccgtaccgcagattagcttcaacatcgtcgcgggcgacgacatcgtgaatattgccgagcacggccaggcgctgatcgtctccggcaaggtgacgggcgcgcaggcgggcgacgtgattaccgtgaccctgaacggtaaagattacaccgccatgctggacgcgtccggcagctggagcgtgggcgttccggcggcggacgtgggcgcgctggtcaacggcgaccagacgatctccgcgaccctcaccgacaaagccggtaacagcgccactgcgacgcacgaatttgacgtctccctgaccgcgccggtggtcgccatcaataccctggcggctgacgacgtgatcaatgcgaccgagaaaggtcaggatctgcaggtgtccggcaccagcaaccagccggaaggaaccgccattacggtgaccctgaacgggattaactatacggccaccaccgacgcgagcgggaactggagcgtgaccgttccggcggcacacgtctcggcgctgggcgaagcgagctacgccgtgacggcgagcgtaactgacgccgcgggcaacagcgcgagcaccggccacagcgtgctggttgacagcgcgctgccgcaggtcaccatcaatccggtcgcgacggacgacattattaacgcggcggaagtggctgccggacagaccctgagcgggaaagtgagcggtgcggcgagcggtgacactgtcactattaccctcggcggcaatacgtataccgcgacggttcaggacgatctgagctggtcggtcaacgtgccgtcctcggtcttaaccgccatcggtaacggcgatctgacggtgtcagccagcgtcactaacggccacggcaacaccggcaccggcgagcgcgacatcaccattgatgccaacctgccgggcctgcgcgtcaataccgtggcgggcgacgatgtgatcaatagcattgaacacgctcaaaatctgattatcaccggttccagcgacggtctggcaacgggcgcggcgctgaccgtcaccgtcaacggcaaaacctacgcggccaccgtactggcggacggcacctggacggcggccattccggcggccgacgtcagcgcgctcggcgcgggcacggttaccgtgaaggttgaaggtcatagcgcggcgggcaacccggtttccatcagccatgacgtgaaggtggatctggcgacagtcgccatcagcattaacccgattgcctctgacgacgtgattaacgcggcggagaaaggcgcggacctggtgctgtccggctccaccaccaacgtggaagaaaaccagaccgttaccatcaccttcggcggcaaatcgtacaccgcgacggtggatgccgacggcaactggacggcgaccgtaccgtctgccgatttgggcagcctgaaggacggcgatgccagcgtgcaggtgagcgtcaccaacgtgaacggcaacagcgcgtcggcaggccgcgagtacagcgtggacgccaccgcgccgacggtgtctatcgagatcgtcagcgacaataacatcatcaatgcggccgaggcgcagcaggatctggtcgttaatggtgtaaccaacgccgaagcgggccagaccgtcaccgtgaccctgaacggcgtggactacaccaccaccgttgaggctaacggcagctggagcgtgaccgtgccgtccgcggatgtcggcgcgattaccgacggtaactacaccattagcgcggcggtctccgataaggcgggcaacccggcctcttcggatcgcgacgtgctggtcgataccaccgtcccgcagctgaccattcacaccgtgtccgacgacgacgtgatcaacagcgccgagcacgtgcaggcattgattgtcaccggttccgtgaccggcgcggcggcgggcgacgtggtcaccgtcaccctcaacggcaaatcgtacaccgccaccctggacgcctccggcaactggagcgtgggcgtacctgcggcagacgttaccgcgctggccgccggggattacaccatcaccgcggcgctgaccgataaggcgggcaacagcaacagcgccacgcacggtgtggcggtgaacctgaccgcgccggggctgaccattgacaccgtttccggtgacgatgtgatcaacagcaccgagaaaacccaggatctgaccctctccggtacggcgtccggcctggcggcaggcgcggtagtgaccgtgatgctcaacggcaaagcgtacagtgcgcaggtggacgataacggaaaatggaccaccaccgttccggcgagcgaggtcggtcagctgggcgaggcgctttataccgtcaccgcgtcagccacggacagcgtcggcaacagcaccagcgcgtcgcacacggtaaacgtggagtccgttctgccgggcgtgattatcaacaccattgcgggcgacgacgtgattaacgccgccgagctggctgccggccagaccatcagcggtaaggtggtgaatgccgaggcgggcaacaccgtgaccgtgaccattggcggcaaccgctacaccgcaacggtgcagagcgatctgacctggtccgttaacgtgccggaatccgttctgaccgcgctgggcaacggcgatttgacggtgaccgccagcgtgaccaacggtgtcggcaacagcggatccgctgagcgcgatatcacgatcgacgctaacctgccgggcctgcgcgtggataccgtggcgggcgacgacgtgatcaacagcatcgagcacgggcagaatctgattgtgaccggatccagcgatggcctggccgcaggtaccaccttgaccgtcaccgtaaacggcaaaacctacccggccaccgtgctggccgacggcacctggcgtgcggccatcccggctgcggatgtgggtgccctggcagcaggtacggtcaccgtgaccgttgcaggccagagcagcgccggtaacccggtttccatcagccacgatgtgacggtagatctggcgaccgttgccatcagcatcgatgcgattgcttcagacgacgtgattaacgccgccgagaagggcgcggatctggtgctctccggggcgacctcgaacgttgaggaaaaccagaccgttaccatcaccttcggcggcaagagctacaccgcgaccgtcggcgccgacggcaaatggacggccacggtgccagccgccgacctggcgggtctgaaagacggcgacgccagcgtgcaggtgagcgtcaccaacgtgaacggcaacagcgcctcggcgggacgtgagtacagcgtggatgccaccgcgccgaccatcacgattaacaccctggcgacggatgatattctgaacgccgccgaagcgaagagcgatctgaccgtgtccggtaccagcaccaccgaagcgggccagacggtcaccgtatcgctgaacggcaaagactacaccaccaccgtcagcgcagacggcagctggacgctgaacgttccggcggccgatctggcaggattaaccgacggcagcgtcaccgtgaccgcatcggtcagcgacaaggcgggtaacccggcctccgtggaccacaacctgacggtggatgtgaccgttcctgcggtcactatcaacaccatcgcgggtgacgatgtgattaacgtggctgaacacagccaggcacacgttatcagcggcaccgctaccggcgcggccgcgggcgataaggtgaccgtcaccatcggcggtcagacctacaccaccgtgctggacgcggcggggaactggagcgtgggcgtcccggcgagcgtgatttccggcctcagcgacggcacagtgaccgtgactgcgtccgtcaccgacgcggcgggcaacaccggcaccggcagccataacgtgaccgtcgataccggtctgccatcggtcagcttcaacgccatcagcgacgataacgtgctgaacgcggtggaaaaaggtcaggatctgagcgtgagcggcaccagcgccaacctggcggaaggcaccgtggtgaccgtgaccctgaacggcaaaaactacacggcgacgacggcggcagacggtacctggagcctgacggttccggcggcggatctggccggtctgggtcaggccaactacaccctgaatgcgaccaccaccaacggcgtgggcaacagcgtgagcaacaccgcgaacctgctggtggacaccgcgctgccaacggtcaccatcaacaccgtggcgggcgataacgtcattaatgcggcggaagtggccgcaggccagaccctgagcggcaccgtggcgaatgccgaagcgggcaataccgtgaccgtgaccattggcggcaacagctacaccgcaacggtgcagaacgatctgacctggtctgtcaacgtgccgtctgacgtgctgacggcgctgggtaacggcagcctgagcgtgacggcgactgtcaccaacggccacggtaacaccgggaccggcgagcgcgagatcgctatcgacgctaacctgccgggcctgcgcgtcgataccgtcgcgggtgatgacgtgatcaacaccatcgagcacgcgcagaacctgatcgtcagcggatccagcgacgggctggcgccaggtacagccctgaccgtcaccatcaacggcaaagactatgcggccacggtgctggcggacggcacctggagcgcggctgttccatcagcggacgtgagcgcgtggccggaaggcaccgtcaaaatcagcgtcaccggcgacagcgcggcgggcaacccgattaccatcagccacgatgtgacggtagatctggcgaccgttgccatcagcatcaatccgattgcgaccgacgacgtgattaacgcggcggagaagggcgcggatctggtgctgtccggtgcgaccatcaacgtggaagccgggcagaccgtgaccatcagcctgaacggcaaaatctatagtgcgacagtagacgacagcggcaactggacctggaccgtaccgtctgcggatctggctggcctgaaggacggcgatgccagcgtgcaggtgagcgtcaccaacgtgaacggcaacagcgcctcggcgggccgtgagtacagcgtggatgccaccgcgccgaccgtcacgatcaacaccctggcgacggacgacattctgaatgccgccgaagcgaagagcgatctgaccgtgtccggcagcagctctgccgaagcgggccagacggtcaccgtgtcgctgaacggcaaagactacaccaccaccgtcagcgcggacggcagctggacgctgaacgtcccggcggccgatgttgcggccctgacggacggcagtgtgaccgtgaccgcatcggtaagcgacaaggcgggcaacccggcgtcggttgatcatactctgacggtggatgtgaccgttccggcggtgaccattaacaccgtggcgggcgacgatgtcattaacctcgcagaacacagccaggcgcacatcatcagcggcaccgccaccggcgcggccgcgggcgataaggtgaccgtcaccatcggcggtcagacgtacaccaccgtgctggacgcggcgggcaactggagcgtgggcgtcccggcgagcgtgatttccggcctcagcgacggcagcgtgaccgtcacggcatcggttaccgacgcggcgggcaataccggcaccggcacgcataacgtgaccgtcgataccggtctgccgtccgtggccttcaacgccatcagcgacgataacgtgctgaacgcggtggaaaaaggtcaggatctgcgcgtcagcggcaccagcgccaacctggcagaaggcaccgtggtggccgtgaccctcaacggcaaaaactacacggccacgacggcggcagacggcacctggagcctgaccgttccggcggcggatctggcgggtctgggcgaagcgaattacaccctgagcgcgaccgccaccaacggcgtgggcaacagcgtgagcaacaccgcgaacctgctggtggataccgcgctgccaaccgtcaccatcaacaccgtggcgggcgataacgtcattaacgcggcggaagtggccgcgggccagaccctcagcggcaaggtcgcgaacgcggaggcgggcaataccgtcactgtgaccattggcggcaacacgtacaccgcgacggtgcagagcgatctgacctggtccgtgaacgtgccggaatccgtcctgacggcgctgggcaacggcgacctgacggtgtctgcgactgtgaccaacggccacggcaacacgggaacgggcgagcgcgaaatcgttatagacgccagtctgccgggcctgcgcgtcgatacggtagcgggcgacgatgtgatcaacagcatcgaacatactcaaaacctgatcgtctccggcaccagcgacgggctggcggcaggcacaacgctcaccgtgaccgtcaatggcaaaacctatgcggcctccgtgctggcagacggctcctggagcgcggcgatcccggcggcagacgtcgcggccttcgcagcaggtacggtcaccgtgaccgttgccggccagagcgcggcgggcaacccggtgaccatcagccatgacgtgaccgtcgatctggcggcggtggctatcagcatcgatgcgattgccaccgacgacgtgattaacgcggcggagaaaggtgcggatctggtgctctccggcagcacctcgaacgtggaggaaaaccagaccgttacggttaccttcggcggcaagacgtacaccgcgaaggtggatgctgacggtcactggacggccactgtgccgtctgcagaccttgcgggcctgaaggacggtgacgccagcgtgcaggtgagcgtcaccaacgcgcacggcaacagcgcctcggcgggccgcgaatacagcgtggacgcgactgcgccaaccgtgaccattgatacggtcgcaggcgataacgtgattaacggcagcgaagcggctgcgggcgtggctatctccggcaccaccacggcggaagccgggcagacggtcaccgtgacgctgggcgggaagagctataccgcgcaggtccagcagggcggcgtctggagcgtgaacgtgccgggcagcgatctggccgcactggcggataacggctacaccgtgcaggtgagcgtgagcgacgccgcgggtaacccgggcagcgcgggtaagacgattacgcttgataccacgccgccgaccgtcagctttaacgtggtggcgggcgatgacgtgattaacagcgtggagcacggacaggcgcagatcgtcagcgggtcggcaaccggcgcgaacgtcggtgataaagtggttatcaccctcggttcgcaccagtacaccaccaccgttgacgccagcggcaactggagcgtgggcgttccggccagcgtgatttccgcgctgaccgacggcaccgtgaccctcagcgcgaccattaccgacagcgcgggtaacagcagcacccagacccatgacgtggtggtcaacaccgcctccgtggcgctgacggtgaacaccgttagcggtgacgacgtcatcaacgcggctgaagccggttcgtcactggtgattaacggttccagcgcgcagttcgccagcgggacccaggtcaccgtgaccctgaacggcaagacctatacggctacgatacagagcgacggcacctggacgaccaccgtaccggccgccgacgtgggtgctctggccgatggcgcacgctatcaggtgtcggtgtcggcacaggacagcgcgggcaacagcgcgtcggcaacgcacggcatcagcgtggataccactgcgccggtggtgagcattgggacgctgtcggttgacgacatgctgaacgcctcggaagcgcagcagccgctgaccgtgcacggatcttccagcgcggaggcggggcagaccgttaccgtgacgctgggaggaaaaacctacactgcgcttgtcggcagtgacggcacctggacgctcgacgtgccggcagccgacctggccgccctgagccagggcgcgctgacggtcaccgcctcggtcaacgacaaagccggtaacagcggccagaccacgcacaccttaacggtggataccgtcgcgccaaccgtgaccatcagcaccgtggccgatgacgatatcgtcaacaacgcggagcagctggcgggccagaccatccgcggcaccaccacggcggaacagggccagacggtgaccgtctccttcaacgggcacagctatcaggcgaccgtcggggcggacggatcgtggtcggtcttcgtaccgggccgtgatttcctcggcctgagcgacggggagtacaccatcaccgcgtcggtaagcgacagggcgggcaacccgggcagcgcaacgcacgacgtgacgctgaacggcgatgtcccaaccatcaccattaacacctttgcgcaggacgacatcgtcaacgccgccgagcacggcacgccgctggtcgtcagcggtactaccgacgccccggcgggccagacggtgaccctctcgctgaacggtaaaacctatgcggctaccgtccagaatgacggcacctggagctacacggtcagcagcgctgacgtggccgcgctggcagacggcggttcttacgtgattaacgcccaggtgagcaacaccatcggcaacagcgccagcgataaccataccgtcacggtggatctcaccgcgccgtcgatggggatcagcattgattcgctgcaaaacgacaccggcctgagcgcaacggatttcatcactaacgacagccaggtcgtcgtcaacggctcgctgaccgcgcagctcggcaataacgagaaggcgcagatcagcctcgacggcggcgtcacctggatcgacctgaccgtgaccggcaccacctggcgctacgccgatggccgcaccctgacggacgggacgtatcagtaccaggtccgcgtgattgataacgcgggcaacgtgggggccacggacagccaggacgtggtgattgacctgacgaagcctgcggcaaccaccattaccgtggattccattacgcaggataccggcctgtccggcagcgactttatcaccagcgacaaccagatcagccttaaaggcacgctcggtgcggcgctgggcagcggcgaccacgcgcagatcagccttgacggcggcgtcacctggatcgacgtcagcgtcagcggcctgagctggacgtatgtcgatgggcgcacgctggccgacggggattacaactaccagctgcgcgtgattgacgatgcgggcaacatcagcgccaccgcctctcaggtggtgaccattgatacggttgcaccggacgccagcaaaacgatcgccatcgacagcatcagcgacgataccggcctgagcagcagcgactttatcactcgcgacacgtccctgacgctgcacggctcgctcggcgcgacgctggccgacggcgaatacgcccagatcagcctcgacggcggcgtcacctggcagaacgtgattgtcaccggcaacagctggtactacgtcgatagccgcacgctgggtaaccagacctatgactattacgtccgcgtggtggatgcggccggtaacgtgggggccagcgcccatcagcaggtgaccgtggatacgattgctccggatgcggcgatcacggtgtcggtggataacatcaccgtggataccggcttcgacaataacgacttcctgaccagttcgacctcgtacaccctgcacggaacgctcggcgctgaactcggcgcgggcgagtacgtgcaggtgagcatggacggcggcacgacctgggtgtacgccaccgtcagcggcacccagtggagctacagcgatacgcgtgccctgaccgacggcagccataactatcaggtgcgggttgtcgaccaggcgggcaacgtgggttccaccgcgtctcaggtcgtcacggtagacaccacgccgccgaccacggttggcacggtcgtgagctataccgacggcgaaggcgagcgtcagggcacctttggcagcgcggtggcaacggacgataactcgccgctgatcaacgggacgctgaaccgcgccccggacgacggcgagatcgtgcagctttaccgtgacggggttctgctcggccaggtgaccatgaacggcagcgcaagctggtccttccaggacaacggcctgagcgacgggaatcacacctacatcgtgcgcgtcaccgacagggccggaaactacacggaatccgacggctttgtgctgaacgtcgataccagcatcccgaccaccacggcggcgattaccgcgcagaccacgtcggataccacgccgatcgtcaccggtaccgtctccgctgacctggtgaacggtgaatacctggtggtgacggtgaacggcaaaacctacacctcccagacgggcggtgcggtggtggtcgacccggatcacaacacctggtatctgcagatcccggacggcgatgcgctgagcgtggcgagctacagcgtgaccgcgcaggtgaagagcagcgcgggtaacggcaataccaccggtacggcgaccggcagcctggtgattgataccacctcggtgaacaccgactgggcaaccacggcggggaacagcaacaactccaccatgaccctcggcatgaacagcagcggtctgtggaatatcatcgctaacggccagtcttactccagcagcgatagctcgacctatgccggcaatacgctgactaacacccgtaactactacgtggtgagccagaccgccgccgactttgaccgtaacggcacgcaggacattttcgcgacggaaaatacctacgccgggtcaacgcaggtgatgtggacctacgatggcagcacctataacgccagccagctggcaatgggcaccaccatctggtacggcggcgtgattgcctacgataaaaccggggatgggtatctggatctggcgtacggtgactccggcgcggactccattacctatctgatcaacaaaaacggggtactctcgcctgacggcacctacggcggcgcggggttctggggacagttcaccaccatgcgtgaaatctccggcgtcgatattaacaatgacggcaccgtggatgtggttcagcacaccaaccgcagcggcgcgtactcgttaaccgtgatcaacaacaacggcaacggcacgctctccatcggtcagaacctgacgaacgtgtttgtgcccaacgcctcgaataccaccacggcggcgtccatgacgtgggcggacttcaacggcgatggctacatggatctgtacctgggcagcagctacaacaacaacggcggggtgatctactacaacgacggtaccgggaagctctcggccaccaagagcgcggtggaggcctctaacgcagcggcgggctatctgtcggtggcggtggactggaacggtgacgggcagatggacatcgtcaagctcagcacctacggcggctcgcagacggcgacgctgttcaccaacaacggctacggctccacctggaccgccagccagctggcgtccggcattgcttacgccaccggcgtggcggcagtggactacaactgggacggcgcgcaggacctgctggtctctcagcagaacggcaaggtggtgctggtgcaaaacagcaaaaccattgctgacggcaccgcgatgcatctgcacattgtcgacagcgagggcatcaacgcctactacggcaatacggtcaacctgtacaacgccgcgggcgtgctggtggcctcgcagatcatcaatgcccagtccggtatcgggtcgaacgatacgtccgcgctggtgagcttctacgggctggatccgaatgaaacctattcggccgagatcctgaagatcaccaacggcgtgtcggataacgtcacctggagcggtctggaggcgggcaacggcaaagagggctacgtcctgacggccgaagcggccaccggcggccacagctga

SEQ ID NO: 171794 - DNA, 978 bp, Enterobacter cloacae
atggataaaactactgatgctcaatttgagtattggaggaatgaaacagtagccttccttgctcttacatccattaagggagtgagttattggactctgaggaaaattgctgagtcaaaaatcggttttaaagaaatattaaaatctgcggatgtaaacagattagcaggttttcttagagttgcattacccaatgaagatgaatgggaaataatgcaacaaaatctttggaatgatggtattgaaaaggcaagggagctcagtaaaaaaggaattaagctggttttctttgaacatgagtctttccctaaaagtttgaaagaaatcccagaccctccttattggatatttgttgaaggtttacttgaaaatttgacatctaaatccatcgcaatagttggcacgagaaagccgacagatgatggtatttttattactaaattagttatttcatctattgtcgatagagggtttgtaactgttagtggtttggcctcgggaatagaccagattgcacatatcgaatctttacgatacggtatccccactgtggctgttcttggaaatggtatatttaatgagtaccctaaaggttcaaatttattgcggaagcaaatcgttgaacatggtggaaccataattactgagtatttacctagacaaagctatagcgccgaaaactttgttcgaagaaacagactacaagctgctttatgtcaggtattggttccggccgaatggaagataaaaagtggtactgcacataccgttgattatgcacataattatggtaagaaaattgtcaacctataccttccattaacatatactgatagaccagaattagatttttcagcaaaaaatagaaatgccaaaaattatgaagtcccaaatgaattagtagcggcaatagattatattatttccgataataaagttgaaaatttaaaacctacacaacagactcttgacttatag

SEQ ID NO: 171795 - DNA, 1224 bp, Enterobacter cloacae
atgactagaataaagggcgttattctaagcgttgagggtaccatttgtccaaacggtacgttagatgaagcaatattttcagaagtagataaattaataaactattttaagtctaagagtatagagtatgttgtacatacaaatcgctcttggacctataataaaaataataagcttgaagattttctcaaggagaaatggggggattttagttatgtctgctatgcggatgataataccatacctccgaagcctcgtgcagagtcaattgaatacatattaactatgaaaaagtgggattcattagaaaccctttacattggttcgactgatgatgacatgagaacagctgtaaatggggaacttctcttccttagagccacatggtgggcgaatgctactgattatggttttgaattttcaacgcctaaagatattgcaagatttatagatactttctgccttagatcacatctctggtgtcatgaaattcatgatggggcttttaatttttatgcattagccccattcagtacaatgaaagaggagtatacattatattctcaggatgctagaaatgctgccaagcatggcaccgggcatcccgatttttggattggagcgatagtttctagtttatattttagtgggattcataaacaaatagattacgtaagtgtttatccgggacataaagctggatatggcaatccggtaatggatgaggcaatctctatttttggtaaatgcttccgtaaaaattatttgcctgatttaattatcaggcataaagatgcaatcaaatctcaaacagctaggaataataggatcgcaattgactttctgaaccaattgaataccatttatttgaattttaagcctatgcgtagtgcaacaagagcttatgttagaagccctttaggtcctggtaaaacggttcttttaatagatgatataactactaaaggatatagcttggaatcaggaagagcttacatcgagcagactggttcaaaagtaatattggcatcatggttaaagaccataaatacagatattgatgtgcttgctcctttgggcaaatttgatccatatgttccaaatcaatttgaagttgcacgagtcttaaaacagcattcatatcgtcaaaatattgtagatactttagctcccgctgagatatcagctatgttggaaagttatactaactgggagtggcaatag

SEQ ID NO: 171796 - DNA, 684 bp, Enterobacter cloacae
atggatgctaaattaaacgaggatgcaataagctgtattaagaatgatcttcattcatatgaactactgcatgacaagtctttatcatacataaaaagggacccagaactaaaaaaattagtacatagttataagacaagatttaaagatttagagcatttaaaaaacaaaatagaaaggaagaatgcagaagatcttttattgcctcttgatgagcgaaagggaccaataacttgtgataacataaagcaaagaattactgatatatgtggaatacgaattctacatctctatataggtcagtttgaggaaattcataaagccttgatgaagtatgtcgattcgggtgagttggcactctatgaagcgcccaaggcttatacatgggaccctgaatattcgaaattatttgaaagtcttggagtagcacctaagttaaaagatagcttttatactagtgtacactatgttttcaaaccaagagccgatagcgatattacttgcgaggttcaagtccgtactctttttgaggaagtctggggggagattgatcattcttttaattaccctaataaatccgaaagcaaagttgtacaggaacaacttaaagtcttagctagagttgttggtgctggaacaagactctctgattcgatatatgagttaaataaattacaaaaataa

SEQ ID NO: 171797 - DNA, 1098 bp, Enterobacter cloacae
atgaaaataatttcagtttttaataataagggcggtgttggtaagtcgaccttaacttaccatttaggcgctgcattagctgaaaaaggtaagaaagtacttttgattgatttagatcctcaatcaaatttaacattgtatggtgttacggaagagcgattagaagagatttggaattgcgaagatgatttcattaatgattataaagctgcaaaatcaaaagttgagcggcaggagttcaaagcttttcatgaaagaaatcattcaattcactatttgctaaaacccattgaagatggcgagtctgatgaaaatatattatcatctcctgtttgcctaagggataatctagatttaatcccaggcaggttaactttgcatctttttgagaataaactagcgaaacattggagtgaagcttttctcggtgagccgcaagcagtcagaattgtgacttctattagaaagatttgtgaggagtatacaaataaatttggctatgatgttgtgctcattgatacttcacctagtttaggtgcgttaaacaaagtaattatatcaagtgctgatgcaattattattccttgtgcgcctgatatgttttctgattatggtatcagaaatattggtaatgcactttcagtttggtataaagaatttacaactatgtattctttactatcagatagcaagagaaaatacttccctaatgattttgtgaaacttttaggttatacaatttataatgcaaagaaacgttcagatgcaccgaatgaactcaatgtagctttggcccattataattttgcaagaaaaatccctgatacaattaaaaaatatgttccacaaaattgcttgctcaatgatggtaaaggctattttgaagcctctatgggtgaaaattcagttatccatggtcatggaactctcccaacgatggcccaaaaatacaaagcaccaatgtggaaggttcctgatttacctaatttgcaggaggaaaaaggaacaataaaaggaaattcgaaagattattatggtactagggcaggttatattaaattagctcaggacgtattggatagattggagcttttataa

SEQ ID NO: 171798 - DNA, 888 bp, Enterobacter cloacae
gtgattgtaaaacatcacgatgcgggactggcctcgttacccccgtttatcttgacgtttctcgcgatcattctctactttatctgggtcgcgataacgttatttgtcttccgtatccatgaagaccgtttttcgctggaacgtacgctaatcaaagccgtgataacaaataccttcagcgttaactatcagcccattattcgcattcgcgatcaaaaaatcgtgggcgtggaagttctgtcgcgatggcgcgatcaaaaacacggagacgtctcgccggagctgtttatcccattaattaagaaaatcgggctgtataaaagatattatggcaatgttatcggtaaatcgctctcagaaattgccccgctggcgattaagcatcagctgatcgtttcaatcaacgttgggcggaaagaaattgaagacggacagtttattaacattttgcgtcgcgagtgcttagtcaacaaccttcccctttccctgatgaaggtcgagctttctgagaaagccgtttccgcggcggatatccttgagggattctgccaggaactaaaatcgcttggcgttaaaatttcaatcgatgatttcggcgtgcaaaattcaaatctggcccggctgtcacagcttgaatatgatgaaatcaaaattgacaaatcgctggtggatggcatcagcgaagattataagcaaaacatctttgttattttcagcgatgccctcgcgaagttgaataaaacccttgttttcgagggcgtggaaaatgaaactcagtatcgctttattgcggacagatatcccgacgcgctgatccagggatggtatttttcaaaagcactcacccggagcgagctggcgaagcgactcaccggcgtcgccccctaa

SEQ ID NO: 171799 - DNA, 510 bp, Enterobacter cloacae
atgaattttaaacttatggccattgcggcgatggtatctttttcatccatggcggctgatacggtaaatattaacgttacgggtaatattgttgcttccccttgtgtaatcaatggaggaagtgccaacctgaacgtggatttaggttctgctattcaggcctcagcgctttccagcgcgggatccacctcttcacccgtttcatttacgataccgattactgcctgtcctgtcggaacgagtagcgttctggtgtcatttagtggtacaccggatcctgttgccggaactagctattatgtcagcaccggcacagcgactaacgtagcggtgggattgtaccaggcaagcaatggcaatctcttggggaacgggagttcggtgacccaaaccgttcaaagcgatcgcaccgcctcgttagccctgcaggcgaaagcttattctgcagcgggtagcgtcatgccgggaaccattaattccgttattgttgccaccatgcagtataactga

SEQ ID NO: 171800 - DNA, 225 bp, Enterobacter cloacae
atgataatcaagcttgatccacttttttatactcagagctctatagagaatatagctcaacaattcaatgaatatttgagtgtggagtttactattaaagaggcgttctgtctgaggattaataccaatgaagaatatctctcagatgcacctctcattatcaataccttcctgactaacatccttgatctcagtatacaggacatcatgcactatgagcgttag

SEQ ID NO: 171801 - DNA, 1098 bp, Enterobacter cloacae
atggcagtagaaaatcgagaaagacttaacgaaatcattcgtgaactaaaagccggtatgccctcaaacccaatatcagtgcgagaattcataagctggtttggcgcagagcgtcgaggctacatggttgcgtacaaaattcgcaaagcattagaaaacttaggagttaaaaccgaacctgattttgatagtgtgccgctggatgcaaaaattactatctatgcacctcctaggagtgacgcaacgacccatgaagcgggtgaatgcttagacgaagcaaccgaatcaggtaacggcgaattagctatacctgaaacagtatttcagcggcaagatgaactaatttccggtgcagtttccgagccagccttccgtgttagtcgactcgaagcatcagatgttaagctagtgaccgtgaaacctgacgccacattaacagaagccatcacattgatgttacggcatgactactctcaactacccgttatgaccagcgagcgagatgttaaaggtgtcattagttgggaaagcattgctccaaaactagcgttgaccaaatccgaatctgcggttgtgcgtgattatatgaagccacacagggaaataaacgccagcgactctattttttctgcactacctagaattattgagtatgcttacgtattagtacgatctgctgatcaaagaattagtgggattataactactaccgatcttagctctcagttcagacagttgtcagaaccttttcttttactatctgaaatcgaaaatcatattcgtaagctgatagatggtaaatttacgaaagatgagcttgttagcatagttaatccatctgacagcgagcgggttatagagtcggttgcagatttaacctttggggaatatatacgactttttgaaaatccagaattgtggaaaaaaaccgaacttcaaatagataaaaaaatctttactaaagagctcgacaaggtcagaataattcgtaacgacgtgatgcactttgatccagatggtatctcagaggaaaatcacgagcttcttcataactttgtaaggtttattcataccatacaaagcttatcaagaaaataa

SEQ ID NO: 171802 - DNA, 1311 bp, Enterobacter cloacae
gtgattcttatacaaaaaatagaaattaacggcttcaaaagcccaacatcaaaattaagtgtattgctttctggtagtaatatctctgttatttatggagataatggtagtggaaaaactacttttttaaaaatattgcattctattttagaaaaagatgagtccattttaatccagaataaagtttcaagtgtcgttttatactatagttacccagatggtaattacgacagaaccacaataaaaagaaagtacgaatccagcaaacgaagtgattcacttaaaaaaaacgagagttctgaatacaattggacagactttttgaattctcctcttgctgaattatcttccttgtcgctaggcgtcgaacgcggggtaataaatcaagcatcacgtattgaaccaaggcagatttatgattattttgttaggcatagagaaattttaattaaagaagttgacttattctctatagctcatgagatgtctacatttttaagagtcactcacaacaaatataaatcaaggtcagaccaaaatcaatttgagatggtaaagaaaaatcttcacctccagtctgttaaaattgaaaacattgaaagccttttgcttgaaaaatataaaatggcaagaattacagccacaaaaagaatccaaagtgctttatttgataccttatctatagcaattaccttaaacgaaacatctgtagacagaaaccatagaacaagtcttccaaacgacttcgaacgtagattaatagaaaataaagaaaggattatcgaagcgcttgatgatggtgaagaaaataagttcaaaaacaaagtaatacaaatactttctgatgataatatcgaagaggaggtttctcgctataggcaccatgaaatcctcgggcaattatttatgaatatgatgaacgaacttgagttagaaaaacagatgttaagttcaataaaccttctaattgacacgttcaatcgatttttaatacaaggaaaagaattaataatcaagaacgaacacatctatgtgaaagtaggtaggatcacacatagcatcagcgaattatcaagtggtgaacgacatattctcacctttctatgcttagttttatttgaaggtggcaaaagaaacatcctgatcattgatgagcctgaaatctccctaaacataaaatggcaacgagaactactttcacttttttcagaactaatcccacaaacacaaataatagtggcatcacacagtccttcgctagcaaatcgcaatcctcaattcctttgcgagcttaatttgtccgtaggttga

SEQ ID NO: 171803 - DNA, 906 bp, Enterobacter cloacae
atgaaatacgaaattagtgaaattttaaacacagctcttatgactagaacgataagtatcatcgtagaaggtgtggatgatatacaagtatatgacagcatagctaaaagcgttgataaaactgctgaaatatttcctattgaaacgattgaaggatatttccaaggatgtaatcacgttattaaggcaatggatgatttacttgaactcccagcatccaatgttagctatgataactatattttaggcatcattgataaagatataaaggattatagaggtgaattacccattaacccgctaattttaactttaaaatattactcaatggagtctcattttgtacataaagaggttctacccagcctattcgaattaataactaaaacaccacattcactgatcacaggggagtttatagatcacttgtatgatcttattgccttaaataatgaagacttctttttaatctgccttgaatctttgaaaaattctttagatcctgattatgaaagtgatttcgcctatagctattctgaaggcagaattttttcggaagaagatgttagcaaagtaaggttaaaaagagatgagctattgacgttcgcggatagtttatccatatccagaaacattgatgacctcaaaaaaatatctaaaggaaaatggttactccatttcttctgtgtaaaaactttgagtgcatctcaacagttcaaagatttgtgtggcacaccaccaatacgacaatgtgttatgtgtagcggaaatggccattcaccgaaccattgcctttataaattaaaagactcgataacgtcaaaaaacttaaagccattattaatgcgtaatatttggcttaatgacttcgactacataagaaacaaaatcagctcgatgatttaa

SEQ ID NO: 171804 - DNA, 1287 bp, Enterobacter cloacae
atgcctactacaccggatgggtatgtttcatatttaaaaccaagcagcaataaatggaaagcactaaacgacgactcatatctttattggcgagaccttcaggccaataaagttatacaggatgcaggagctcctattcctcctgcgctaccattatctgaagtggaaaaaaaagacttaaaagaaaaccaagcgtatataaatgaatttttgctaaaatcattacaattccctaacttatcattttttgcaggcagcggtacttctctaggtgatgttggtgggccaagtatgtgggatctatggaagtgtgctatgtggatagatccaacaaaagacgaagaaggcaaactaaaaccaattgcattaagtgtatgtgagaaagttaaatatcaagacattgaatatcctaacattgagcatttcctttcaaattgcgaagcttttctggcattccaccatgacggtgaggtgcttgcatttttaaatgaagttaaaacaataatattaaataagtgtagagatttcctagaaaatggaagtagcgatctatcctcatatgtaagtcttctccaaaaaatggggaggcggagagtaagagatccaaggctaaaagtattcacaactaattatgatttaacatttgagactgccgcatcagaattaggtatgatggttgtagatggactttcctatacaggcgtaagaaggttcgatggtaaatattttaattatgatgtagttcatagagatgaaaatgaacatgaattcatagatggagtattcaacttattcaaattacatggttctgttagctggataagaaaaaatggacaaatatatgaaaatcaaaacccaacagcaacaaatgcctgtttgatctatccagcgaaaggtaaatatcaacaagcttttattcaacctcatcttgaattactttccagacttcttgatttcctcagaaaaaagaatagctgtcttattatttctggctttggatttaatgatgatcatctttcagaacctatttattctgcgataaaatccaatcctagcatgagattaattgtggtggattttaaatgcgccacacatataaacaacaagggtgagaatgggtctagtaaatattggggtttacttaaagaactttcattatcgggctatgatattcattttttgaatgcctctttcaaagatttcgttaatttaatacccaacttaagagcactgacacctgcagaacagttagcaaaagctatcaagcaagtgggaggaaacaactaa

SEQ ID NO: 171805 - DNA, 1722 bp, Enterobacter cloacae
atgaatagctcacttttacaaaacggtattttaagaagtgctttgaaagttggagttatttcatctatttttgctcaaatggcaagagttaatttagtatatgctggtgaagttagcggtgcctacattgatggaaatcgttatgggaaaggagaagtcggtgagattttattaattgaagggcaacaatctatcgttttaggcagactgattgaggtcaaattacctgaacgcgaaagaggagagatatcagtagagtctcagggaaatagaaaagttgatgcaattggaactatacagcttcttggcacaattgatgcctcgagttttcgtgtcgactcggggataaaatgttaccctcgattaggtgatagagtatattctgcaccgttagatttcatttcattaatacccgagctaataaacagaagcttaagtgatgacggtgaaaaccgaataggtatagtgttaggaaatatatcaggaggttcaacaagcattgttactgttgagccagacaaactatttggccgccactgcgcaatactaggagctacaggtggggggaaaagctggacaactgcaaaaatattagaagaatgtgcaaattataataattcaaagactataattctcgatgccacaagcgaatatagatcctttaactctgaggactgttaccattatcatttaggttcacctattaatcaagccaatggttctatagaatttagaatccccccaactgatttcatggaatcagattttatcgctatgtttgatccttcaggtaaagttcagggaccaaaactgaaggaagcgattaaaagtttaagattagttgcgatcgaccctactattgcaaccaatggtattctaaagaaaataaaacaacctaaaactgattatcgtcgctcaatgaacactggtaataattcaaaactagttgataatccctctcaaccatttgatatcactaaattaattcctcagatagttcaggagtgctgttttgataatggcgaagactcatggggtaatgcagccacgcaagatttgagctattgttcttctcttttaaccaggatacaagccgtaacatatgcaagctcactgaaagcggtttttcatggagatgaaaacgtcgcaaaactgggagatatattagaagactttttaagttcaaataaaagagttcttcgtttatgcctcagcgatgttagttatgaattttttgcgagagaaatattagccaatgtaattggtagaaaactattaactctcgctaggcttgaaaaattcagagaaaagccacttctagtcatcgtagacgaggctcataacttcttgggtaaaagggttggatcagaagaccattctattaagcttgatgccttcgagatgattgcaaaggaaggaagaaaatatggcctaaatatttgcctaacaactcaaagacctagagatataaccgagggtgtattaagccaaattggtacgttactagttcatagattaacaaacgatagagatcgagatgtagtggaaagagcatgtggtgaaatagataaatcagcggcttcatttttaccaagcttaaagcaaggtgaagttgcgcttgtaggagtagatttccccatccctatgacaattcaaatagcacagccgacttatccaccagagtccgattctccaggttaccgtaacgtttggaaaaaataa

SEQ ID NO: 171806 - DNA, 423 bp, Enterobacter cloacae
atgaatagccgcccaatgagcaacaaacaccacgaattattaggcgttccgaaacacgccaatcagcaccgtctttcccgactgactatggaagtgcataccgatgagcttcggattatggcgtcagcagtagagagctataccgacgagctgatagcagcgctggaagccgcagagaagcggattgctgatctggaggcgaaaaaagtaaaaattaaattgcctgaatcgttctatccggacggcgatatcgactgcccgttagtaatcaatgaataccagattattgaggcgattgttgcagcaggctgcaagccgatcgcagtctgtccacgatgtaattgtgagcttgatttaacccacaagcctgatggagctcattattgccaccccgccgcagccggcaaaggagaggcatcatga

SEQ ID NO: 171807 - DNA, 207 bp, Enterobacter cloacae
atgaaaagtgtcgacggcattgaaacaattcgtgatgtggagaactggctgagggattcagtcgggctcaccaaatcacaggcagttgggctaatagcccggtttaagtcagcgattcggagcgagtccgagggcgacggaaacgaagcacaaatcaacgctctgcttcagagcattaaatctttcccttctaatttaggtaattaa

SEQ ID NO: 171808 - DNA, 312 bp, Enterobacter cloacae
atgaccaccactacaccaataatgaccgcctcaggaagtgtacagtttcgccactatatggtgaccgttcacgctattgaacgctatatcgaacgcattggtggcgacgtggggaatctgatcctcgaccttaaaaacgcctgggtatttgatgtcagcaagaaaggcattccccgcgctttgtgcgcctcagtcgcacgctgcgaacgtgaaggtggatacgggctcaggcatgacaaggctatttttctgataaaacccaaggcgcgccagcatgtcattgtgacgacgttatctgcagaggtgaagtaa

SEQ ID NO: 171809 - DNA, 462 bp, Enterobacter cloacae
atgagcaaaatcactaacccggtagtgcttatctataagcgcgaaaacagtgatacctacgccgttgcgatcaccagcggcagtcaggactatcacgacgcagttctgatggcaacgatggaaccgggcataacctgcgatatcgtcgatacctggagtaaaacaggctactacatggcggcggagattgagctcttacgtcagcagattgtcgcaccgctgagcatcggggaattattacaacgcctggaatcacagactggcgagaaatgggcgcatcaagttaaagagcttaccgatggtaaacagttgtccatcacccttcccgatactggttcaaaagcattctggagcggtgcaggaaaaaacgagatattccatccggaaagctataagcgcagggtcaaagaagctatcgaacgagcttgtgtcattgccgggatcggcgtggaggtgaagtga

SEQ ID NO: 171810 - DNA, 213 bp, Enterobacter cloacae
atgagcaaaggccagcaaccagcctatccatgcccgcgcatcgatactccccgcggcatgacttaccgccagcacctcgttgtgcagatagcgccggtaatgctcacgaatttttttagcaatgatgcctggcaggattacgacgacctcgccagaaccctgatgatggctgtagatgccatcatcgaagctgagcgggagataacgaaatga

SEQ ID NO: 171811 - DNA, 123 bp, Enterobacter cloacae
atgaaaaagatgtatgtgtgctccctgtgggcactgttcttctcaattctgtttggtattggcgccgcagccggtgcaataggttttatcggtgcaatgaaaatgttggcaggagttctgtga

SEQ ID NO: 171812 - DNA, 579 bp, Enterobacter cloacae
atgtttatttataccgatctgctccgagccgctctgtgctgcacagccagtcaggaagacacacggaaaatcctgagaggtgtacacatcacgccaacccacattcaggcaaccaatggtattgcggccgtatcaatgtcacatggttcaaaaaccgaaattaagggtgtatttatcctgcacggtgatatcccggctagcgcagaaggaaccgtattccagaaaattggcagccagtggattgctgctcatctggacgactacgagcgaccagttgggcataacgagcttgaactcgttgaaagcaagtttccggatcttggcaagttgctgacgacagaggaagaaccctgttccgagttccccatttttgccgctgaattgctggctttgccttatcgcatgtttggcaaggaattcacatcaatgcccgttaatttcaaactctttggccctgaaaaaccatgccaggtgctgtttaacgtagctgttaacactttttacggcgatccagtgttggtaatcatgccgatgaaatcgacggtgttcgaactgcaccgtaaggcgatggaaggatga

SEQ ID NO: 171813 - DNA, 579 bp, Enterobacter cloacae
atgagcagcaataacgaagcgccagaaactacgccaaacggcatcaaaatcggaaatcgcgttattggctggtctggcgcggttaaacaattcgatggttcgcgctttgactcccgcaactcagaggggctgcgttggttagcctgcattatggatgccgtggcagctggttgggtttctttaggcgcagagaaagaactcattctgtggcgctggctggtagcaacagtattcatcaacgaagagaaggataagaacggcactatcgaaatcccgaacgaagacggtggtgttgatatcgcagtgatctattcgggcaagaaaggaaatttgagtatctatcccggtccgctgcgtttttctctcgccaaccatgtggaaggcattgccatggagaaatatggagtttgcgagggagcagcccttgcccttcgcatgtatcaggacatggtgattgccgatcccggatacggattcaggatgtcaccctttgggcgaaaagggcttgagatgcttcacgatgactacatcggagaggttaacactaacggcatgccagaagcgcatgtgattcactaa

SEQ ID NO: 171814 - DNA, 423 bp, Enterobacter cloacae
atgatcgacaaccgcaccgccagcgcaattgacctggcatttcagattcaccatacgcctgtgggcaacttgttcgttgcgatgcggcatggccgtatgaagcgctgcttcagccgcgatacggcgatccgctatctggcgttctttatgactaccgaagctttccgtcgttccggcttcgagcagcgctacccggatgtgcaggctgtccaccctctcaatccagaactgaattgttggcagcgaggaggcacaacagttgagtacatcggagcccaccagcgctgtgttcgacgtcttcgccgcattctggccattaagcgtgacatgacgaaatggtgtgagaagtgggacgccatgcatgaccgcttcgttaaagaggttgccgcactacaggccagcaaaccggagggtattcgatga

SEQ ID NO: 171815 - DNA, 267 bp, Enterobacter cloacae
gtggaggaattaactgatggcctcacaacaaacaattatgcacggaatgcagatccccccccagtcctcaacgtggatctgcatgtgcttccggatttcaccggacgcgtggttctttacatcgaaaaagggcgtgtgacatgcgaccgccggctgctcgacgacgaacatatttgcgcactggacacttttatcaaaatggttcgcgaagccgggttacgtatacaggagctaactggtggcactgacagcaattcgaatacctga

SEQ ID NO: 171816 - DNA, 363 bp, Enterobacter cloacae
atgacaatgaaaaacaataccattgaaatttatcgccgccgcgttgctattgcgacattaaaccgaatgaagcgcaagacaggaggttattgcctctccgtaaatatacccgataacaatatcctggttatcgagattaacgaagaatcaatgatgaaacttttgctgcgcttcgaaaaacaggctcggactgaattcaacacagaagcggaaacatttcttcgccagacgtatatgaaaagcgtcgatatcaatggacacaccgaatatctgaccgaaacaggaaagatgattgttgacgagatttttgcggaattaattaaacacgcgaaagagaaatacgtatgtggaggaattaactga

SEQ ID NO: 171817 - DNA, 273 bp, Enterobacter cloacae
atgaatattatcgtcagaaatgaagtcgtgaataacaaagcccatccagccaatcaggatgacgacattctttacataaacaaagcccacaaaacagcagagtgtgccaataaatatgcacatgagctgcgtgctgaatttacccagttgcttatgccagcaatcacacgcactgatgtgaaggtagcgggaagattcacctcattacttaatgagctttgcttcatgacaaaaatgacgatggagaacacctcaaaggggggggggcaataa

SEQ ID NO: 171818 - DNA, 423 bp, Enterobacter cloacae
atgatgaaaacccatgttgaaatgttggaaagcatcgcagctgatattgtcgaaaacacctcgttacttgaggtgatttaccgcatcaatgaattgccaccagaagccgataatgcaattgcttgccttattcgctcaatgcagaaaacgctggatggtgttaatgagtatgtttcgatgttacccactactactcgaggtgataaagcaaaagatagaatcgatattgatgatatcgctgatgatgtatttaatgtgactattacagtgaaccagcttaacgaactggcacatatatacaatgagtcatatttcaccgataaagatagtgacgatccaaaatgcctgatgtcagcaacaatttatgactacgcaagaaaagttaaggatgaactgaaaaccatcgaaactaaattaggttaa

SEQ ID NO: 171819 - DNA, 258 bp, Enterobacter cloacae
atgcctcactccctgctagactcgccgtggcatctggcaaaaatgggagaaaaagacaatctagtggctggtcaagaacaaccattaaacaaaagagagagccgtcttgtagagctattcagacagatgcctgaaagcgaaaaagacagaataataaatgatttagcacaaaaaaaacgagattttgacaaacttcttgatgaactaatggccgtgaaagctgcaaagatgccaattgataaaaatgaaaatgaataa

SEQ ID NO: 171820 - DNA, 240 bp, Enterobacter cloacae
atgtatagaggattgctctcaatcagggacgttatgactacagatgagtggaagcagttggctcaactatcgggcacgagcgtcgcttacttaaatcaaatggctttagggttccgtcgtccatctgtagcaatggcctcacgtattgaggttgctgtatctaaggtttcccccaacctcagtttgaaaaaagaaaatctcattttttctccattgaggaatagaagcgcagaggtgtga

SEQ ID NO: 171821 - DNA, 480 bp, Enterobacter cloacae
atgccacagcgatattctgaccttgaggcgctaaggatgatgctggttgatcttgagcgtaagtttcctgggtctgtagttatcgatccagctactgggggtgtaagtctaattgggtggtcattggaacaatttaacaattccaaagacgataagggcgccaccgataacatcgaaggcaataccggccaagctgacttttctggggtaaccggacagcttcccggatggtcggccaaaaactccggggatcaatacctcctggtaggggtggttaatccattcgccgactccccacaaagcgcaaccaagggaaatgagtccagtacctgctgtcgggtatgcagtgaggatcccggttccattcaccaagaagacaaagaatccgccagcaataagcactttgtaccagtagttaagcgcaagtttagcgatcgggttttccatatcctgtctcatttgatgttctggagcggataa

SEQ ID NO: 171822 - DNA, 804 bp, Enterobacter cloacae
gtgaaaaataatatcaataaacatctgaataattcaagtaatgatgctgaaagcctacctgttattgcaggtgtggaaatcactaccgatgctgaagggcgttttaacctgaatgctttgcacaaggcgagtggccttggtgctaacaaagcccccgctcagtggttgcgcactcaaactgctaaatcgctgatcgctgagctggaaaaagaaactgtgcagatttgcatagtttcagacgaaggcaggaatggcggcactttcgctcacgaactgctggccattgagtatgccgggtggatctcaccagtattccgcttgcaggtgaatcagaccttcctcgactttcgcacaggtaagctggtggcggttaattcagatctgcctgatttttcagacgaagtcgcagctgctcgcgcatgggctgacgaacgtgaagctgcccgtcgagcacttggatacgtcgagcgccaggcaaagtacatcgagcacctggaaaatctctttcatccgggtatgtctccttgccagttctgtaagcagcttaacggcgtcaacgtccagcgggtcaatgcgtttttattcgagcataactggctatatgacgatcagccaaaagctaagtatccgcgctggcgggtaaataattatgcgcgtgatctgtatctcagtgagcgtaccgggcaggtagagcaggacgacggcgatatgcgcgacacattcaagccgatcctgctgcgcaaaggcgcggtgtggatttaccgacactatctcaaggggcatcttccgatgaagaagcgctag

SEQ ID NO: 171823 - DNA, 897 bp, Enterobacter cloacae
atgagcatgctttttaattttcgccctctagtcatcaaccctgagcttgctacgcgcatcggtctgaacgaagcgatcgtattgcagcaggttaactactggattaacgacaaagagcagggagttatccattctggtcgtcgctgggtattcaacagctatgagtcgtgggtaaaacaattcccgttctggtcagcagataccgttaaacgcgcttttacatcactcgtcaaacagggatgtctcgatgtcgagcagctcaataagtcccagcatgaccggacaaattattacaccatcaaccatgattgcgagttgcttaatgatgcggaacaggtgccctcatcgaacggggcaagttgccctgatcgacaagtgcaggatgcaccgatggatgaggggaaaaacgcccgctctctaatggttactacaacaaagactactacagagattaaaaacactcttggtgcatcggctggcgccgctacaccgacggccatttccgaaagtggtaaatcatctgggaaaaccagtggtacgaaaccagcagcgcgacaggaatactctccagagttcgaaaccgcctggcaagcatacccaaaacgcgctggtggcaatccgaaagcaacggcctacaaacactggaaggctcgcatcgccgacggcgctacggcatcagagttgctggcgggcgtgcagcgctacgcggcctacatccgcacgacgggcaagcttggtactgaatacgtcaaacaggcggcaacgttctttggacctgatcggcatttcgaagaagcctggcaaactccatccgctcccggaggtgggcgtcgcagtgcgcttccggtatctggcttcagtgaacaggattacggccaatcagactgcaactggtga

SEQ ID NO: 171824 - DNA, 882 bp, Enterobacter cloacae
atgctgaacatcaaacaacgcgaagaaagggattctatgctggcgaaacgtgaagggcttcgtgaagaactagcgttcgctgtagaacataaaaaaccgtggcagttaaggggctgggagtcaggagaagtccacaccgcagcctgcgaaaaacatggcgactatgagcgcatgtcgctcactgggaaagcgtttcgtggtaccgaaaatgttaaacattccctgtgcccggggtgcgtgcgcgatgagctggcggcagtcgatgccgggctgcgtgcgttgcaggtatctgacctgctggacaacgtcgggatcgcccgccgatttgagggctgtgagtttagtaattatcaagcggttaatcagggtgccgcaaaaaaccttgcagcatgccagcgctatgtcaacagctggtcggagcgtcttaacgcaggaacggggctggtgatgaccgggaactgcgggacaggaaagaaccatctggcggtatcgatggcaaagagcattgttcgtgagtatctggccagcgtggaaatcaccgatgttatgcgccttacccgggctgtgaaaaacacgtggcgccatggcgctgacagtaccgaagaagacgttatcgagcgtttcgcatcactggatctgctgattatcgatgaggtgggcgtgcaattcggtagtccgacggaaatgaccatcctgcaggaaattatcaacgcccgctatgagagcgtacttccgacaatcctgataagtaacctgacctttgagcaattgaaggagtccatcggtgagcgcatcgtagacagggttaccgatggtgggcgaaaccgtctggcgtttggctgggaaagctatcgcgcaattgctgcagggataacggcatga

SEQ ID NO: 171825 - DNA, 834 bp, Enterobacter cloacae
atgtttgttccatttctcattatgttacgtgaagggctcgaagccgcccttatcgtgagcctcatcgccagttatctgaagcgaacccagcgcgggcgctggattggcgtcatgtgggtcggggtattccttgccgcggcgctctgcctgggcctgggcattctcattaacgaaaccaccggcgagttcccgcagaaagagcaggagctgtttgaaggtatcgtcgccgtgattgcggtggtgatcctcacctggatggtgttctggatgcgtaaagtctcgcgtaacgtgaaggtgcagctggagcaggcggtggataacgcgctgcagaaggggaacaaccacggctgggcgctcattatgatggtctttttcgccgtcgcgcgtgaagggctggagtctgttttcttcctgctggcggcgtttcagcaggatgtggggatctggccgccgctgggggccgtgctgggcctcgccacggccgtggtgctcggtttcctgctgtactggggcggtatccgcctgaacctgggcgccttcttcaagtggaccagcttgtttattctgctggtggccgcgggtctggcggcgggggcgattcgcgccttccatgaagcgggcctgtggaaccacttccaggacgtggcgtttgacctcagcaacgttctctccacgcactctctgaccggcaccctgctcgaaggtatcttcggctatcaggaaacgccgagcgtcagcgaggtggcgatgtactttatttatctggttccggcgctggtgctgttcgccatgccgccgcgtaccggcacgcaggcgtcgcgcgttgcgccgtaa

SEQ ID NO: 171826 - DNA, 153 bp, Enterobacter cloacae
atgagggaagagagttcatttccaagagaatacctattagtttccaaatcccaccaatattatcggctggatggcgaaatgttttttctcatttttggcagcaaagttttccaagtgaatttgaaaatttgcaccatgacacatcagaattga

SEQ ID NO: 171827 - DNA, 654 bp, Enterobacter cloacae
atgttcgatcggttggttcgtatgcaacatttcggtttgccgacgcgtttgcttgacgttactagtaatccactcgtagcactgtggttcgtaaccgaaacgagccatcgtgaaaacgagcgccatggttctgttcaagcaatgctgattccaagaggtagacagcgttactacgacagtgatcgagtaagttgtatggcgaatcttgccaatttgaaaaactcacaaaaagcagcattatttagaaatgcacgaaaaatcacgtccatagaagaatttaataaaactccagaagcagatatgctcgtttttcatattgggatggaaaaacccaattttagaccgttgattaacccctttgatctacttcaccctgtttatgaaaaactcaaaatgtctaataaaaggattgttgctcagtctggtgtgtttcttctttatggtactgatgtcaacagaagtaacggtgaagaactaacgagatcggctagagtatggatccatgaggatgataagcctgatttcagaagagagcttgagatgttaggtattcatgaaagttttcttttacccgaaattgataaatcctcgaagtttatcattgattactatagccctaacgtaaggggacgcaatgtggatgttcttctataa

SEQ ID NO: 171828 - DNA, 1155 bp, Enterobacter cloacae
atgaaaattcaaagtgttgtcaaaaaatgtattttttgtggtgataagcctgaaaataaaaataaagaacatgttatacctaagtggcttattgaaatgactggtgataaaaaacgtagcggttattttggttttgataaatttactgaagccgatgttgcagcaagcaatacattggacaatgaaatgggaaaaccacatcgtgtatatagttttaattcatttgcttttccagcgtgtgaagaatgtaataaggcatttggtcgtaaggagtcagcagttaaaccaattctgaaaaagataattaataatgatggcattgtaaggggggaattggattttttctttgattggttagataaagttagggttggactttggttaggaatgaggcaattagataaagatatcgcacaaattgagcctaattatgctataaatcaaagggttgctatttttgatagggttttgatggttcgaagaatcaaggggatgccggatggtattaacttctatggtgtagaaacttattgttttgcaatgcaacctatcgcattttgcttaagagtaaatgagttcttctttttcaatttatcaacatcttttttggtgtcagaagggttaggcttcccatttagtgaaggagagatactggataaaaatagtaataagataaatttttccgtggtggaaggtaggggttccattgtttctccgttatctaagaagagtgggatctctatgagcgacattttttatcaaccaatgtttggtggtgaaataggttcattttacaagcatttttataataatgaatacgtgaaagagcatagtattaattttcatgagggacgagggttaatattcagaggggaagacaccccaactcctttgaaagaatatgaactcatttattttaattatattgaaagtcagacaatttataacgaaccagaaaaggcaatgttggaaatcgttaaatggcagtcttggttattaaatacctttaaagaaaggttggatttaaaagaactaacgacagagcaaaaagaatacgttatacataaaataggtgtggctaatagaataaatgatttctatattgaaaagttacagaatacggtatttgaaagaacaattgctttttggaagtag

SEQ ID NO: 171829 - DNA, 225 bp, Enterobacter cloacae
atgctcgctcttaccgatatacagttagtcgaagggcagaagacacatgttcttcgacacacctttgcgagtcatttcataatgaatggtgggaatatactggtgctgcaaaggattctaaagcatgcaaatagccgagaaactatgcgttatgcacattttgcaccggatcatttagaagaggccgctgtgttaaatcccatctcaacctacaaaatgaaataa

SEQ ID NO: 171830 - DNA, 846 bp, Enterobacter cloacae
atggtcaagccgaaggtctttatagcttcatccagtgaaagtttggcagttacaagagcgatcagcactaattttgagcatgactatgaagttaccccttggaatagtggaaattttacgctctccagtacaacgattaacgatcttattaccaggtctgcaacaacggattttgcggtctttgtgttccaaccagatgatttgattgagtccagaggtaagcatgaacatgttgttcgagataatgttttatttgagttaggcttatttattggcgctataggtatcaaaagatgttttatcgttaaaccacgaggcgtggaacttaaattaccaagtgatcttttaggcataacttcggcagagtacgatgctaatcgctcagatgctaacgtcgacgcagcacttgtgcctgcttgccatagcatggacaaggcaatgaaaactcaagggggattgaaccggatttcacttaatgcaaatgaacgcgcaatcgttaatccttataactatgaaatcaacgaggcgacaataaaagttttagctgtatgtttagagactcatacaaaataccctgaggggatgtccactcattcaataacatacgctctgaaaggtatggatgaaagcttggttaacttccaattaattaagcttgaacgtatgtctttaatagagcgcacacttcaagtagataataataacggggatgaatactattcatacacaatcaccgatacaggcattgataaattacttgagcatgaagaactattatcaaaacgagcgccaaaagcaaaaacaaatacagctccacttgatttctcagatgacatacccttttga

SEQ ID NO: 171831 - DNA, 702 bp, Enterobacter cloacae
atgtcatttattttacacacagagtcaccttctactgaagatatcattgatggaaacagtcacaataatatctcgttaaaaattgctgatactctcatgcgagatgacgtaaacatcgttgggataaatgggccattaggttcagggaaatccacagttataaaacttcttgagaaaaatcttcccaatggtaattttcattttattaatttcgatgcggagttataccaacaaggttctacgaaaaaagctttaataacaaaaatatacgatggtttagaacccaacatacctaattcacttaagccaaacctgagagagtttaaagataatgctcttgggaataatgttacttataagaagactcaagatagtgaaataagcacttgggctatactatttttattctccctttttatatgcacacagtcaattcgaccacttcagactgaatggagtaaaccatcagaaagcatgagttattggctcataggtttgtttattttattccttacatcaccactgcttctgtctgcaatttttttcattcgttcattctgggataaatctttaaaattcggaaatattattaaaaaaaattctgtagatataatctcagagaaaatgcttgtttcaaaggatgtaggtagtatagctgtctcttatacacatctgacgctgccgacgagcgatctagtgtag

SEQ ID NO: 171832 - DNA, 177 bp, Enterobacter cloacae
atggtgaagcgctaccggacgcatccgaaaccgcacctggaaaacctggcgaacggtcggaaggagtctataccggaagataattacggagaggcttcagctttgtttggggtgatcacgtacattatcaatgatgcgaggtcgggggagttcgacgactgtccggtgatgttgtaa

SEQ ID NO: 171833 - DNA, 459 bp, Enterobacter cloacae
atggaacgtattttatttagtgttgccaatcaggcgttttatggtgaggactatccgtcgctaccagtcgatgttattgaagtaagtgatgcggagcatatgcgcctcattactggcatgaatgaccatgagcggcgggtttatttagaaaatggtgaatttacactatccgaccgcaagccatcacagtggcatacgtgggatgctgttgcccatgaatggtacctctcgcctgaagacgctgcccgtatccaaacagaagatgctgaacgtcagaagtcggtactacgtgttaaggctgatactgagattggctggcgtcaggatgcggttgatgctgatatcgcaacggacgaagagaaagtggcgctcgcagcctggaagaagtaccgcgtcctggttatgcgcgtgaatacctctgcagcagaaattcagtggcctgaccttcctgaagtgtaa

SEQ ID NO: 171834 - DNA, 306 bp, Enterobacter cloacae
atgtttgccctggccgatgtgaacagcttctatgccagctgtgaacgtgttttccgaccggatttgaaaggaaagccgatagtcgtcctgagcaacaacgacgggaacgtaatcgctcgcagtgccgaggcgaagccctggatcaaaatgggaactccgtggtttcagataaaaaacgaaaggtacccggaaaaaatatattcgttttcaagtaactatgaactttacgcctcgatgtcggcgcgcgtgatgaactgcctggaggaactggccagtattcaattgatgagatgttcctcgatttga

SEQ ID NO: 171835 - DNA, 330 bp, Enterobacter cloacae; identical to SEQ ID NO: 140686

SEQ ID NO: 171836 - DNA, 360 bp, Enterobacter cloacae
atgctgaccgggcaaatcaaacagttctggcttgagtctggctgcgtctatggttatcgcaagatccatctcgatctgcgtgataccggacagcagtgcggagtgaaccgggtctggcggctgatgaagcgtgccggaataaaagctcaggttgggtaccgtagcccacgagcacgtaaaggcgaagccagcatcgtgacacccaacaggctccagcggcagttcaatccggactcaccggatgagcgttgggtgacggacataacctacatccgaacccacgaaggctggctgtatctggccgtggtggttggcctgttctcccgaaaagttatcggctggtcaagcaaccccgcatga

SEQ ID NO: 171837 - DNA, 294 bp, Enterobacter cloacae
atgaaccgatccgatatgaattaccatgattactcatggacagctgtacccggcgataatccgcgaatgactacactagatgccacgcgctttagccgtcacgaaggttacgaggtattagatttgattaactctttccaagccaaaggtggcggtactttggcactaaaatcacagcagattatcgagtggatgctacatgaacgcctgccacccaatcttcaggggcgagctcaggttaaaacgtgggtggttgagaacttcccgacgatgaaaagcagttatcctttctga

SEQ ID NO: 171838 - DNA, 930 bp, Enterobacter cloacae
atgaaagagaaaataaagaaattcggccttccttggatatgtcttttcatcgtctactttatatttttcgtagtggtctcagccaccgttattagacatctaataaacacgacggaagaaataacattaaccacttatataacgccaatttttggcttggctagtttatttgtggccatggtcaccatcagatacaacgcagtaaccaataaagaaaaaaatgcattggatttcgtaaaagaatttaaagaaaaggaaattcatgatgcgatggttgagatatacaaaacaaaaagaaaatacaaaaacaaaaccaataacagattaaatagaaaagacatatccccctattgtgaaaaggctgcggcgatatcaagcgatgatgttaaagtaattattccggcagagacaaaaattgatctcactgaaaaaattgaaatgctaacagaagaaatgaagcatgtttcatctcccggaacaaaatctaaaataagaggaaaaatatcctcaatccaaaaaaagctacaggtaagcaatgagttagaagagatatgcaagtttagatcagctcttgttaaagttctaaacttaatggaacgatgtgcaaacggggtgagatatggattatatgacgaaggccttatatacaattcttacggcacacaattcattgaaatatatgaactcgcattctcttttataaaaagaagacaggacgacgaggataaacttttcataaatgcagaatggcttgcggtaaaatggacacttcagaaggaaattcaagaagataagccaacgtttatgaccaatcaaaaaagggctatacagcatgccaacgaaggattgaagtcacatatgaaagctccagataaaagtaaacttgagcctttattgtcaaccttgcaaaagttgaaattcccaagataa

SEQ ID NO: 171839 - DNA, 237 bp, Enterobacter cloacae
atggagccagtttccccattaagcacgtacgaactgaggcctgctaatgacgaaacaagagcaaaccgcgctaaatatggcgaaattcatccagggacagctctcctgctcttggataagctcaatgagctcgatctcgacagagaggcggacatgtgtgaaaaacttcatgaggatgcagagctgctctgcatggctctctccgggcggctaaatgaactacaggatgcgggttaa

SEQ ID NO: 171840 - DNA, 387 bp, Enterobacter cloacae
atggcgaaagtatcgattagtgaggccgcacggctaaccggaaaaagccggacaacactgcacaggttgattaagacaggtgaactgtccacctgttacggaaatagaaatgctagaatggtcgatgtctcggagcttctgcgtgtttttggaccccttaaacaacgtccgcccgaacaggtgtctggacagcccagtgaacggtctgacacaggtgtttctacgcagggtgaacaggtcattgaacagcttcggcaagaagtggaacatctgaaaacgttagtttccgccaaggattcacacattgatagcctcaaacaggcgatgttactgctcgagcacaagcataccggggattcaccctggtggaagttctggaaacgctga

SEQ ID NO: 171841 - DNA, 477 bp, Enterobacter cloacae
atggtggaagggatacggacattctacattagcaaatccaagacgaaggcagggattagacacattcctatccatgcttttctgatcggcatggtggattattatctgagtttgaacactggagattacctgttaccacaggctaacaagattgaacgcaaagacggtaagaaaggaccattctattcccaagcattcacccgcttacggcgtcgcgtagtgcctatggctacagaccgtcaatgctttcacagtttgagggggcattttatcacgtgtctcgaccgtgccggagtacccgaacaacggatcggctacatcacgggacactcttcccaagccgctgccacagaagcattcaaaacctacagcgcggggtgttccatgaaagagctatccgactatgtggaaatggtggcctatccagagatcactttcccagaattaaacaaagaggagcaagctccccacgcataa

SEQ ID NO: 171842 - DNA, 606 bp, Enterobacter cloacae
atgaaattaatatatacctacacactttcaatgatttttttatctgccaatgcttatgcggggactgtttatgaaagacatcccgaaaatggaggaaccacacaggacatacaatcaggggattcttgtaatggcaatggtagagtcgcatttttggaaaacattaatgttaaacaaagccttgcttatgttgtttgcaagcaagttgcaggacatacccctacaaatacgagttttgtattgtctggaagattaagtttaaatgaacctccaattaagcgagtcttaggctgcaccgttgagaacggtacctcaactggttacagaatcctgtggtttcagttcggcacataccttccggaagatatcaaagatgctgaaagtactttaattgttgaaaggagttcattagataaaacaggggttgttctgaatggccataaaaataaatctataattatcgattatgcgaaaaatggaaaaatatacagtaattatactgtatataaagataatagatactatattccaccgggagcaaccattgtcagagctaaatatagcttcccctacactggaaatacggttccatgttacgacaattag

SEQ ID NO: 171843 - DNA, 1116 bp, Enterobacter cloacae
atgaataaagtcatcatcgcctctgccggagcaggtaaaagcacctttgtggtaaatgaagcattaaaagcatccatttcaggtaagcgtattttgattaccaccttcaccgaggcttgccgggatgaaataaatgtcaaaattattaaaaagaatggatgcgtaccaccaaatttgtatgtgatcacctggttttcctttctgattaagcactggataaaaccctatcaggggtgtttatttgaatatgacgtcaaaggaatgcttctttgcagcagcaaatctggccaaaagccttatacagcagcgggtagaccgatttactggggagaaaaagatttcaggtatcactatttcagttctgattttaaactttactctgataaaatggccaaactatctcttcgctgtgatgaaatgtcgggcggaaaagtcatcgctcggctggcatcgtgttttgatgaaatttatgtggacgaggttcaggatctagcgggttacgatcttgaaattctccaaacactgttcaggtcgcccattaaaatcatactggttggagacccccgtcaggccacatacagtacagtcaataccgagaaaaatgcgaagtacaaaaaagctgcaatagtgaatttctttgatgacaaagcggctggagttacagtcgatgataaaatgctgaatgagaacttccggtgctttcatgagatcaatgacttttccaacagactttaccctgactttgcaccgtcaatctctaacgtaaggagcctttcaggacatgatggcatttttctattacctgagaaactcctgagctattatctggaaacgttcaaacctgttcagctgcgttgggataagaaacgaactgtggatgaacgctacccggtctttacatttggcacatctaaaggcctgacatttgatcgtgttgttatctatccgaccaagcccatgctgcagtggtttcaagataactcttctgcgctcacaaatgatacgcgcgcaaaattgtatgttggcctgactaggcctgttaatagtgttgcgattgtttttgatggaagtgcagcattcaaatctaacggaattagcatttactctgtcgggtga

SEQ ID NO: 171844 - DNA, 1653 bp, Enterobacter cloacae
atggttattacacgattaattattgaaggttttaagggattcaaagaccgattctgcatcgagttcaatgagtcagtgaacattatcgttggtgataatgaagctgggaaaagtactatccttgaagctatcaacttgggtttaacaggattgtatgcggggaagccggtcaagaacaacatcagccaatatctatttaatgatcaattagtgaaggaatatttagccagtctcacaactgtaaccagactgccaccaccagcgctattcgttgaactccacttccaaaaaacgcctgacactgttttcctggaaggagatggaaattgcttgaagtcatcatcagtgggcgtagtattcaaaatcaagtttaatgaggactataaggccgcttatgaggcactcttgaaggttggagatatcaagacgctgcctatcgagtattacgacattgagtggaaaagcttcagcagagacgcactatcatcacgtaacattcccctcaagtctgcgtttatcgattcatcctcggttagaggcaataatgggtcagatgtatatatcagtagaataatcaaggatttgctaaccgacgatgaagtcataagcgtttctcagtctcatcgtaagatgaaagaaaccttcatatcagacaagtctattgaaactattaataagaaaattattagtgcgagtaagataaccagtaaaagagtcactatctcggttgagctttcctctcaaaaagcttgggaatcaagtctgattacctgcttagatgatgttccgtttaactatattggaaagggtgaacaaagcatagtgaagactaatttggcgctttcgcacaataaagcgaaagagtcaaatgtcattctgattgaagagcctgaaaataacctgtcccacaccaagctgaatctgctcatcaagaccattaaagacaactgtgaagggaaacaaatcattattaccactcatagtagtttcgttgcgaacaaactcggtcttggtgatctgatttttctctcaaatcgcaagacgatcaagttgacatcgctaacgccggacactaaagaatttttcgaaaaaattgcgggctacgatacgcttcgaatggttctgtgtaagaaagcgattctggtagaaggggattcggacgaacttgttgtccagaaggcctatatggatgcaaacctaggacgattacccgttgaagacgggattgaagtcatctccgtggggatttcgtttcttagatttttggaaatagcctcgattatagataaacccacctgtgtcgtgacggacaatgatggcgattttgtcgcattccagaaaaaatacagcgactatctgggggcgaataaaaaaccacacatcgatatctgtgttgacccaacagttgatactggtacgctgatggtgggtacaaaaaaatacaattacaatacgcttgagccaaaattgctgaaggtgaatagtagggtgaatcttaattctgtttttggtactacatatactactgatgatgatttgcgcatttatatgcgtgctaataaaacagattgtgcattaaagatttttaactataagaatactgcggcgcgaagtgtgcagtatccgcagtacattttggatgcgatcaaatga

SEQ ID NO: 171845 - DNA, 186 bp, Enterobacter cloacae
atggctgcgaaaaattttatgccagagcgggctgttgcccaaacggaaaatgaactatttgaaaatggtgaagaaattcgcgagcaagtacgcaaaaagaacccgtgggacttgcacggggagccgacctattccgcgcgggatgaggcgggtgcatcatgcggtgagatttatacgcgcatgtag

SEQ ID NO: 171846 - DNA, 261 bp, Enterobacter cloacae
atgacctgcggcgttttactttcagctacggccgatttcgtggcgctgttcgtccaggccggcagcgcgctgccctgctctgcgcccgtgacgacgatagtggattcttcggcgaatgccggagcgtgcagtgcgagcgtgatggcgcctgccagggcgcaaagcgtaaaacgtgagggagtcataatgtcgtcttgttgtcagatgcaatacggaacgacaattattatcatttacattaacaaatcaatactcaggtaa

SEQ ID NO: 171847 - DNA, 249 bp, Enterobacter cloacae
atgggtattaaatcacaacggattatttttatattcttagttattgttgttgtcgcattttctttattaaaaaaacctttcggcaatccagatgaaggggctcatttcctgcgagcctatgaagtatcccattttcatttgataaatcgtgaaggggatattggtgttggtattaattgccaagattatttttcagcagcaaaaaaacattttttattgcttggtaccaacctgaaagtgaaagcttag

SEQ ID NO: 171848 - DNA, 1320 bp, Enterobacter cloacae
atgaccgcaaacttaaggtttcaaatatttgtaagctcgacttatactgatttgtatccggtaaggcgcaaagttacagagcatatactaagtatgaatcatatccctgctgggatggaaatgtttagtgctagcggtcaaaggcaatggaaaacaatcaaaaaagccattgataatagcgattattatattctaattattggcgagcgatatgggagtatatccgaggaggaaggcattagctatactgaaatggagtttgattatgctcggtcgcgtggcattccaacactgtgttttctaccaggtgaaaaatacaccactactaaagataaacgtgatacagagttattaaaaattgaattgctggaaaaatttaaacaaaaggttttattagatcaactctgtgatttttgggaaacggaagaggagcttgtaaggaaaatatcggcagcattgtataagatatttgtcgaagagcctggtgttggttgggttcgcggggatacaagtgatcctgaagctttatctaaactggttaaagtgatggaagaaaatgcaaagttaactgccaaaattaacgacctcgagagtaatgttaaaaacgatatgcccgctctttcgataagaataaacgggcataattttaaaaagggaaatttagtaattaaactccccaaagttaaagagtttgaacatggttgccacccaattacattcggtgaactacaggaagagttgcagaaatttatctcgccagatgaggtgcatttatacaattccactctaccctcaaaaaaagccattgatgactattttattaagtcatccttatatatggttggttgtagtaattctgttaaattctcaatattcaatagtggacccgttaaagcaaataatgtattgataaggatttatttacctaatggattaaaggtcttgaatcctagtgatttggttttgttatcagagccttatattgatatgcctttgcatcctattaaacttgctgagttaagaaaaacaagcgacaaacctgagtctttcacgttaacctcacgtaaaatatcgcaaggattttctaggaaattaaaaggaaatcttcgagcagcagggcagaaaactctcaatattagtaatgataaaactgtatacggttctaaagatttggtaagacaagcgacgctccacagtttaacatcagatatttattttatcccagataggagtggagactttaaattaagagtttcaatgttatgtgatgaatatcgggagtggagtcaagaagatatcgtaatcacatatactgattga

SEQ ID NO: 171849 - DNA, 540 bp, Enterobacter cloacae
atgtcgttagctcagaaaatgaaactacaagatcttaaagcaaaagctgaggaatacaatgctcatcggcgcgagttattgacaaaacaaatcaatgatgcagcaactaccattcagaaagataccttagaattttttaagtctaaaggtttttctatcactggtcagatgccgaaaatcaaagctacttatagtggtgggcttgaaacatccattgacttctctaacctgactggaagtttttttggatgtgatggtgcagttgacttcaaatatgaaaataaatcgtttgtgcttaattactctgtgaaacgaggaaatgctcctgatcgtggaaccctagctggtagtcctgacgaagtgatgcaaaaagaaattgagtattacgaaggtaaattattaccgtttttagaatccacaggtgtgtctgatctgagtggcgaagtgattttgttctcagttttgaagaatgtaactaacagaccaaccactcagaaatacgatagtgttgaacaagcattaaacagctttatgaattaa

SEQ ID NO: 171850 - DNA, 711 bp, Enterobacter cloacae
atgaatctgttaactcaaggcacatcctcgctaaaaatgacaagcagagaaattgccgaccttactgggaaagagcataaaaacgttactgttgatattcggcgcatgcttgatgagctgggagaagatgcgctgaaatttcagcgtatctatcgggatcgcatgaaccgccagcagactgaatatttactcgaccgagaacacactgagtgcctaattacaggatacagcgcaattattcgtattcgcgtaattaagcgccttcgtgagctggagagtaagtgtgctttgcctgctgattatcctcaggctcttcggcatgccgctgatttagccgaaacgactcttcggttacagaaccagctcgccgatgcggcccccaaaatcgattttgctgatcgcgttgccgatattaaaaaaggcatctccataccgaattacgccaaggccgtagggcttggccccatcaaactattcgagtggatgcgtgagcaggaaatactgattagcggcggtcagcgacataacttaccaatgcagcgttatatcgagcgtggctattttgccgttcgccagagcacatacgatgcccacggagaaacccgagcgtcattcacgacgatgctgagcggtaaaggtgagcagtggttaacgaagaaactgatcgtgggtggtgtattaccggaggtgtcgaatgctggcgctaaataa

SEQ ID NO: 171851 - DNA, 285 bp, Enterobacter cloacae
atgttaactactattttcaacccgccaaccgctgaacagcgtcgccaaatccttgaggattatggttttaaatatgatcgtcgtatccgcgaagcggaatgctttgagatcaccagcctttcccgttccactcgctggaacatggaaaatgagagtaagtttcctacccgctgccattttgggcgtaacagctgcgcatggctcctttctgacgttctttggtgggttcgtaacccgccagcagttgagaacgtaaacaacccctacaatcgcaaatctgcatga

SEQ ID NO: 171852 - DNA, 828 bp, Enterobacter cloacae
atgaaaaacattcctgattatgtgccccagttaattaccgaaatttactttagtgggcttgtttctgattttaaaactcctacccctatagaaacaccagaggaattggaggctcaggggcttaagttagacataaagaattggcgagaagggctgtctcagaaagagtgtcttgaaaaattgatgcatgacaaaagaatggaaaaggtctggtctccactttcacgccattttaaaaaatacacgccgcagacaccgctatttttagagttcttcaatgagttgtctgaagcatcaaaaggcccaagcgactgggactctttaactcaaaaagaaaaggagttaaaggtttcgaaaatatctaaacttgctaaagagttatattttgagatggcgaatacacctcttgataaaaatgtcactcactatatgaggtattatggctatttcgataggtttatttctgaacttgacgaagaaaagaaattattggcaaagaatgaattaagcaatttttttgaactcaaagggcatttttatcaggatagtgaacaacatgaggtgtcaagcttttggacgcgatatggtgttcctcccgtagagatgtcatcagcgttacaggatttattccgagagtctgcaaactataagccagtttcaattattaaaagaaaaaatgacgtaatgtctgtttacatggtgagaaaagtttctgcgttctttttaaagtattttgactcgccactttataatattacagcggcaataagtagcgtcatgctgaatgaggaaattacattggaagaagttcgttcgcgaattcaataa

SEQ ID NO: 171853 - DNA, 444 bp, Enterobacter cloacae
atgatttatctgctgttaggaattgcgctgttcgcatttttcatcggaactgtcatatttgtccgttttagtaaagtgacgagaaggagcgttcagtcaccagaggggtatgaagatggcccttataactcgaattatagccaacagtacgctgatgcgtatgggcagatagtcaatctccttgatatcactagcgttgatgaacagaatcagcagcaggtgaaagatgccatgtttaactatttcatggtcaccaaaggggtggatcgtcagaccgcagaaagctacaccgaaacgaaacagggtctggagatcattgcggcttcgttaacaccaattttgggatctgctgcggcaaaacaattaagtaaagttggtgatgccaatctaaaagccgtagccaagggaaatatggatggagtgaagttttctgacaccaactaa

SEQ ID NO: 171854 - DNA, 462 bp, Enterobacter cloacae
atgaaaatcagtgatggaaactggcttattcaaccgggcctgaacgtgacctatccggttcaggtgttcgacgtggagcagcagggtaatgacctggtggtgtatgtggcgccgcgcgacgtgcgcgaacgcacctggcagctcgacacgttgatgttcacggtgcgcctgtttgctccacaggaagggattgtcggggtgcgcatcgagcacttccagggcgcgctaaacaacggtccacattatccgctgaacgtcctgaaagacgtgaaggttgagatcgaaaacaacgccgaatttgctgagctgaaaagcggcagcgtcagcgtgcgcgtcaccaaaggcgagttctgggcgagcgcttcaccgcgctggtgcgcaacggccaaatggtcgagacctggaaccgcgacggcggcaccagcactgagcagtcctataaaaatatcccgttctacctga

SEQ ID NO: 171855 - DNA, 879 bp, Enterobacter cloacae
atgggcgaggttgcagtcctcgcccaaaaaagccccctagacacagtaagaagcaaatatatcaaagagatgtcgcagatgaccggacgtaacgtcattgcgtactactcggggttccttcagaatagctcgcatttatgtactatgtctgatgatgataaaaatggattcatgacagcggttcatgggctcgatgccacgaaggggcttgatctcattttgcatacacctggtggggatatcgccgccttagaatcgataggttattacttgagagctaagttcggtaacgatatccgtgcttttgtccccatgatatctatgtcagcagggactatgttggcttgttgtgcaaaagaaatcatcatggggaaacaatcaaatatcggtcctttcgatccccaaatcggtggcgtgccagcacatggcgtgattgaagaagcgcagaaggctatgcaagatattattaaaaaccctgcgactgctgcgtattggcaatttacactgtctaaactcaatccgacgttcattggtgagtgtgaaaaggcaatccaatgggcaacaacaattgtcagtgaatggctaattactggtatgtttgatggggatccagatgcccagcaaaaggctgaagctatttgttcaagcctgaataaccacagttcaacttttgctcatgcacgtcatattcacagtgataaagctagccaaattggtttgaaaatcataccgatggaagcagatcaggcattacaagatattgtgttaacgatacatcatagctatatgcacacttttggtggcagtacagcagccaagattatcgagaaccatgaggatggccgaagagtctggcatgtccctcctggaaacgcgtaa

SEQ ID NO: 171856 - DNA, 252 bp, Enterobacter cloacae
atgaccagtgctaaaaaaaagattcctcatccaggcattatcgtgcgcggtgaaatggagtatctcgggattgggccggaagaactggcttatcggttgagtcttgatgtgatgactgtgcggcagttgattgcgggaaaatgtaatatatcgccagaaattgcgaaaaaactggaacaagtagtcggcagcaccgcagagcagtggttacggattcaggatgcttataacgcccgagaatcattaagctga

SEQ ID NO: 171857 - DNA, 744 bp, Enterobacter cloacae
atgcaagaaaaaaaggcaattgataaacttgagaaactaaggaacgaattagcaactttcatcaggtctgattctgatgatcctgaattcaaaaaatggagtagggatacatctgtagctattgataaaatattttttggaaaagaaagttatgctaatgagttttataatataaggtttagctcgccatatcgacggactccagaagataagaaacaaggcttccataaggcaattgcgcaagcagatgcattgctccgttcaatgatagatgaaattgaagattatgggctaggtaaatcccaagagattaaggaggttatgatagggaaaaatgtctttatcggtcacggccgatcatcactatggcgagaattgaaagattttattaatgaaaaactaaatctcccatacgatgaatttaatagacttcccgttgctggcttagcaaatacacatcgacttcaacaaatgttagatcaagcatcaattgcttttttgataatgacagctgaggatgaaaatcaagatggaaataagcaagcaagaatgaacgtaattcatgaggttggtttatttcaagggagattgggtttcgaacgagcgattgttttactagaaaatggttgcgaagagttttctaatataaacggattgggtcagatacggttcccagcgggaaatatttctgcaatatttcaagatattagagatgttcttgaaagagaaaaaatcataatttaa

SEQ ID NO: 171858 - DNA, 723 bp, Enterobacter cloacae
atgaaagacaacatatccaacaaattcagcgagttagactctgagtctacacagatattatctcaagtcaccatttcagatctcggaacggaatatattgacaatagtaaatttattcaatggaaaataaaggctgaaaatttattacataatgtctttgggagtgactcgtcaatatttaaaaatttcactgaagaaaaaaataaaaaatcattcggtaatcaattcaagcttgagtcattaaatgcagtaattttagctgcaaaatatcaatacgaaaatagcacattaaataaggccaattcaggtgatagagttttcattggccatggtcgctcacatatgtggcgagagttaaaagattatattaatgataatttaaagctcccatgggatgaatttaatcgcacgccagtagcagggttaccgacgatagctcgtttatctgaaatgcttaataatgctggtattgcattcctcgtaatgactgccgaagatgaacaacaaaatggtagcgttaatgcaagaatgaatgtcgtgcacgagatcggtttatttcaagggaagttgggttttgaaaaggcgattgtattacttgaagaagggtgttctgagttcagtaatatcaatggactaggtcaaattagattccctaaagataatattagtgctgtatttcacttgattcgtgaagtattagaacgcgaaaacatgttgagataa

SEQ ID NO: 171859 - DNA, 177 bp, Enterobacter cloacae
atgaaaaaagaacagaatctctggattaacgagaaggctaaaagatgcgggaagatcagtgatgcgtcttctacagccacgcctgttgagacaagaatcaagatctatcagtgccagtctgaaagaacctttgaaagatttatctatctgggtggagatgaagaacgacagtattaa

SEQ ID NO: 171860 - DNA, 264 bp, Enterobacter cloacae
atgcgtactcaaactttttttaaagttgcagtgcttactggtctgttggcgttggcgggctgttcttcaaaagtcgccgctccggaacaatactccggctttttaaaagattattcaggcttacagcaaacgacctcggcgacgggaaaaccaacgctgcgttgggtcgatccttcgtataacgaagccaattacgacagcattctctggacgccaattacccttatccaacgccaaaacccaccacgcaaattgggcaaataa

SEQ ID NO: 171861 - DNA, 405 bp, Enterobacter cloacae
gtggacgcgctgaacgccgtgaatttagacatcgctaagggaaccgacatgaaaagtaaactactcagtggaatggtgttgttcatgctttcggcctcggcgatggcgcagcagtcctttagcacgcccgaccaggcgaccgatgcgctggccagcgccattagtgagcataatgagcgcgcgatgagcaatctgcttggagagaactggcgcgattttctccctcccgaaggcgttgatccggatgccgtcgatcgtttcctgcgcgactggaaagttcgtcataacaccgttgtcgaaggagctacggcgcaccttgttgttggagacaacgactggcagcttcctatcccggtgatcaaaaccgccgccggctggcaattcgatatcaaagaaggggcttaa

SEQ ID NO: 171862 - DNA, 1635 bp, Enterobacter cloacae
atgtctgcttacacagggagcaacatcaaagagggggagttaggccgatttcttgccgatgtaaatgcaggtttgattcctactggaagtgccctgatttgctacagcgttgaccgattgtcacgccaaaatccttgggttggcacacatttgatatcaactcttatcggggcagggattgagattcatagcgttgcggaaaatcagatattacgaagtgatgatcctgtaggggcaatcatgagtactatctatctgatgagggcaaataacgagagtgttataaagtctgagagggcaaaaaagggctacgaaaaacggcttaatgaatctattacaaacaaaaaagtccttactcgccaaatgccacgatggctgtttgattgtgatggtaagtacgcaatagatccaaatatgcaaaatgtaattaactttacttttgatagctacatagctggacagagtacaggtttcattgccaaagaactgaataacagagggttgatgtatggcaacacgagctggagaggctcatacattgcaaaactgatccgtgatgagcgtttgataggcaaacacatacgttacagtaagcagattaaaggtgtgaaacgtgttgtgatagaaacgattcccaatttctatccagttgtggttgatgttgagaaattctttttagctaacaatatgctaacaagtgttgctaaaaatatcagaggtcgtacacgcgttacatatggtgatgattccattttaaggaatttattcaatggtgttattaagtgtggtgtatgtggtggtgatacatcagttgttcaaaatacaagaaaaaaaattgtcaatggtgaggctacatatattccatataaaacttttcttcgttgtagaactcgctatgaactaaaaaattgtgttcagagcgatatacgttatgaggttattgagcgtgcaatacttaaccatttgatggggttggatatttctgctttgttgtccgtgccagttgataataaaattgaaagctatcgtacagaattagaactgtgtaaggcagaagaagtggaattacatactttgatcgaacagcgagaacgtgaaggtaaacgagtacggccgagaacaataaaagcatatgaagatgtatctgatcgcatagatgaattaaataaattgatagaatcatatgttgaggatacttttgttcctgattttaatgttgatttgaatagtattgctgatgtgagtaatgtttcagaacgtagtttgattaaaaaaggcattgctactattgcagatagtatttgttataaacgcattagtgatttcatacttgttgagattaaatatcgaaacttaagtgtgaagcatgtattagttatagacaataaacaatctaaagtagttgtaaatttctctattgaataccatgagaatagtcacgattatacttgcaatggtttaattttaaagtatgttaaatctcctgaggagtttcacttgatgggggttaatattgaggattatgctcacatgatgaactttgtggatttcatttctgataacgaagctaaaaaaataaaagaatatcttgtgagtaatctttctcgtgtacttattagtaatgtaccagaataa

SEQ ID NO: 171863 - DNA, 345 bp, Enterobacter cloacae
atggatgatacaggcaagatcgatattggtgactacaacgagagcggtttttggtcgaaagtaaagaaatactgtaaaactatcggaaaagattcacttgagcaggtattccgtttgtattacggcttagaaagtgacaactgcacaactacacacagagcaaccatctacggcgcgctggcttacttagtgtcaccgatagatattatccccgacttaaccccgatactcgggtataccgatgacatggctgtaatcgccgcagctcttgtagcagtggcaggttgtatagacgatgcagttaaagggaaagcaaaggagaaggttgatgagctttttgactga

SEQ ID NO: 171864 - DNA, 237 bp, Enterobacter cloacae
atgagctttttgactgacatacgagataaactattacctgagacagtaaaagagaaaatcattaagcacgaagtgaagaaaatggttaatgataaacttaagcttgatggtgagttagataaacatattgatgcattcgcagataaggttatggataaggtggatccttcaaccatattcaaggccaaagatatgtatgacaaactgaaggctgctgaatccaacaaggataagtag

SEQ ID NO: 171865 - DNA, 1488 bp, Enterobacter cloacae
gtgatgtacggagaggagaagtcggacttgctcatagtagctgcgaagctggcgaacaatccgcaaggagcggagtcagtggagcgaaggagcggggccaagggaaacgcggaacagccacacatgcgccggacgcagagccgggaaagtatgtcacagaggctgtcacgcgtgcgggaagctgcgaagcagcggaagaaagaacggtttaccgcattgttccacctcctgacagcagaggcactggagaacgcattcctctccctgagcaggaaagcggctgccggagttgatggtgtcaggtggaaggactacgccgaaaacctgaaggtcaacatagcagatctgcaccggaggcttcatcagggcagttacagggctcagcccggcaggcggcactacatcccgaaagcggatggaaaacagcgcccgctcggcatcgcctcactggaggacaaaatcgtccagtatgcgctggttaagatcctgaatgcagtctacgaaaatgactttatggggttttcatacgggttcagacccgggcgaagccagcacaatgcgctggacgcactggccacagggctggttcggaccaatgtaaactgggtactggatgccgatatcagtcagttcttcgacaaggtaagccatgaatggctaatcaggttcatagaacacagaatcggcgaccagagggtaatcaggctcatacgaaagtggctcacagccgggacctcagaggaaggagaatggcgggcatcggaggaaggcaccccacagggtgcggttatctcgccgctgctggcaaacatctacctccactatgtcttcgatctgtgggcgcatcagtggcgacgccgccatgccacaggcaatgtggtcatggtcagatacgcagatgacatagtcatcgggttcgacaagcgaatcgacgctcaatgctttcgtatagccatgcagcgcagactgaaggagttcggactcacggtacatccgaagaaaacccgactgatggagttcggccgcttcgcagccgaaaaccgcgccagcaggggaaaaggtaaaccagaaacgttcaacttcctcgggttcacgcatatcagtgggaaagatcgtagtggcaggttcatgctgatacgaaagacacgccgggacaggatgacggcgacactgaaagcgatcaaggacggactacgaaagcgctggcattactcaatccccgaacagggaaaatggctcaggagagtggttcagggatacctgaactaccactcagtcccgggcaactatcccatgatgcggaagttcaggatatacgtaacagacctctggcgacgggcgctgaggcgcaggagccagcaggatgatacgacatggacgaaagcaaacagactggcagccgtatggctgccgaaggttcgggttctgcatccatggcctgtggagcggttcaccgccagacacccaaggcaggagcccggtgcgtga

SEQ ID NO: 171866 - DNA, 1485 bp, Enterobacter cloacae
atgtacggagaggagaagtcggactcgctcatagtagcggcgaagcaggcgaacaacccgaaaggagcggagtcagtggagcgaaggagcggggccaaggggaacgcggaacagccacacatgcgccggacacagagccgggaaagcatgtcacagaggctgtcacgcgtgcgggaagctgcgaagcagcggaagaaagaacggtttacagcattgttccacctgctgacagtcgaagcactggaagccgcattcctctccctgagcaggaaagcggccgccggagtggatggcatcaggtggatggactacgccggaaacatgaagaacaacataacagatctgcaccggaggctacatcagggcagctacagggcgcagcccggcaggcgtcactacatcccaaaagcggatggaaaacaacgcccgctcggcatcgcctcgctggaggacaagatcgtccagtatgcgctggtgaaaatcctgaacgcagtctatgaaaacgactttatggggttctcatacgggttcagacccgggcgaagccagcacgatgcactggacgcactggccacagggctggtacgcactaacgtaaactgggtactggatgccgacatcagtcagttcttcgacagggtgagccacgaatggctgatcaggttcacagagcatcggatcggcgaccggagggtaatcaggctcatacgtaagtggctcacagccgggacgtcggaggagggtcaatggcgagcaacggaggaaggcaccccacagggtgcggtcatctcaccgctgctggcaaacatatacctccactacgtcttcgatctgtgggcgcatcagtggcgacgtcgctatgccacaggcaatgtggtaatggtcagatacgccgatgacatcgtcatcgggttcgacaaacgatacgatgcccggcgcttccgtatagccatgcagcgcagactgagggagttcggactcacggttcacccggagaaaacccgtctgatggagttcggccgcttcgctgtcgaaaaccgtgccatcaggggaaaaggcaaaccagaaacgttcaacttcctcgggttcacgcacatcagcgggaaagatcgcaacggcaggttcatgctgatacgaaagacccgccgggatcggatgacggcaactctgaaagccatcaaagacggtctgcgaaggcgctggcattactcaatccccgaacagggaaaatggctcaggagagtggttcagggatacctgaactatcactcggtaccgggcaacttccccaccatgcagaagttcaggacacacgtaacaaacctctggcgccgggcgctcaggcgcaggagccagaaggatgatacgacctggacgaaagcaaacaaactggcagccgcatggctaccaagggttcgggttcttcatccatggcctgtggagcggttcaccgccagacacccgaggcaggagcccggtgcgtaa

SEQ ID NO: 171867 - DNA, 180 bp, Enterobacter cloacae
atggcctataaccgtactttcgctctcgatataagctggaaaacgctgctgaaagacgcggggcttgagccagaacgcatcctccgcagggcaggattacctgacgatctctttttacaaaaagcgcggggactcgatatgaatgaatacattcgcttctggaatgcactggaggcttaa

SEQ ID NO: 171868 - DNA, 354 bp, Enterobacter cloacae
atggagcaaggcgagctggcgcaggtcacgctccgctcgaggcggatttacgtgggtatgatccacaccgcgacgctggaatatgaaaaaacggccaatatcgtgctgatcccaatgttgagcgggtaccgggatgcgaagacgatgaacctgcgcatcgagaataattacagccggtggtatgcggagcatgacattacgctcgactcggaaccccgcagcgccatgtcattccgcaaggtgattttactcaatcagattgagagcatctcgctgttcgatcccgccagcgccagcgcgctgtcgctggcacagcgggacatgcatgcgcgttctaaagagacatccccataa

SEQ ID NO: 171869 - DNA, 318 bp, Enterobacter cloacae
atgaaaaatttactaattttagggttgttattcagtacttcaacttttgccgcatacaaaacatatgatccgcataaagatagcaagttcgtaactaaagctatttctggagtatgtaaatcagaacatcaaaaatatgatgatcttgattatcaacttaagtccaatgtcggaagtatgagtgaagctgacgcaaaaaaagccgtagcaaatcttaaggatgctgaacgtaagcgttgggaatgtattgaaaaagagttgaataaaaagaatataacattgaacttagagcagttttttaaagaaaatagcctatag

SEQ ID NO: 171870 - DNA, 1050 bp, Enterobacter cloacae
gtgagtaaatattttaaaataggaatttttggcatttggggagtgtttttattccttgcgtcaatggataaatttggtgatcttttcgcagtcggtactggcttctggtcggtagtcatgctttccctcgctggattgtgccagctactggcaagtactgtcgcgataggctgggctgttttgggttctggttctctacgggctaagtacttaccctataaactcgttaataattacacggttccggtactgattgttgggctggctgttgtcgcgagtactgcccgatcttcaagcgatgaagccagagcacaaaaacttggatttaaagatggtaaagagttttctgttgctcgtgaaaataacattaccaacgttgctgattatgccaaatttgtagacgagcagcgagtaaaagcggcggaaaaggcggctcatgatacgttagtggcagccgaaaaagctgaacaggataaggctgctaagtatgtggctatattctctgatgatggtagaaaggagcgagcacaagaattaattagtaaggatttaaaagaaaatcctgaactgactaaaaaaatacttgaggaaatagcatcttactcaaatgattcagtagaaagaagtgtagcagaaagtgactatttagattatggagtgagtcttaaggtatatacgtcggaaatagaaaattccaattgccgtcagacgtacaaataccgtttatctccgttaaatgaatggcagaaaactcaacttcaattattaaaagaaagatttgatgctactaattgggatctgctcgatgaattccagcggaaacatgaaagaaaagaatttgcgtatgaacaggatcgcattcatacagagtattttaaagagcagagagtagttcaggaatcttttaatgaatgcgtatttaatttactttccactattccggctcgcctttcaagacctaaagctgcaccgaattcagtcatttatggcatttctgaccaaatgaaatgtatgcggaagccagaaggtactatagatttatgttattaa

SEQ ID NO: 171871 - DNA, 618 bp, Enterobacter cloacae
atgctgcgtcttcgcatcatgatctggcgcactcttgcgaccgacacctttgacatcgctctgccggttaaccagtcctttgatgtatgggcaaccatcattcgtggaaaattccagactgtatatcgcgacattattgagcgcgttaaatcttctggtgcgatggggatgtttgctggtgctgatgcagcatctttcttcaaacagttgccgaaggatttcttccagccagccgaagactatatccagactccgtatgttcactacatcggtaccctgttcggtaacgtaaaagtgtacgaagtacctgctggtatttgtaagaacttaacgacagagaacattcagttcagctcgatggatgtgctgtgctacgtccgtgatgaaaatccgggtaaagcaggcttcgtgactggtgatgctgtcccggctatcccgttccagcatccgaccactccggcgctggtcaaccgtaccacactgtggggttcggctatcaacgatatgcacccacgcaacggcgctgattacttcactcgtgtaacgctgacaatggccaaaaaaggcgggcttaactttataagcggcgacacgattgatgccggtgactctgagtaa

SEQ ID NO: 171872 - DNA, 987 bp, Enterobacter cloacae
gtggcggcggcgctgacgcagctgagtggcgggagcagtgcggatggccagaaggctggtgccataggagccattacggcctcggcgatgaccgaccatctggtcagcgcgctgtatggcgataaaaaatccagtgacctggctgcagaggagaaacggctggtcagtagcttggtgagtatcgcgggtggtctggcgggcgctgcggtgacggatggcagtgtctccatggcggcaatggcgtcggaaacggcgaaggtggaggttgagaataactcgctgggtgtcgttattcagggcggtaaactggctgcacagggatgtctgaaaatttctgcttgccgtgatcgcctggttggcagtggtctgggtgctttactgggcattggtgcatccacatcagcaatggatacattgtcacaagatgagcagttgcatctgatctatgtggcctcgctcaatgatccttcccagctcagtcagttaaataatgctcagaaagcggcctatgagtccctgacaggtaagacgatcaccagtactggtggtacgcaggtcatcaacccgggaccatcaaacactggtggagaccagactgtaactggaaatgtgccttcaaatacagggaataataagtcctcgggtcagggggcaaccaatacaggtaagaatgatggaaatccggatactggcggcaatactacggttacaccgattccagaagggccgaataaggatgatttagcttatctggcccttaagggtaaagaggctgaagaagcagctaaaaaattaggattcgataccagaatcccaccacagaaagcaccatttaattctcatgggcagccggtttattctgatggtaaaaaatacattactcccgatattgatagtcataatgttacaaatggttggaaaatgtttgatcgtaaaggcaacagaataggaacttatgacagtaacttgaacaggattaaggactaa

SEQ ID NO: 171873 - DNA, 3666 bp, Enterobacter cloacae
atgaatacgtcaaacatcaaaaaatacgccccggtggcacgtaaacagttccgcgatgcggtcatgcaaaaactgaccacgctgggtattgaggccgataaaaagggaaacctgcaaattgcgcaagcaaccgatcttggcgacagcgtgcgttatggtcagttctcgttggataaatcactggcgtcacgccgtgagcgtctggtcaagcgagcagaaaagcagggctacgacgtgctggtagagcacattgcttacacctggtttaaccgcttttgcgctattcgctatatggagctgcatggctatcttgatcacggtttccgtatgctgtctcacccgacgctggaagggggttttgaggttctggatcatgtgccggaagtggctgatgctttggagctggacaaagcgcgcctggtggagatgaagctggcgggcgatcgtgacgaagagctgtaccgcgaactgctgctggcccagtgccatgcattgcacggtgcaatgcctttcctgttcgaagcagttaatgatgaaattgagctggtgctgccggataacctgactcgcaccgactccattctgcgcgagctagtggatgagaaagtgataccgaaagaggattgggaccagatcgaagtgatcggctggctgtatcagttctacatctccgagaaaaaagacgacgtgatcggcaaggtggtgaagagcgaagatattcctgccgccactcagctgtttaccccgaactggattgtgcagtatctggtgcagaactcggtgggccgccagtggctgcaaacctacccggactcgagcctgaaaggtaaaatgccgtactacattgagccagcagaacagacgccagaagttcaggcgcagctggcaacaatcaccccatccagcattgaacctgaaagcattaaagtactagacccagcctgcggttccggccatatcctgactgaagcctataacgtgctgaaggcgatttacgaagagcgcggctaccgtacccgtgatatcccacagctgattctggaaaataatatcttcggtctggatatagatgaccgtgcggcgcaactgtctggttttgcgatgctgatgctggcccgccaggacgatcgccgtattctgggccgtggcgtgcgtttgaatattgtatccctgcaggagagtaagctggatattgcagaactgtggaccaagctgaacttccaccagcaggtgcagcgtggcagcatgggagatatgtttgcagaaggtgcggcactgaccaatactgacagcgcggaatataagctgctgatgcgaacgctggcattgtttaccagcgcaaaaacgttgggatcgctgattcaggtttcacatgaagatgaagcggcgctaaaagcgttcctagatgggttgtatcgtctggctgttgaaggggatattcagcagaaagaagcagcggcggagctgatcccgtatatccagcaggcgtggattctggcgcagcgttatgatgcggtggtggcaaacccgccgtatatgggcgggaaaggaatgaatggcgaactgaaagagtttgcaaaaaaacaattcccggacagcaagtcagatttgtttgcgatgtttatgcagcatgcattttctttgctcaaagagaacggctttaatgcgcaagtgaatatgcagtcatggatgttcctgtcgagctatgaagtgtttcgtgggtggttgctggataataaaacccttataaccatgtcccatcttggggcacgagcgtttgggcagatttctggggaagtggtgcagactacggcttgggtgattagtaacaatcatactgaacgttatcagccagtatttttccgcctgattgaaggtaatgaagaacaaaaacaaaactctttgcttaaacgggacaatcatttcaatagcacggcacagaatgacttccaaaaaatccccggtgcaccgattgcgtattggctcagcgaaagtcaggttaatttatttgataataaaaaaatatctcaaattgcctcaacacgccttggaatggcaacagcagataatgagcgttttttacgtttttggcatgaagttaatttcgcgaatatcggttttgattttactgatcgtattcaagctaaagaatccggtctgaaatggttcccttatcagaaaggtggtgaatatagaaagtggtacggtaatcttgattatgtcgtaaattggttcgacgatggtcgggaaattcaaaattttaccgatgaaaaatcaggaaaggtacgttcacataactataatttagattttatatttaaaaaagggattacgtggaacgctctatcctcaagcaagacatctgcaagagtctctgagtcctcattatttgataatgcagggtcttcgttatttgttaataatgaggacctttacctgcctgtgttagcatttattaatagtgatattatcatctctttaataaaggctatctctccaacattaaattatcaaccgggggatataagtaaattaccagcattttttgatgataaaatgattgagagcctatccttgaacactgctgaactaatttctctggctaaagaaaattggagccagcaggaaaatagttatcagttttccttcagtcaggatgcgtttcaaaacggcagactagtaaacatattaaaaacccaggctgatgttttttatcaaaagttaatcaaaacacatgagctagaatgtgataataacaaaatattttatgaaaaatgcaatattttaaacgaaaacaatcttgccttggcagaaataacattggaaaataatgttttccagtcattaagctcaatttcaaaagatgaatataaccaatttaaggcgattcaggttataaactcacttagcctggctattggctgcatgatgggccgctattcccttgatcgcgaaggcttggtctacgccaacgaaggcaataaaggttttgccgaattagtcgccgaaggtgcctacaaaaccttccccgccgatgaagatggcatcctgccattaatggattccaactggttcgatgacgatgtcacagcccgcgtaaaagacttcgtgcgcacggtctggggtgaagaacatctgcaggagaacctcgattttatcgccgaaagtctctgtttgtatgcaatcaagccgaaaaatggcgagtcttcgctggataccatccgtcgctatctttccacccagttctggaaagatcatatgaaaatgtacaaaaaacgcccaatttactggctattcagctccgggaaagagaaagcgtttgagtgtctggtctatctgcaccgttataatgaaggcacgctttcgcgtatgcgtaccgaatacatagttccgctgttggcacgctaccagggcaatatcgacctggtaaacgatcagcttaagagtgctgaatcgggagctgccaccacgcgcctgaaaaaagagctggatgggttgaccaaaaaattcaacgagctacgcaattttgacgatcgcttgcgtcactacgctgatagacgtatcactattgatctggatgacggcgttaaggttaactacggcaaatttggcgatctgctggcggatgtaaaagccattaccggtagcgcacctgaggagatttga

SEQ ID NO: 171874 - DNA, 1044 bp, Enterobacter cloacae
atgaaaatagcggcgatttatacgcagagtgttggcccattgggcaatgcggaaattagctttaaaaacgactggacgggagaggtagaggaaaacgttctccttaccggcccgaacggctgcggtaaatcgacgctgcttcgctctattgcgatgctttggggggcttttgggttctggctagagcaatccaaaccgctcccatcatctcacgaatcccggaaatggttagaacgatggaacggtgtcgcgattgttatagatgacttcacatcaacaacgccatctcgcttggggctattttttggctccgacgaatggtctgaggaattaattgaatcctataaagatgttgagtggattggtgaaagtcgtgctgggcgtaaattgacgctaaggatttttgaagatgcctggttccagaaatggggtcactactaccagaaaatggtgatcaccactgagagagtttcatcccctaatgtcatttatctggatgctgaggcacgcagatggcttgcgcctaaaaagaatatttcctcacttgcacaggatgatcttagccaacgctggctggcaacctatacccctacctccgactggaaagggcagcttgaagcctcgctgttcaatatgaaagcgacgctccctgagctgtatccagagatgatgaaaacgctgaatcagttcttctcagggaaaatcattgaagaagagattcagcctggacagcgtcagcaggtcaggctggctagcggtgatactcatacgctggatgaactgagttctggtgagcatcaggttttaatcatgctctttatggttcaacgttggcttcagccgggcggggtcgtactaatcgacgaaccggatctgcaccttcatccttctctagtttcacctttgcttgcgacactggaaaacattatccagaaaaagcgtggtcagcttattttaacttcccatgctactgacgtctggctgcgctacgaaagtttaggactccgctatcctctttcggttgaaaaaggtgatgagcaatga

SEQ ID NO: 171875 - DNA, 498 bp, Enterobacter cloacae
atgaaaaagattacagcttacttgtctctatctcttttaattataccttttgctgctcagtcgcagagtttagccaagtgggtgtatcccaatggcataccaacactgaagcaggatagcagaggtatggatgattttgagtttgctctcgctgttacaaactcgtcaactggtcaggtgtcaattcttgattttcgaccaaacaccgatgctgaatcctcgtgctatggtatacatgaatacagcaaccccaaaataagagatatttctccagcaaaaatcgcaggaaaatatgtaaaaatgatatctatttgccttgggcagaacagcgggataattcaaccaaaaacagaagaggggaagaggtattttaatggattagtgtttacaggtgcaccagtggatatttatctttccgatattaaacttatttcattccctgcatcagacactgactcgatgaagaaaaaattatctgagctaaattcagcaatgtga

SEQ ID NO: 171876 - DNA, 276 bp, Enterobacter cloacae
gtgattatcgtgacgcttgccgaaacgacacctgtactggaagccgctaacctgcagcaggatctacgccgagctggcatcgagccgtgggcatgggtcgttaataacagcctggcagctgctcaaccgtcttcgcctttcctgaagatcagggcgaaccgcgagctgcctctcatctctgatgtggaagagcagtatgcaaagcgtattgcattaacagcgctacagagcgaagagccggttggtattgacctgctggaagaaatggcgaagtaa

SEQ ID NO: 171877 - DNA, 252 bp, Enterobacter cloacae
atgaaagcaccccatcagggcgcaccgattgaaatcacccagccgaccagctatctggcgatctctgaactggttgcccgtgccgttgacgggaagctgtttgtggaagatagcgtgaactgggatcagctcaccagcaacctgccgcaaacggcagaagtctcagagaacgccaacgcggtcgtcattcagtatcagagcaaaccgtacgttcgcctgaacggcggggattgggtaccgtatccgcagtaa

SEQ ID NO: 171878 - DNA, 1092 bp, Enterobacter cloacae
gtgtttcaaaaggtactaaagaacctccacatcgaatcgttagaatccgctctattcgttttgaaagagccgcaccggctgcgtgaaaaacgccgcaatggcaagttcgaagtgcaggaactgaatgaaggtgacccacgcttttggtacgctcgcagtaatgtggtcagcgagtttcttgacaaactctggaaggtggcttgggcccccattgaacaggagacgactaaacatattgattttcgtggtcgcacagagaagcaaaatcaactgtacttgtttgtctcaagccaagagaagcttaaacaattgggagagtcgatcggcagcactgacagtttctttcgttacgctgaaggagcctatattggtgatctgatcgatgaaatacgtattgtggttaaaaagcgtgatgaacatggtggtaaggtaagctttactcacctttctgaaggagaattacaaatgctcaccgtgctcggtttgatgcggatcgcccgagacgataattgcttgttcctgcttgacgaacccgacacccatctgaatccgatctggaaattgcgctacttcgacgatatagaaggtgtactcagctcggatgatacagctctactacagagcgaatcgcaaatactcattacaacccatgacccaatgatggttggcagtctgaagcgtgaacaggtacatatactgcgtcgcgatggtaatactacgcttgtcgatagccctgatgaacatccgcaaggaatgggtttaaccgggttgcttaaaagtgagctgtttggattgtcatccacattggatatcgaaaccgagcgccgcttgtttcgccgtaatgaactttttgctctcgatgaaagaactcatgaacaagatgatgaactacgccgtttgagttcagaatttgcagacttaggcttttcaaatgcagatttcaaagaccctttctatgctaagtttgtacgacgaatggccaaacacactaagttccacaaaccagttcttacgccggaggaacaagctgagcaggatacaattgccgactcaatcatcgatgagattttacgtgaggatgatggacaatga

SEQ ID NO: 171879 - DNA, 852 bp, Enterobacter cloacae
atgatcttcatcgacttggaaaataagcttccaacggatatggatttgcatcctgatgttcgctggagcgaggctgattggaacgcttggcagaaagagtctgttcgcttgattggtgagcttgccaagctcaatgaggcaggccaaatcaaagaacgtaatgaattgattgataagcaaagtggccactggggaaagttgaaaccatggcttcttgcactatcggatggaaaatgctggtttactgaagcgcgagatattgcttcgcatttagacgtggaacattttcgcccgaagaaggcttctcgtaatgttaagggacccgaacgagatgggtactggtggttggccttcgactatatgaacttccgcattgctggcactgtacctaatagaaagaagggcgcgtggttccctctccgctatggctcaccatgttcaagttatgcgcaccgctgtgaaggagatgagattccgcacttcatagatcctacaaatccttatgacgttacattactcgcttttgacgaagaagggaaagcggtgcctgcaccaggtatttctcgttgggataatatcagggttagacgtaccgtagaccgcttaaaactctccgaacatcaagcgttggcagaggaacgtcgtaaggtctggcaaagaactacaaagctgataaataagtattttcaggcactggctagtactcgaacttctgcggttgcccgtgagcaagtgaaggccgcagcacgtgacatactctgtcttactaaacctgaaaccgaactttcatcagtggcgaaatggtgcgttcgcttgcgcaacgatccacaactttccaggctggttgggtaa

SEQ ID NO: 171880 - DNA, 840 bp, Enterobacter cloacae
  misc_feature (818)..(827): n is a, c, g, or t
atgagtgaggtatgtaaagatcccattgcagagtggtatccccgtattatcctcaaaatcaataatatgctgcgagaagtcggaatgacgggaaagcaggctgcgatagctaagcactatctgctgggggcactggaaatttatctatctgtagatggcaaactttcttcagccattgctgagtattctgaacagtccgatataaatacgctttttgaagaagggactatttatgacaagagtactcaaacggcgagtaattttagtcttacaatgttatacgctgctgcggagaacaatggtgtgcagggtgagttcattgatagagctgttgaagagttggtaaatgatcaagatctagaattatcagcaacaccctatctcattagatatcgtcttgtcgaatgctgctatgcattggaatatacagaggccccacttgcgttttatcgggagctggtaagtcttggtattatctcatgtgggaaatattctctaaatattgacacatatgcgaaaaaaaatgagtcaggggtgtcgttgttgtttctcagagcatgtttgcttttcgagtttaagatacttcaacgagcggtagcggtaatattatcgctaaaaaacaacaatacgattgcgttaccatctcctgacccaagaatgtctgccttagagcaaaaaaatatttctgattactataaaaggttagtggatgactggtttatggggcaggggaggcaatcttttgtgagttttcaatgcaaaggcgatatttcgattaaggatgtagaggtttttcttgggaatataaataaatattnnnnnnnnnnaacgtatgtttag

SEQ ID NO: 171881 - DNA, 216 bp, Enterobacter cloacae
atgacctgtattaccccatcggtaaaaattctgcgcatcagcgcccttgtgaaaaaaattggaatcagccgctcaacaatctatgactggctaaatccgaagtcgccacgctatgacgtaacattccctaaacagcgccgcctgggtatgcactctgttggctggatggaatctgaaatcgataaatggctggaggaatgctgcccgcaggtttga

SEQ ID NO: 171882 - DNA, 885 bp, Enterobacter cloacae
atgcaaaagtatgatgattttcctgttgatctgcttccagtacttattaaaagcacaatttatgaagtacaccagataacaaaggcccctatacctctgattggtgcatctgtcttgggtactatttcccttgtttgccaaagtcagattgatgtcatccgtccaggcaatcttcgtggaccggtatcactttttctgttgacgctagcagggtctggtgagcgtaaaactactgtcgataatctgctaatggagccattaagacgttttgaagaacagctgaacgaagattatttggaaaaatatagtgactatttgatagagctaaatgcggtaaaaacagagatcaaagccctgaatactgagttgagggcacaagttaggcgtaaagaagacacactggagataaaaaaagcactcaaagacgcgcataaatcgctcccggagccccctgaaaaatacaaaatgacattcaatgacgcaactccagccgcaattaaagaatttctgtgtaaagaacgctggaaatcggtgggtattatgtcggacgaggcaggaacgatattcaacggccacactctgaacgatctgccttttatcaataaaatgtgggatggcggaaaatttaccgttgatcgaaaaaatgagcccgaggccaccatccacgatgcccgaatgacgctgtcgctgatggttcaaccggagatgttcaccgcctatctggaacggcggggagaacaggctaagggtgtgggtttctttgcccgcagcctgatttgtttaccgacatctacacagggaccccgtctgatcgaatcaccggttatctcacgggaatatctgccagtattccatcgacgcctgatggacatagctactgggtaa

SEQ ID NO: 171883 - DNA, 594 bp, Enterobacter cloacae
atgcaactgcttcgcattcgtatcccagccttccgcaatctgcgtgatctagacatagctttcgatacccacctacagccttcgggaagtgcgacaaatgcactgcccaaacccattcgaagtcacgtgctgattggccaaaatggcactggcaaatccaatctgattgaggggctgatcaccatcttccgtgatgtcgatctcgatcgtgaagcagccttcaattatacactggaatacagtatccacggccatgttgtgcgtattgaagccgattctgccaagcagaaacgcccctatgtatgggtagatgataaagcagcatcacagggctttttgctcaaaaaccgccagttactgccagcacatatttttgcttattactcaggtcgcaatgagcgtattgaagctctgtttcatgaacatgagcgacgctttaatcagcgccaggaaatcaccactaacgaagtcctgtccgaacagcttctggaaaactttactggcaccgacgcggatattcgtgcgattgaagaggccaaacgtcgccgtgaagtgcggctgaaacaagtggtgtcaacaacgggtaaaaagtga

SEQ ID NO: 171884 - DNA, 1812 bp, Enterobacter cloacae
atggacgcgaaacaatttttggctgaatttggacatattgctaatgcaccaggtggtgtaacacgactacgtgaactaattttttcccttgcatctgatggcaagttgattccagactgcgagcttatagaaaaaactcacttagacaaagtggccgactttgtaatgggtcaggccccccctggaaatgaatgcaatacaacgggcaaagggacaatatttgtcaagaccggtgagttcggtgagctctatccaattgtccgtgaatggacaacaaagccactgaggtttgccaagcaaggtgacgtattaatttgcgtagttggtgcaacagttgggaaactaaatcttgcgattgactgcgcgattggtcgaagtgtagcggcgattcgaccccgcgatggattgaaaaccaaatacttatactacatgttgatgtcgtttacgttacaacttcgcagtggttcgcgtggttcagcacaaggagtcataggcaagtcggagctttcgtccgtgaagcttagggttccgaacgataacgaacagtctcgcatcgtcgccaaagtcgatgagctgatggccttgtgcgacaagtttgaagagcagttgcaatgtcgtcgtaaacttcaaaacgcattgcgtcaatcaatcctgcaggctattgccagggccaacagcgcgcaggaactgcaaaccaactggatgctccttgcagacaactttgggtggctgtttcgtacaccagaggatattgccgaactcagaaaactgtcttcagaacttgctattcgtggtgtacttgatacttacagcgggccaaccaacgaatcaacagttgatgtctatttggctgaattagggagaaagaagtcaggcaaacgattcgcaaaatctattcaaccggacgaattattttcactgccaaatggatggcgctgggttctgttagaagatttgttgtctgattcagaatcaggatggagtcccaaatgtgaagcagaacctcgccgtgaaggtgaatggggggtgcttaaagttagtgccgtgacatggggagtcttcgatccgaacgagaacaaacgccttccgctatcgcttgaggctagaactgagtgcgaagtaaagcctggcgatttcattctatcccgtgcaaataccgccgaattagttgcgcgcagtgtttgcgtgcctgatggctgcccaaagaagctcttaatgagcgataaaattgtccgtctgaatttcctcgacaatgatctgaaaccttgggtaaatttggtcaacaactcggaagttgctcgtgtttactacaaggaacgagcaactggcactagtgactcgatgcgcaatgtatcacgccaagttatccatgaattaccgattcctctcccttctctgagagtgcaggagcgaattttatctaccttaagtcgcttgcttcaatattgcgactcattagaaaagcaggcagcttctcgcattaaactgagcacacaacttgcggcaagtaccatcgcgagtctcaccggaatcgcaattgaacatgaagaggaacccatgaaagcccctcaaaccgagctgatctccttactacgtttgggcgcagcgcccgacatcaaagatcaagccccgcttgccaccattctggcccgtcataatggtgaaatgaacgccaaggatttatggcagcgattcaacggtgagattgatgccttctatgcacaactgaaaactgaagtggccaacggctggattaaggaaccgactcctgccgaagttcgtgaaaaaccagataacacggtgggtgcttga

SEQ ID NO: 171885 - DNA, 759 bp, Enterobacter cloacae
ttgtctacgggcgtggggtcagtccaaaaactactactgcgcgactgcaaattgcataccatcatccgcttaccgaaaggtgtttttgcgccgtatactaccatcaagaccaaccttctgtttttcaccaaaggcaactcggtggacaatggcactgaatacttccacaccgataccatctggttttacgagcacccctatccaccaggttacaaaagctactccaaaaccaagcccatccggctagaagaatttgaatccgagcgaaattggtggggtagcgaggccaacgattttgccgaccgggtagaaaacgaattcgcttggaaggtggatttcaaagccaaacgtgagcaggctgaaactgatgcgcaaccgcattggcaactcgcagaaatgctcaacaacaaagctagagaattggattgccgcatccgtgatttgcgcgattctattaaaggtgtcagcgataaaatccagcgccaagctgttgaagatgatattgaaattttacgctatgaaagtgagggcctacgcttaaaagcacgtgatgcccaagcggttggtgatggccactattggccaatttttaatcttgaccttaaaaaccctaatgtaccagaagaggaatccattgatcctgaagaacttttgattaaatacaagaagttgttgggagagattgaagaaacagaaaatcagctcaaaagcgaattagccgcagccttggctcatcatttttctggtgaggatgtttga

SEQ ID NO: 171886 - DNA, 408 bp, Enterobacter cloacae
atggatatagaaagcctcatttctgcagcgaaccgtgcccagcaggccgaagacagcgggttacacaattgttcgcgcatctggcatgtaggtttctttttcgatggtattcacaggaacatagaacaggatgcgccagagcaacgactcagtaatattgcccgtttgtttcgtgcatttcctgacgaaagacaaaatacgtcaagagaggcttacgatacggtctacatatctggcctcggcaccccttttaatgaagatctttccaccaaactcactgcattaatggatgggaccagaagtaatgtacaagataatctgaaagctcagcccattgaaatggctaaagacgctggcgaacaattacttaaaggtggcagctggtatgaaatattgaaaagcgggtaa

SEQ ID NO: 171887 - DNA, 159 bp, Enterobacter cloacae
atggatggtgaatggcctgaaacatccccatttcttttcgagggtaagtacaggtacggtctcaagccctgtcatgattccgaacaccacgacagcttcgccgcgcttaacgccagcagcaaaggttacggtgtaaccgtcaaccgtgaaacgccttga

SEQ ID NO: 171888 - DNA, 1029 bp, Enterobacter cloacae
atgagtaaacttattatccccggtaattctggcatgtttcttcgtgatattggtgctgagtaccaggaagccgccaaaaatttcatgcagttccttaatgaccagggtgcttactcacctaatacactgcgcgatctgcgcctggtctttcactcctgggcgcgttggtgtcacgctcgtggtcttgcgtggtttccgatctccccggaagctgcccgcgaatacctgcttcaactgcatgatgcggatctggcttcaaccaccattgaaaagcattacgccatgctcaatatgcttttgtcacaatgcggactgccgcaactatctgatgacaaaagcgtatccctggcgatgcggcgcatccggcgcgaagctgcaaccgaaaaaggcgaacgcacaggccaggcagtgcccctgcgctgggatgacctgaaacttctcgacgtgctgctctcccgctctgacaggctggtggatctgcgcaaccgggcttttctgttcctggcctacaataccctgttgcgtatggctgaaatgtcccgcgtgcgtgttcgcgatctggaacagactggtgacactgtaacgcttcacgtatcccacaccaaaaccatcacgaccgccgccggacttgataaggtgctctcccgccggacaactgcggttctcaatgactggctggacgcgtccggactacgtgatcccccggatgcgatacttttcccgccagtacaccggagcaacaaagcgcggatcactaccacgccactaaccgcgcccgcgatggagaagattttcagtgacgcctgggcgctgctgggtaagagtgatgccacccccaataaaggccgttaccggacgtggacaggccacagtgcgcgtgttggtgctgccatagatatggctgaaaaacaggtgtctatggttgaaattatgcaggaaggtacatggaagaagcccgaaacactgatgcgttatcttcgccgtggcggtgtgacagtaggtgccaatagccgcctcatggattcatga

SEQ ID NO: 171889 - DNA, 636 bp, Enterobacter cloacae
atgccatcaaacagcatcccccattacctctacaagcgtaaccacgtatggtggttcaggaagcgtttcgtcgctcagggcaatgcaatcgaatacagactgagcctgcaaacaacaagctttcagcgtgctcgtcttcttgccctgcgtttacaaacgctttgccaacagatggtagcttctttgggggtccccaagaaactgaagaatggcgtgatggaaaaatcagcacaagagcaaatcagagcaaaacttcgagcaaaaattgccgaatggaccgccgaggaaacagaacattggttctgcggctctaaccgtaatgaaggcgatctgaacgattatcttgagacattagatatggttgtctctgatttgaaagaacgcatcgcttacgatgataaaccatctctgcaccgggccgaagcaagtaccgttctggacgaactaccacacctcaaagctactctgagtgagtacgattaccaagtcattgctcgcatggtggcacaagccaaggtcaaatccttacaggatgccagagcaattattcttggtggggatgctgactggctttcaaccacatccccagcccctgcgactacttttgtggacaattcgttgaacacactggactga

SEQ ID NO: 171890 - DNA, 333 bp, Enterobacter cloacae
atgccggcagtactggcgctctttccgcagcttttcagaggcccgctctgcgtactgacagacagcctggcggagcgaatcgtactccgtgattttctctccaaagctgcggctgcagacgatctgctgtttcgtcggtggtgcttcctcaagcgacatgcagctttccccgttcagttcgtgtactgttcgctcgagaacgacggagaaatttttgcgtataaaggccgggttcgtcagggccagatcgagcgcggtcctgatacccagtacattaagtttgcgtgcaatacggtttcccacgccccagatctcttcgaccggctgcagtga

SEQ ID NO: 171891 - DNA, 294 bp, Enterobacter cloacae
gtgctccccgctggtcagggccattccttccggagcggacatcagcagcgcctcattgagcggcttcagccgctgctcaaacatctttatctggctgtcaacgtccgccttcagcgcctgtgcctgctccgccgcgatttccagctgctgcagctgctgattaagccggtcgatttccttcagggcagcgtccctgtccagtgcgtcaccctgcgctttcgcctgcgcatccgcgctgacaaacagtcctttaccggcacgtatcgtgccccactcatcggtgcgcagctctga

SEQ ID NO: 171892 - DNA, 516 bp, Enterobacter cloacae
atgagaatagagcagagattaaagcaacttgcagaagttaatcctaattactcattattatgggcacagtgtgaatttgacaaaaaattattatctagggctcttaatacagtatcaagagattttccacattacagtttgcatgatgcgtcacattcatccacaataattacacaaatagagaaagttatctccccaaatatttataaattgaccgcgacagattgttggttgctgttggagtcttgttattggcatgatgccggtatggtgattactaatgaagaaaaaaaagagctcttaagagatcctttatttcatttttatcttgaagagttatcccataaagaaagtgaactatcgaaacatgcaaaagaaatattacaaagtaaaaatgaaaatgatatcgtaaaagcactttctatatcgaattctttgacatttgttttggctgattatttcagaaaattcacgcggatagatcaggaaactttgtcaatgaaccatcaaagataa

SEQ ID NO: 171893 - DNA, 420 bp, Enterobacter cloacae
atggcaatgggccatgtgatccttaaagagttccacctcgataacccgagcgactacttcctcaactactgccgccgctacaccgacatgccgatgctggtcctgctggaagaacaggccgatggtcgcgtcgtaccggggcggatgctgcgggcctcagaccttgtcgacgggctgggtgaagccaataatcctgaatggaaaacggtcgcctttgatattgccgggaatctggtggtgccaaacggttccatcggcttccgctggggagaaaaaggcaaatggaacctggagccccgggcggcaggccatgaaagcgagctgaccctctccctgctgattacgcacgatagcgtcgcagatgtcgccttcccctactttggcggtaatgagaacccgcattttcgcagcgtgagatag

SEQ ID NO: 171894 - DNA, 510 bp, Enterobacter cloacae
atgacgatagccggcaccgtcaagctgctcgcgcagggcatcacgggacaggcgctggccttttttcatcaccagcgcatgaccatgcagatagctgtgcggacagacgcgctgcatcagggtatttaccggcacaatcagcacaccgcgctgcatggtcggcaactggtagagcgtcgacaggcgcgaggagatgatctcctgatgcggagagaagctgtcatacggcagcgtttcccagtcggccaggctgaacaccaggctatcggtgaactggcggatttcgtcgtgcaggcgcagggcattttgcatatccggggcaacaagcaccaccgggccggggtgtcgctcagcaatttctgccaccagcgtggcgcacgccgcgcccgtaagttcacccaactggcgctggtcgcccgctttgacaggcaaggaataacgatagtgttcaggcatggctatgtcagagtctcttatggatataccaacagtattggggcatatcactga

SEQ ID NO: 171895 - DNA, 531 bp, Enterobacter cloacae
atgcgtactaaatattcaagcctgcagattgcgattcactggctggtgtttttgttagttgtcgtcgcctactgcgcgatggagtttagaggctttttcccgcgtaccgatcgcccggtgataaacatgatccacgtctcctgcgggatctcggtgctggtgctgatggtggcgagattgctcatccgccttaaatatcccgcaccgcctattcagccgaaacccaaagcgatgatcaccggtatgtcgcaccttgggcatctcatcgtttatctgctgtttattgcgctgccgctgattggcattgtgatgatgtataaccgcggaaacgactggtttgcctttggcctgctgatgccgcatgcggcggaagggaattttgatctggtggatatgctgaaggagtggcacgagacgctcgccaatctcggctatttcttgattggtctgcacgcggcggcggcgctaatgcatcactatttctggaaagacaatacgctgctgcgcatgatgccgaaaaagcgtcagtag

SEQ ID NO: 171896 - DNA, 201 bp, Enterobacter cloacae
atgaatcaaatggtgttcagtaccttagtgttgatacagcagatttaccagttgaacattttgatgaaagtaatattcttggttctgttaatatcactactggctcaaacaccgattacttcaatactatggatagtacttatactaatccaaatggtgactacgcagaagatattattcgttacccaagtgatacactaa

SEQ ID NO: 171897 - DNA, 471 bp, Enterobacter cloacae
atggattatttaaaacggacgaataaaatattactttcgctagttataattttattcgtattcgctatcatagcttttgcaaaggtggtttttaatagtatgagcggtttagaatggggtagtgtatcagattgggtaagtactggatcgtctatagcgacaacttatatagcctaccttgcgtataaggctgcccccaattggtttaaacaaaagacttatgaagcgggtttcgaccatgtttctgctctgatgactgaatatgattcaatagaaagcgaaattcaaaaactctattataacattttaatcctcaacataaataatccaaaatttttaagcacctgtaatgaggttgaaacattgatgtatcgagtaatttccttactaggaaaactctatgcatgtgaaagatgggatgttattgtattacctgaaacacatagatgcctgtctcttatacacatctga

SEQ ID NO: 171898 - DNA, 543 bp, Enterobacter cloacae
atgtgtataagagacagagatgatacaggcccttcatcttctgtttatagaacccgatttggtggtcttttaagagcatatactttgattggttataagccagatcatgattacagctatctcaaaataaatgaagcactaagatcattttactcagagataattgaggattttaagggtgaaattttaaaaagtaactgtcatatagacgagtataaatatgccccaatgctttacatcaatgatgagtttttaatttccgtccttgttactaaatgcatacatatgaaatcaggtaaacttagatggaaagtccggtttgataactcacagaaagcagacataacaattgttatacgaatgaattcacaaaatatttcacctcttgatttttatatcataccaaagattgaaaacgaatatagtaaaatgtgcatgacggaaacaaacaacattcgattagatctctatagatttgataatcttgataaacttctacaaattattactcgcatgaaagtgagggaactatatgctgcctga

SEQ ID NO: 171899 - DNA, 1170 bp, Enterobacter cloacae
atgggaaaaaatagtcaacaaagacgtgcagctaaacaaagcaagaaaaatcagacaactagagagctagctgcgaagaagaacaggcaattgtatttgaagccagacatttttttcgatgagtctggcaatactggcggtaatctcttagattcgaagcaattctgtttcacattaggttcttgtcagataagtaagacagatgcacttaaggcacttgaactaaccggaagtaaatcacctgatgaagcacacttcaaaacgctaagacgtagaaaatcaggacaagatggaataatacggttattggaaagtaagtatattactactgaaaatgtaaaaatatttattatagacaaaagttatatgttgactacgaaaatagttgatattttgattgaaagctggagttataatcgtggcattgacatttacaaagacggtcaaaatttagctttatctaattatttttattattgccttcctgtgttttgtggaaaagaacctacataccgtatgtatgagcaattcatgaaaatgattaagtatcaggatgaagagtctattgaaggattttatgcttctgttgatcacttgaaaacttgcacaactgatgaaaaatttattagtacaattgataggattagtatcacaagaagtgatgtaaaagatattctagaggatactcaaaaatacatgcttgatcctgccatcccatcattctttaaacattgcattgaatgggataaaatctatccaaatgggtatcatattaagcatgatgattccaaagcaattcttgaacgaaaaggtttatttgatacattcatggattacacaaaagaacctgaaacatatggttatgatagaagggcttttgatctaccattgaaagctcgttctttaacctttcattcatcaattgaatatccgcaaattcaagttgctgatatagtagctagtgcagcagcatattatggaaattgtataaaaagtaataacactgatgattatcttttcaaagaactagaaagaattaaaattgacaagtattttaacgacatgcttgtttggcctacaacatctgtgacaccagaggaattaggaacaattcacacaggtggcattaatccggctgatggtgtggctaaattccttacagaagcctag

SEQ ID NO: 171900 - DNA, 369 bp, Enterobacter cloacae
gtgaaaggcatgcagaaaataaagcggggtaaacagtttgcaggtgtggttctctatagccttaagtcaggatctcaccacaaaatcacgccttatattatcggtggcaacatgacgggaagcactgctgctgaacttatcagtgaatttgaaggcacaagactactgcgccccggtgtcgccaaacctgtctggcataattcgcttcgcctgccaaagggagaaacactgtcagtcagacaatgggcggcattcgctgacgattatatgacccggatgggattcactgaaacccatcttcgctgctatatcatgcacgatgattcggacgggcagcatatccatataatagctaacaggtgcagatga

SEQ ID NO: 171901 - DNA, 687 bp, Enterobacter cloacae
gtgatgaagaataaaatagtacattttttcaatggtattacattatcacatattatgtgtattgctgttggagtattaattccaatttatgctgatgtactattttttcatggttatgatagctcaaccacatcggccatcatggataccgtgatggctatagcagctacctatacagcttttaaagttggcggatggcttaattcaaggctgaatgataaagcatttgaagaggcaaattcttgtataacaagtttaatgaatacaaaaaacaaggcaatagaattacaacaaagtattcgacagatatacgaatattctgactcaagagatcgcaataatacagataatacatataatgaattgagggcattatccaaaaaactgttaaatgaattcgaaagtaatattacaaacttaaactcaaaactgcaacttattcaggtttggggtttagagattaaacctaaaaaaaagaaagaacttgatgttataattaatagctatatcaatttcctcgaaagaagtgagtatttgattataattcttgatgatgtaaatggaatggcaaggaagcaaaaatatgaatacgagtcaatatcctatggtcatcatatcgcactaactcaaatgttaccatccaagtggtttacatcatggaagagtttatttcaggtatctaaataa

SEQ ID NO: 171902 - DNA, 516 bp, Enterobacter cloacae
  misc_feature (395)..(404): n is a, c, g, or t
atgaaagcctttgtttttgttaatgataacggcgctgcctttagccgttataaaaaaaatgagatccctgcgcagttcgtatacggcgtatccaaattagaaaagatgggctttgaggtaatggtcggtcggggaaacttacttaatgatctgatttcattttggaagttcaaaccagatttgttctttatgccttttattaaaagaaaaacgatgcttttttatattctggcacgtatttttttatttaaaacaaagtttgcgggttggatgcatctcgatgttttctcccctccagtgtctcggttaaagaaagtaatacattcattgcttctgccatttttaaagtgttatgtaagaaaaattgatgcgattttctttctttcggaaaagtnnnnnnnnnngaaatcaaggcctcaagaggacttcattctcatcaatgtcactttataccatggggaggagatgcaactttctatgcaccttttattaatggattacataacgagaatataa

SEQ ID NO: 171903 - DNA, 534 bp, Enterobacter cloacae
atgaaccgtctgaacgtcacctccatccttgccagtatcatcactgaacgggatgaaaatatgcagcagctggtagcccagctttcggacggaaagaaaacgtctggcagccctattgcaatacgttttaaaccagctgtcagggatttcgtcacactggtatcaggacgcctgggtatttcatcagctgaactggtcaatattctcgtcgagggtatcatgcgcgagacgcttatcccccgacaggctgtgatcacacatatccacgaacggttctggctgctgatggatgagcaccgcctgtcggtactggacgtggctcgcctgctctcggactggaatatcggtctgagcgttctggaaagccgtgaaagaacgatggattacttaactgcacctttgctgaaacagctatctgactggttctgtgtaagtaccagatggctggaaggaagtgatccccggccagtgtacctgaccgctttcagcgaatggattcaggttgccggtgatgctgccaacttactgatttag

SEQ ID NO: 171904 - DNA, 198 bp, Enterobacter cloacae
atgagtttaaataatagcacaggcaaaacaattaatgtgggtgatcaagtagtatttggtagagacaatgggaccggatatcatgattggggtattggaaagattgaaagcaataatggtattgatgtaagtattagttttggtatagatagttacaattctaaagatatagatattattattgcatacatctattag

SEQ ID NO: 171905 - DNA, 201 bp, Enterobacter cloacae
atggagtttaagaaaggagatgttgttacgtggtcaagccaggccgcgggcagctggaagacgaaaactggagtgattacggaagtgtgggaatacaaaaaacaaacgcgttacaccgtaaaagttgatccgaaggaagggtcgacggcgaaaccgaagttttactacccccgcacatcagcactacagaaagtgtcatga

SEQ ID NO: 171906 - DNA, 543 bp, Enterobacter cloacae
atgcattcacttgcgtatcaacacaataccggaatacacccgggggcgatgataaaccgcgctcaacataaggcggcgccagaccacgaaaagatccgcgatgcggtccgggcatggtcatcggcgctggacaatcaggacgtcgtttctgcgctgatcatcaacgaataccgggagcagggcgggaccgccatcagctttccggaagacatcagccgggcgcgccagaagctgttccgcttcctggataaccgtttcgactccgaacagtaccgcgagaacgtgcgccagctgacaccggcaatcatggccgtcctgcctgttgagtatcgcactcgccttatcggtgccgattgcaaaatgtctcgtctggctgaagccgagaaagaactcgcagaggctaagcaggccgtgctgctggacgctccagagcatcagaagctgaaagaggtaagcgagggtatagcgtcgctgttccgcctcatgccggagcaggttgggccgctgatgacgatggttacgtcgatgctgggggttatgtga

SEQ ID NO: 171907 - DNA, 168 bp, Enterobacter cloacae
atgtcaaaaactcgcaaaaagtaccaggaaaaagaggaacgtcgccatccagattcaccagatggcctggttgtcgctgcctcaaaaaaccgggcgttcgctgaacgcttcgttggcatggcaagactggcactgattcaggcaggggtgaagcatgggcgtcgttaa

SEQ ID NO: 171908 - DNA, 756 bp, Enterobacter cloacae
atgatgccgatgaaaacaggccgggatgtgatcggttctgcaatggcggttgaagagtccgcggcgaagatattcgaacagggcctgcaaagttcagggtttctctcttctgataaagctctggatgatactcaacgtgaaaaacttcgcggttacatggcggcgtttacaggctcaaaaaacgccgggaaaatcatggtgcttgagggaggcttgacgtaccagggcgtaaccatgaacccggaagatgctcagatgctcgaaagccgcgcctttagcattgaggagatctgccgctggtttcgcgttccgcctttcatggtcggtcacaccacgaagcaaagtagctgggcatccagtctggagggcatgaacctccagttcctgacgcacaccctgcgccccctgctggtgaacatagagcaggaaataggaaggtgcctgctggacagcgatgatgaggtgttcgcggagttctctgtagaaggactgctgcgggccgacagcgcgggccgtgctgcgtactataccagcgcgctccagaatgggtggatgtcccgcaatgacgtgcgccgtcttgagaatatgccaccgattgaagggggtgacatttacaccgttcagctcaacctgacgcaactgaaaaatctcgaaagcagcaatcctgctgtgcaggctctggccctgagagaactgcataaccacatattccctgacatttcctttgaacaatctccgctgaaacaggccgcttag

SEQ ID NO: 171909 - DNA, 387 bp, Enterobacter cloacae
atgaacctccagttcctgacacataccctgcgacccctgctggtgaacatagaacaggaaataggacggtgcctgctggacagcgatgatgaggtgttcgcagagttctctgtagaaggactgctgcgcgccgacagcgcgggccgtgctgcgtactataccagcgcgctccagaatgggtggatgtcccgcaatgacgtgcgccgtcttgagaatatgccaccgattgatgggggtgacatttacaccgttcagctcaacctgacgcaactgaaaaatctcgaaagcagcaatcctgctgttcaggctctggccctgagagaactgcataaccatatattccctggcatttcctttgaacaatctccgctgaaacaggccgcttag

SEQ ID NO: 171910 - DNA, 387 bp, Enterobacter cloacae
atgaacctccagttcctgacacataccctgcgacccctgctggtgaacatagaacaggaaataggacggtgcctgctggacagcgatgatgaggtgttcgcggagttctctgtagaaggactgctgcgggccgacagcgcgggccgtgctgcgtactataccagcgcgctccagaatgggtggatgtcccgcaatgacgtgcgccgtcttgagaatatgccaccgattgaagggggtgacatttacaccgttcagctcaacctgacgcaactgaaaaatctcgaaagcagcaatcctgctgtgcaggctctggccctgagagaactgcataaccacatattccctgacatttcctttgaacaatctccgctgaaacaggccgcttag

SEQ ID NO: 171911 - DNA, 144 bp, Enterobacter cloacae
atggtattgacggctctggtactgcctgggcaccgcaagcaggatcagggattgtatgtgggtatgacccaacgcgccgacagcaaatatttacaggagtatccgggaatctttttgtcaggaacctggctggagctgctatga

SEQ ID NO: 171912 - DNA, 537 bp, Enterobacter cloacae
atgaaaattaatccggatcttataggcgttgtcgttattgctggcctttcggtcgctctcgtcaagagttgctcccacgccagtaaccttcagagcgataacgacgttctgcgaagtgacaactctatgcaggggcaggtaatcgccacccaagcattcaacttcaatcgattcaatcaggttgcagaacatgccaacagtcttaactccctgatcgacaccagcaccgaagaaaccgtaatcgaataccgggagattctccgccgtgaaaaaacctgtgatctgcctgttcctgctgatatcgctggtgggttgctcgaatacacgtaccgtttacgtgccagcgccatgcacaccgataccggcagacctaacgaagcctatgatcgtaccgttgccaccagctcaatgacctactgccaagctgttttgtggattaagccgctactggcgttgatagaaaaaggaaataataatttttcgagtattcgtgaaattgatgagttgcgttacagaccatctgagcatggccagtaa

SEQ ID NO: 171913 - DNA, 411 bp, Enterobacter cloacae
atgagaaaaaaatattttgcgttactaagttttatggcactctttcaaaacagtgcgcatgcaactgttaacctaaaccaagtcattgaacacattgatatttccacctttaggaattctctttcccctcgttcccctcagaaaggcgagacattacctgctatgggattcgacgttcctgtaaaatatgaagaccagactatttatgggttgactaataaagaaaacacttggactttttctctatcaaatctgaaagttaacggaagtaaattaagtgcttgtttctacgactatgcaaacccaactcaagcaagttataaatcagtcacactattaacacttgtcaaaaataacactggaaaatattcagtaatttccgagtcacctgacaatactcaatgtaaataa

SEQ ID NO: 171914 - DNA, 210 bp, Enterobacter cloacae
atgtcagaaagaagtagcgtgaaatacattcaaaaaaagttgtggaattccaaaaacagttctattgtgtccatggtggttatttccactgtacaaatataccctgcctttggcggggtttttttatttgtggtgtttatgaatttcattttctctattaaggatgttttatgtctgaagatactatggttgttaacgcttatcctgtaa

SEQ ID NO: 171915 - DNA, 678 bp, Enterobacter cloacae
gtggatcagaatctgagaactatttatgaacatatgattaatttagggtgtggatcgttaaggcatgccaactttttggggcatttctatgatatgacaaacgattactggaatgaactggccgtgcttcaagcagcacatgccggtgaaatatttttgaaagctaggttagctcaagagcatccattattaatttttgataccatcccaaaatcaacaagtaaacatgtaaacagtgaaggtctgctaaatttcgaaaccttactacaggatggaagaactattgactattctgatttgccagaaaaggtttgggcagccacagggttaaaatttacaccagaccaattgcgtctttttaaagagtttggttttcttcgtaataaaatacaacattttgcctctcccaatgaagacattcaaagtcaaataacaaactacatatatggattcattgacccgtttataaactctcaatggggtttatatgcaattgatttttgtgacgatacagaaccatatgaaaaccttgttcctgttcttgcttatagggatgtagagtttttgattcccccaggattaggggcgaatgtgatgcgattaatagatgacggatcgcctgcttacattcgtaaaatgagaaaacaggcgattgagaagggttatattcctagttaa

SEQ ID NO: 171916 - DNA, 213 bp, Enterobacter cloacae
atgtcgctcatagcacctatttcccgcaacgaacgacacctgatgcagaaaacgattcataaaacccgtgacaaaaaccatacccgcagactgaccgccatattgatgctgcaccggagcgggaatgtctgccatgtcgcccgctctgcagcaccctttcgtcagttggtcgttggattaactggtttaccctttatggcattgacgggctga

SEQ ID NO: 171917 - DNA, 1425 bp, Enterobacter cloacae
atgtataacacaattgctaacaatgaatatccctcacaacattttcccaaggggcttagagatgttgcacaggatatcattgacataacgcaggcccctgtcgagttgatcatgggtacatgtctgagtgctatgtcactggcatctcaggcactggtgacctttcagcataaggatggaagaagaagccctgtctctttgtataacgtgattatcgcagaatcaggggaacgaaaaacggcagttttcaacctggtaatgaaacccatactggagtttgaaaaacaggcactgaaagcctactccgaaaaggtcagggtgtacgaggcggacttactggcctggcaggaaatcaataaatcgatacttagcatcatcagaaagaatgaaaaaaaaggagtggacagtacccgtgagcgggaaagactacgggaacattaccttgcaaaaccggaatcccccaggttacctaagctgatttacaacgacgcaacgcatgaagccatcgtcaaaggactgtcagaaaacattggttccgccgggctggtatctgatgaaggcggtggtgtgctaaacggaagggcgatgaacaactcccctttatttaatcaattgtgggatggtgttcccttcgacgtggaacgaaaaaaccaccgcctggtgattgatgacagtcgttttatcattcttatcctgacgcagttaaatgagttgaacagctttatcaaaaagcggggtgaacgggcaatggggaatggtttttttgccagatgcctgtggtcagtgactacaacaacgcaggggacgcgtcagacatcttcagaagcgaaatgcgatggtcagtatctggaagaattccatcaacgaataagtgagttactggagttaactatcagcaacgtatcgccgaagatacttcgtttttctcctgatgctgaaaagttgttttctgaatttcagcgtgaagttgaaaatcagatcgtggcagataaaagcaagcataatgccctgaccggaatactctctaaagtaccggagaatacagccagactggcagcgctgattcatttctttcttaaaatggaaggtgatgaaatagagcgtatagtactggaaaatattatccctgttattaagtattattataaccaggtggttaaggtgatgacagtgcgaatggacaaaggtgaagaggatgccagtctcctctatcaatggctattgcaggggccattaaatcaggggggtatatgtaccctggtggctaaaacacatgtcaggcgttacgctccgtatcaactcagggatggtacgcgtttgaataaggcattaaagatacttgaagagtatgggagtatttctatgtatagggaaagaaatacaaacgggagttttcaccaaatcatcaggattcaccggagttga

SEQ ID NO: 171918 - DNA, 222 bp, Enterobacter cloacae
atgaagattatcagtaaacgcaaggcgatgacgatataccggcaacatccacagtcccggctgtttcgcttctgtacctgcagatatcactggtccggcagcgtctgccattacgcaggtcgggaggtgcaggatattcgcggtgtgctggcggtatgcgcggaacgccgtcaggaccgcagcggcccgtatgtggtcctgcgctgcgtcacacttaattaa

SEQ ID NO: 171919 - DNA, 255 bp, Enterobacter cloacae
atgaatgatttttcacacatgcagcgtcataaagagaagttgatggcgtatgtcctgcacacagagtttggctatacgaaggtatccattgcacaactcatgaaaattagccctcaacagatggggcagtggataagagaagctagttatgaaattcaaatcaatagcttgcaaagagaagtgtctggattgaagcaagagctgattgcgctggggtataccccaatgaagactttagatccttctgatttttaa

SEQ ID NO: 171920 - DNA, 1251 bp, Enterobacter cloacae
  misc_feature (566)..(575): n is a, c, g, or t
atgaaggggatgcagaagataaagcgaggtaagaacttcgctggcgtagtgttttatgcattgagaccagcttctcatcacaaagttgatccagttgtcgtaggtagcaatatgatggggtgcctcgctaaagagctaatagctgagtttggtgctacaaaaacacttcgccctgatgtggctaaacccgtttggcacaactcgcttcgcttacctaaaggtgaatcactaacggctaaacagtggtcctacatcgcagatgactacatggcaagaatggggttctctgaaacgcatctcagatgctacatcctacatgacgacgaagacggccagcacatccatatcatcgcaagcagagtttctcttgatgcaggaaagctctacctcggcaagaacgagaacctggcaagcacaagaataattcagcaacttgaaagagattacaatctgacaagaaccaaaggaccgaaagcttctccagcagcgccctcacctacacagaagctcaaaaaatcccgtaatgagatgatgatagaaaagagaactggtgagctatgcccaannnnnnnnnngcttgataccaggcaatcgattaccgacttcgtgcaacagcttgtggcacaaaatatcaggccaatccctaacattgcctctactggacgcatgaacggcttctcattcgaatacaacgggattgctttcaaagcatctcaattgggaaaagggtattcctggtctgccttgcaaagcagaatcgactaccaacaggaacgtgataatgctttcctgtttaaactgaaatcatctgtcagagaaacatctgttagtgcaactcatgatatggtcataactatagatgctcctgaaaccacgacagaatacgttaaccgccccatagaagcacttatcctcgataaacgagctgctggtcaggacgaatactctatcgcttctgtcgaagcgcttctcccagaagctgttgcaactaacaaagaaacgatagcaaccgaaacgttaaaagtagcgcccaagcgaagctatagggcttcaacgttcagatggttagagaccatcccctatctcaataccattattaccatcttcaaaaacctcaaaatcccaacccttaaacgccctcaaaaacacaaaaccatcactggcgtgagaatggtagagattacgcctctcccccaaaaaaatctcattgaatcagcacctcaatccagaagagcttcgctttcgatgtaa

SEQ ID NO: 171921 - DNA, 222 bp, Enterobacter cloacae
atggataaagccgctgacgcacgtaccaaactggtccgtctgctggcgaccaaaggcatcacgcatgaaatcccgttaccggatatctctaccaaagagaaagcccaggcggcgattggtctgaacatgcagcaaatcaatgctgaaaagcaggacttcatcaaaacggtgattccgcagtgggaagatcaggcgcgtaaaaacggtctgttaagccaataa

SEQ ID NO: 171922 - DNA, 1035 bp, Klebsiella oxytoca
atggccaaacccatcattacgcttaacggcttaaaaattgtcatcatgcttggcatgatggtgatcatcctgactggtattcgcttcgcggcggatattatcgttccttttattctggcgatctttctggcggtagtgattaacccgctggttcagctcatggtgcgctgtcgggtgccgcgggtactggctatttcgctgctggtcggcgtcattgtcctgctggccgtggtgctactggcctcgctgggcacctcgcttaacgaactggcgcgcacgctgccgcagtaccgcaattatctttatgaaccgatgcagactatcgcgccatggctgcagcgcttcggctttaccgtctcggtggtagagcttaataagtacattgaccctaacgcggtgatgacgctggtgaccagtctgcttacccagctttcaaacgccatgtcctctatcttcctgctgctgctgacggtggtatttatgctgctggaggtcccgcagcttccggcaaagctgcagcagctgatgtcgcggccggtggaaggcatgggcgcgattcaacgggcgctggatagcgtctcccactaccttgtattaaaaaccgccatcagcctggtgaccggactggtggtctggggaatgctggtgctgctggacgttcgttttgcctttatgtgggggctgctggcttttgctctcaactatattccgaatattggctcggtcctcgcggcgatcccgccgattttacaggtgctggtcttcggcggtctgtacgaagcgctggtggtcctggcgggctatctggtgattaacctggtgttcggcaacatccttgaaccacgcattatgggccgcgggctggggttatcgacgctggtggtcttcctgtcgttgattttctggggctggctgctgggtccggtagggatgctgctttcggtaccgctgacgatcattgtcaaaatcgccctcgaacagacggtggccgggcagagtattgcctttctgctgagtgatttgagtaaaaactaa

SEQ ID NO: 171923 - DNA, 363 bp, Klebsiella oxytoca
atgttttattggattttattagctttagctatcgttgctgaaattaccggcactttgtcgatgaaatgggcaagcgtaagcggcgggcatactggttttattttaatgctggttatgatcgcgctttcctatatttttctcgcgttcgcggtgaaaaaaatcgccctcggcgtagcctacgccctgtgggaagggattgggattttactgatcaccatttttagcgttctgttgtttgatgagacgctgtcgatgataaaaatcgccgggctggtcaccctggtcgccgggattgtcttgatcaaatccgggacgcagaaagcggtaaaaccaggcaaggagaaagcgcatgcaacagtttga

SEQ ID NO: 171924 - DNA, 330 bp, Klebsiella oxytoca
atgcaacagtttgagtggatccacgccgcctggctggcgctggcgattgcgctggaaattatcgccaacgtttttcttaagttttccgacggctttcgccgtaaattctatggcgtgatgtcgctggctgcggtgcttggcgcctttagcgcgctctcgcaggcggtcaaggggattgacctgtcggtagcctatgcgctgtggggcggtttcggtatcgcggcgaccattgccgccggctgggtgctgtttggccagcgtttgaaccataaaggctggatcggggtgatcctgctggtggccggcatggtgttaattaaactcgcctga

SEQ ID NO: 171925 - DNA, 2157 bp, Klebsiella oxytoca
atgattcacttgccaggttggcgcaatattccctccgccagaacgctttccatcatgatctttttcgccgggatcggcctcatcgtgtcggtggtttttctgctctatctttcccagcatctgattggccagaaagcgaacgaaattgataagcatcgctccgttttatcggttaatggcgcggtgcagacgtcggttaaccgcgtgctgtcgctggttctggataattccgtctgggatgatgccgtgagtcagacctatgccggaaggctcgatccgcagtggctctataattcctggggttctggtttcaagattaacaatctctatgacggtactttcgtactcgatcagcactaccgcgtactgtggggatcgtttcgcagccagcctttccccgggcaggatacgcagtttctcggcagcggcttccacgcgcttatttcgcagcatgccgccgcgctgcgcagcggtaaaagcgcctgggctggcattacccgcacccgcgccggtattgcttttatcggcatcggcctgatccgtccgacggtcggacgcctgcaggtgtttgatgatacccgccgctatctggtgattacccgccatatcaacccgcaaatgcttgaacgtctaggcgatacgttccagattcgcaatctgcacgtcacccagaccggtggcgaatacagcattccgctacgtacccaggctggggaaaccgtgggctacctgagctggcagcccggcctgcctggcgccgaagcgtcgcgggcggcatcgaacagcattcggctgattgcagcggtggcggcagggctgatcctgctgtttatcctgttcagctgcctcgggctgtacaaactggcgcgtggcgaaagcgtggcgcgtcataccgccatgaccgactggctgagccgcctgcctaaccggcgggcgctgatcgaacggcttaatcaggtttgtgaaaattcgcgctatcagacgcaaagcgtggtgtttatcgatctcgacggctttaaggacgttaatgataactacggtcacgacgtcggcgatgcgctgatcctgcatatagcgaaggcgctgcgggagcgggttcccccggaagggatgctggcgcggatggggggcgacgagttcgcaatgacgattagcggcgcagaggcggccaatcaggcttcggcctttgcccgcgcggtgctggaactgttaaacgcaccgattatcctgagcggacgcaaaatctatatcagcgccagtatcggtattgccagcggcgtgccggcaagctgctccagcacggagctttttcgtcgcgccgatattgccatgtaccactctaaaaagactggcaaagggcgtaccacctggtatgacgacgcgctcagcgacgcgcggcagtatcagctcaatatcgagaatggcattcgtcagggactggagaacgaagagttcgatgtctggtatcagccgatcgtcaacgctgatacgctggtgatggaaggggtggaagcgctgctgcgctggccgcgacgcccgcagggggcgttgccgccggatgcgtttatcggtatcgccgaaagcagcggcctgatatacgccctcggtcaatttgtcctgcatcgcgcctgcagcgatctgcagccgttaggcgatctgcttctgtcggtaaatatctccccggcgcagttccgcgatccggagttcgagtcgcgggtagtccaggtgctgggacgctgccattttccggcccgtcgccttcagcttgaggttaccgagagctatgttctggagaatcccgaccgcgcgagaacggcgattaaaaatttaaaatcgctgggtatcgcggtagcgctcgacgattttggtaccggctactccagcatcggctacttacgcagcttcagcttcgacagcctcaagatcgataaatcgctggccggattggtggatgttgatacccaggccgcagagctggtgcgcggtaccgtgagaattgccggggcgctggacatcacggtggtggcggaaggcgtagagaatcaaaaacagctggcgctgctgcggcgggcgggatgcgacagattgcagggctactattttagcgaaccgatgcccgtcacgtcgttactgcagctgcgccagcagcagggctga

SEQ ID NO: 171926 - DNA, 813 bp, Klebsiella oxytoca
atgcgtagagacgtactgttattactgtgttcgatctgtcttttccctgcgctggtgcaggccgatgatgatggcatgagtgcgaaagatattaagacgctgttttttggtcatgacgaccgtaaacccgtcagcgaccccacagacgatccctgggatgctatcgggcagctggaaaccgccagcggtaatctctgtaccgccacgctgatttcccccaatctggcgctcaccgccgggcactgtctgcttacgccacctaaaggtaagccagacaaacccgtcgcgctgcgttttatctcgcgtaaaggcggctgggtgtacgaaattcacggtatcgaaggtcgggtagatccgtcactgggcaaacggcttaaggcagacggcgatggctggatagttcccagcgccgcggcgccgtgggattttggccttatcgtgctgcgctacgccccttccggcattacgccggtgccgatttttagcggcagcaaagccgatctgaccgccgcgctaaaaaccgccgaacggaaagtgactcagtctggctatccggaagatcatctggataatctctacacccatcaggattgcgtggtcaccggctgggcgcaggcatcggtgctctcccatcagtgcgatacgctgccgggcgatagcggctcgccgctgctgctgaaaactgatgatggctggcaggtgattgcggttcaaagctcggcgcctggaccaaaagatcgctggcgagcggataaccgcgccatctcggtgaccggttttcgcgataagctggaagccctggccgcccagtaa

SEQ ID NO: 171927 - DNA, 936 bp, Klebsiella oxytoca
atgccgccgctctacgcactgcgcgcttttgaaaccgccgctcggcttggttcgtttagtcaggccgccgccgcgctgcacgtcacgcccggcgccgtcagtcgccacgtcagcaccctggagtcatggtttgcatgccggctttttgttcgccatggcccaaaggtcacgcttaccgatgccggctatcagctggcgaaggcgctgaatgagagtttttcatcgatagaccgggcctgccagaccctgcgtcgtcaggcaggcaagctacggctgaaggcgccgtcaacgcttacgatgcgctggctattggacgtcctgcaacagtttcgccagcagcaccagcgaccggaagtggaaatgagcagcctgtggatggatcgcgacagcgtcgattttactcaggagccattcgactgcgcaatcctcctgggagatggcaattttggcaataataactgctgcagcctgctttttgccgaatggttaatcccgctttgcgcaccggggatgatgcagcaggccaggcaagatttagcggcctgcacgctaatacatccgtccaccgatcgccgtgactggcggcgctggctcgagcattatgagcgacctgcgccggatattgctcagggcatcgtctttgatacccttgagcaaggcaccatggcggcgatgagcgggcacggcgtcagcattggcgatctgctgcttaatctacccgcgatacgcgccgggctgctggccttacccttcccgactgcggtaactaccggcgaaggctactattttgtctggccgaaaaaccctctcagcccacagcccatcgctttactgcatcactttttaaatcagcatatccccggcccgctccccgataatattctccgccggggagaggagcccgaattagagaacgtgaaccgcggcaaccagtag

SEQ ID NO: 171928 - DNA, 609 bp, Klebsiella oxytoca
atgaatatctctttgctgacggcctactctttgacggtactggcgcttattgccaccccggggccggtggtggtgttagtgaccggcgcggcggcgcgggaaggctttgccagtgcggtgcgcacgatgattggcgggaatctggcttctttagtgctgctggccgctgctgctgcgatgctgaacggcatagtggcgcttgatccacgtgcgctaacgctgatggcgacgatcgggtcgctgtttattattcgacttgcgctggggatgttacgtgcagagccggtgacgcaggatgcatcgaaaaagcgtagtggggtgatggcaggatttgcgaccgcgttaagcaatcccaaagatatcctgttttttgccgcgttttttccgcagtttatttctgtaaccgacagcttcggtttgagcctggggctcctgacggcggtatgggtgatgatcgacttaggcgtgcttacgctctatattctggcggttcgtcgttggttaacggcgcgttacgcccagcgattaacaacggtgtcggcgtttttcctcctaattctggcgctttacggcctgggctacaacctctggcagctaagtcttcagtag

SEQ ID NO: 171929 - DNA, 369 bp, Klebsiella oxytoca
atgaaaaaagtattagctctggtcgttgccgctgctatgggtctgtcttctgtcgctttcgctgccgatgccgccaccaccgccactccggctccggctgctgcaactcacagcaccaccgctaaagcgacccatcacaagaaacaccataaagccgctgttaaaccggctgcagagcagaaagcgcaggcggctaaaaagcacaagaaagcagaagctaaaccggctgccgcccagaaggctcaggccgccaaaaaacacaaaaaggccgccgctaaaccggtagctcagaaagcccaggctgcgaaaaagcaccaaaaaaccaccgggcaccataccgctaaagctgctgcccaaccggctgcttaa

SEQ ID NO: 171930 - DNA, 1488 bp, Klebsiella oxytoca
atggaaaaaagttcgccgtatcagtcacttgtaaagacctttcagcgcctttcccgcttttcgcatctctccgccatcgccggctgggacatgttcaccatgatgccgcccggcggcagcgcggcccgcggcgaagcgctggctgagcttggcgttttgcaacatcagattctgaccgataaaaaagtgggcgaatggctgcgcaatgcgcttcaggaagagctgaacgatgctgagcaggcaaacctgcgcgagatgacccgtcagtacgagcaggcggcgctgctgccggaaagcctggtggaagcgaaatcgctggcggggagccgctgcgagcacgcctggcgcagccagcgtccggcgaacgactggcagggttttgctgaaaacctgcgggaagtggtcaagctgagccgcgaagaggcgcagattcgcgccgcggcaaaaggctgctcccgctatgacgcgctgctggatatttttgaaccggatatgaccagcgcgcgtcttgatgtgctgttcgctgacctcaagtcatggcttcccacgctgctggagaaagtggttgaaaagcaggcgcaaacgccacttctcgaacctcaagggccgtttccgattgctgaccagcgcgaactggggctggaagcgatgcgtgtactgggctttgattttgatggcggacggctggatatcagcgcccaccctttctgcggcggcgtgccccaggacgtgcgtatcaccacgcgctacaacgagaacgatctgctcagcgcgctgtttggcgtgattcatgaaaccggtcacgcacgctacgaacaaaatctaccgcgtaactggatcgatcagcccatcgctctcgcccgctctaccgcaatccacgagtcgcaaagcctgtttttcgaaatgcagctcggccgcagcgaagcctttcttcaacgcctgctgccaacggtacgccggtactttggcgagcagccggcctttagccgcgacaactttatcgcctggaatcaacgcgtcaaaccgggctttatccgcgtcgacgccgacgaggtgagctatccggcgcacgtcattctgcgctacgaaattgaacgtgcgttgattgatggcgatatcgaggttgatgatattccgtcgctgtgggatgaaaaaatgcagcactggctgggactgtctactaccggcaactatcgggacggctgtatgcaggatatccactggaccgatggcggttttggctacttcccgtcctacacgctgggcgctatgtacgccgctcagctgatggcttccgccagacgggcgctaccgcagctagaaagcgatatcgccaacggtaactttaccgccctcttcgattggctgcggcagaatatctggcagcacggcagccgtttcaccacctcgcagctgatacagcatgcgaccggggaagaccttaacagcgactttttccgccagcacctcacctcgcggtatctgtaa

SEQ ID NO: 171931 - DNA, 1251 bp, Klebsiella oxytoca
gtgagccgtacaactaccgctgacgccgtcccggcaagcgacgtcagcgacaccatcgctcctcagccaaaccagtttatcaaacgcggcactccgcaatttattcgcgttacgcttgcgctcttctctgccggactggcgactttcgcgctgctttattgtgttcagccgatcctgcccgtgctctccactgaattcggcgtctcaccagccagcagcagtatctcgttgtccatctccaccgccatgctggcggtcggcctgctgtttaccggcccgctctctgacgcgattggccgcaaacaggtaatggtgacggcgctggtgctggcttcctgctgctccctgctgtcgacgatgatgtccagctggcacgggatcctgattatgcgcgccctgattggtctgtcgctgagcggcgtggcggcggtcggcatgacctacctgagcgaagagatccatcccagcgtggtggcgttctcgatggggctgtatatcagcggtaactccatcggcggcatgagcggtcgtctgctgaccggtgtattcaccgatttcttcggctggcggattgcgctggcggtcattagcggcttcgcccttgccgcagcactgatgttctggcgcatcctgccggaatcgcgccacttccgtccgacctcgctgcgaccaaaaacgctgctgatcaactttcgtctgcactggcgcgatcgcgggctgcccctgctgttcctcgaaggttttttgttaatggggtctttcgtcactctgtttaactatattggctatcgcctgatgctctcgccgtggtcattaagccaggcggtcgtaggcctgctttcggtggcctatttaaccggaacatggagctcgccaaaagccggtgcgatgaccgtgcgctatggccgcggcgcggtgatgttgttctccacggcggttatgctcggcgggctgttgatgacgttattctcatcgctgtggctgattttcatcggcatgctgctgttctctgcgggatttttcgcagcccactcggtcgccagcagttggatcggcccacgagcccgccgcgcgcgtggccaggcctcgtcgctctatttattcagctactatctgggatccagcatggcggggacattaggcggcgtgttctggcataactacggctggaacggcgttggcgggtttattgcgctgatgctgctggctgcgctgcttaccggcgcctgtttgcacaagcgcctgaagtaa

SEQ ID NO: 171932 - DNA, 894 bp, Klebsiella oxytoca
atgaatattgagctgcgtcatctgcgctactttattgcggtggcggaagaactccattttggtcatgcggcggcgcggttgaacatatctcagccgccgcttagccagcagattcaaatccttgagcagcaaattggcgcacgtctgtttgctcgtaccaaccgcagcgttagcctgacggatgccggcaagcagtttctcgccgatagccggcagatcctctctcaggtggaagatgccgccgcgcgggccgctcgtcttcaccacggcgagaccggcgaattacgcattggctttacttcgtcggctccctttattaaggcggtatcggacacgttgtcgactttccgccatcgctatccggatgtgcatattcagacgcgggaaaccaacactcgcgagcagattgtgccgctaaacgaaggggcgctggacctggggctgatgcgtaacacccaactgccggaaacgctggtctgggaaagagtgctgcgtgaaccgctgctggcgatggtgccccgggaccatccgctggcgagccagcctggcgttagcctgcgggagctggcgcgggagccgttcgtcttttttgatcctcatgttggtaccggactgtatgacgatattctggggttaatgcgccgctacgacctgacgccggtcatcacccaggaggtgggggaagccatgaccattatcggcctggttgccgccgggcttggcgtgtcgattttaccggcctcattccggcgggttcagctgtcggaaatgtgctggttgcccatcgaagagcaggatgcggtctcggaaatgtggctggtatggtctaagcatcgtgagcagggtcaggcggcgcgccgttttcgcgaatcgctgctggccagcgccaggtga

SEQ ID NO: 171933 - DNA, 1221 bp, Klebsiella oxytoca
gtggtagcggacagtcagccaggccatatcgatcaaataaagcagaccaacgcgggcgcagtttatcgcctgattgatcagcttggcccggtgtcgcgcatcgacctctcgcgcttcgcgcagctcgcgcctgccagtatcactaaaatcgtccgcgaaatgctggaagcgcatctggttcaggaaacggaaatccaggagccgggaagccgtggaaggcccgccgtagggttgatggtggaaaccgaagcctggcactacctctcaatccgcatcagccgcggcgaaatccacctcgcgcttcgcgatctgagcagcgcgctggtggtggaagagcagctggagctggcattacaacacgtccagccctttgcgacgcggctcctcgatcacgtagaccagttctttattcgtcaccaaaagaagctggagcgtttaaccgccattgccgtcactatgccgggaattattgacaccgagcacggtattattcaccggatgccattttatgaagacgttaaggatatgccgctgggcgagattttagccaatcataccggcgtatcggtctatattcagcacgacatcagcgcctggaccatggccgaatcgctgtttggcgcctccaggggggcgcgcgatgtgattcaggtggttatcgaccacaacgtgggggcgggggtgatcaccgacggtcgtctgctgcacgcgggcagcagcagtctggttgaaatcggccacactcaggtcgacccgtatggtaaacgctgctattgcggcaaccatggctgtctggaaaccattgccagcgtcgagagcgtgctggaactggcgcagatccgcatggccaagtcgatgagctcaatgctgcatcagcagccgctcagcgtcgagtggctatgtgaggccgcgctgcagggggatttacttgcccgcgacattatcagcggcgtcgggaaccacgttgggcggattctggcgattatggttaacctctttaacccgcagaaaatccttatcggttcacctttcaacctcgccgctgatattttatttccggcaatatctgattgcattcgacaacaatcgttaccggcctacagccgacatattgccgttgaaagcacgcagttttctaaccggggaacgatggctggtgcggctctggtaaaggatgccctctataacggatcgttgctcatacgactgttacagggttaa

SEQ ID NO: 171934 - DNA, 696 bp, Klebsiella oxytoca
atgtttaagcgtttcttcataacaggtactgacacttctgtcggcaagacagtcgtttcccgtgcgctgttgcaggcactcgctgccagcggcaaaagcgtagccgggtacaagcctgtggcgaagggcagtaaagagacgccggacggactgcggaacaaagatgcgctggttttacagagcgtgtcatcgctggtgttaccgtatgatgctgtcaatcccatcgcgttaagcgaagatgaaagcagcgtggcgcatagttgcccaatcaactacggtctgttgtcggacggcctgcagcgcatgagcgcgcaggttgagcatgtggtggtcgaaggtaccggaggctggcgcagcctgatgaacgatctgcgtccgctgtcggagtgggtggtacaggaacagctgccggtgctgatggtggtggggattcaggaaggctgcatcaaccatgccttgctgaccgcacaggctatcgctaacgacggcctgccgctgattggctgggttgccaatcgtattaatccgggcctggcgcattatgctgaaattatcgatgtgctgagcaaaaaactgccagcgccgctcatcggtgaattgccttacttgccgcgcgcggaacagcgcgaactgagccagtatatcgacttatcgatgctcggcgagatgatggcggtagatagaatcccggcgtaa

SEQ ID NO: 171935 - DNA, 1260 bp, Klebsiella oxytoca
atgtttcgccgtctggtcattgccatgctggtcggcgtcttcgccgccctcgcggttgccctgttccgccatgcaatggcgggactggaaagcctgtttctgagcaatgacagcggaagtctggtgaacgccgctgagtctatgcccggatggcgtcggctgttaacgccaatgctgggcggccttgccgcaggcgccctgctatggttctggcagcgccgcagtgttgaacgtccgcacgcgccaaccgactacatggaagctctcgagaccggcgacggcgggtttgataccccggccagcctggtaaaatcgctggcctctctgctggtggtcaccaccggcagcgctattggccgggaaggggcgatgatcctgctggccgcgctggccgcctcgctgttcgcccgccggtttacgccaaaagatgagtggaagctgtgggtcgcctgcggcgccgccgccgggatggccagcgcataccatgcgccgcttgccggcagcctgtttatcgccgagatcttattcggcactctgatgctggcgtcgcttggtccggtcgtcattgctgcggtaaccgccctgctgctcaccaatctgctgaacggaagttcggcgccgctctaccatgttgagtttcacgccaccctgcgcgcgacccactatgggttaatgctggcaacgggtttgctggccgggctttgcgggccgctgtttatctggctgatgagctatagccatcactgctttgtccggctgcgtctgtcgcccccctggcagctggcgctgggcgggcttattgtcggcctgctctcgcttctcgcgccggccgtctggggaaatggctacagtgtcgtacaaagctatctgctttcgccgccgctcttcagcgctatcattcttgtctttgtctgcaagctgctcgccgtgctggccagcagcggttccggcgcgccgggcggggtgtttacgccaacgctgtttgttggcctggggatcggcatgctgttcgccagcctgacgggactgtggctacctgattaccaggagatcgcgataatcataggcttaaccggcatggcggcgtttctggcggcgacaacccatgcgccgattatgtccacgctgatgatttgtgaaatgaccggacagtacgttttactgcccggtttattgattgccagcgtactggcatcggtgctgtcgcggacgttacgccgggattctatctaccgccatcatctcgccgagcatcgataa

SEQ ID NO: 171936 - DNA, 609 bp, Klebsiella oxytoca
atgatgcaatcgcaagaccgcgacgctgtcgcactcagcgcccgcacgctgggcgctctgttctcttttgcgccggacagcgagcaggctgctccgctggttgcgaccctgcgcgacggcagctggcgaagtcagtggccctacgcggtgacggacggcctggcggcgctgttcgctcgcgaggacgatgaaccgctaccggaagcctggcagcggctgtttatcggtccgtgggcgctgcctgcgccgccgtggggctccgtctggctggataaagaaagcgtgttgtttggcgactcaacgctggcgcttcgtgaatggatgcgggcaaccggcatcgcgctgtccgaacaacgttcggagccggaagaccactttggcaccctgctactgctggcagcctggctgtgcgaatctgctcaggatgaggcctttaaccagcttctggcctggcatctcctcccgtggtccggccgctttctgagcgtatttgtggctgaggcgaatcagcctttttatcaggctcttggccagctggcgcaagagacgctggcgcaatggcaggtgcggctgccctgtgcggtggccgagaaaccgctctaccgttaa

SEQ ID NO: 171937 - DNA, 858 bp, Klebsiella oxytoca
atgggaaacggatggcatgaatggccgctggtgctgtttacggtgctggggcaaagcgtcgcaggggcgattatcgtcagcgggctgggctggctttcgctgaataacaactccgaagcccggcagcgcctggtgcggggcatgttttttatctggctgataatggggattggttttctcgcgtcaatcatccacctcggctcgccgctgcgggcatttaacgcccttaaccgggtaggatcatcggcgttaagcaatgaaattgccagcggcgcgctatttttcgccgtcgggggtttctggtggctggtgacgattctcgggaaaatgccgcgggttctggcgaaagcctggctcctgctgactatgctgctcggctgcctgttcgtccttgagatgaccatggtgtaccagattgataccgtgccgacctggtataatgcctacaccaccgccgcatttttcctgacaatggtgctgtgcgggccgcttttcgccgccctgctgctgcgcgtagccaacgtgccgtttaacggcagagttttcgcttcgatgagcgtgctcgcgctgctggcaagcctggcggtcgtcatattgcagaacagcgagctggcggagatccacagctccgtacagcaggccagcgcactgctgccttattatggctggctgcaaatcctgcggttagttcttttggcgctgggtctcggctgctggatctgcccgctggcaagacgccagaatccgcgcatcgccagcttgttgctcggactggcactggtgatgctcggcgagtttatcggccgcggcctgttttatggtctccatatgaccgtgggtacggcgattgccggttaa

SEQ ID NO: 171938 - DNA, 618 bp, Klebsiella oxytoca
atgagcgctcagtatggattttttatcgactccgcccgctgcacgggctgtaagacctgcgagctggcctgtaaggattataaaaacttaacgcctgatgtcagctttcgccgcatctacgaatacgcgggcggcgactggcaggaagataacggcgtgtggcagcaaaacgtcttcgcctattacctgtcaatcgcctgcaaccactgcgcagatccggcctgcacgaaagtatgccccagcggcgccatgcacaagcgcgatgacggtttcgtggtggtgaacgaagaggtatgcatcggctgtcgctactgccatatggcctgcccttacggtgcgccgcagtacaacgcggcaaaaggccatatgactaaatgcgacggctgctatgaccgggtcgccgaaggtaaaaaaccgatatgcgtcgagtcctgcccgctgcgggctctcgactttggccccatcgaagaactccgcgaaaaacacggtcagctggccgccgtcgctccgctgccgtctgcgcacttcaccaggccgagtatcgtgctcaaaccgaacgccaatgcgcgtccgtgcggcgataccaccggctatctggccaacccgaaggaggtataa

SEQ ID NO: 171939 - DNA, 2436 bp, Klebsiella oxytoca
atgtctaaccaggaacataccgacggccttacccgccgaacgctaatcaaatcaaccgcccttggttcgctggccctcgccgccggcggtttatcgctgcctttcagcctgcgcaatgccgccgccgcggtgcaagacgctacgcgcggtgaagaacggattgtctggggggcctgctcggtcaactgcggcagccgctgcgcgctgcgttcacacgtgcgtgacgatgaagtcgtctgggtcgaaaccgacaataccggcgcggatatttatggcgatcaccaggtgcgcgcgtgcctgcgcggccgttccattcgccggcgcattaatcatcccgatcgccttaattatcccatgaagcgcgtcggtaaacgcggcgaaggcaagtttgtccgcattagctgggaagaggcgctggatacgattgctggcaatctcaaacgcatcgtcaaagattatggcaacgaagccgtttatattaactactcttcggggattgtcggcggcaacatgacgcgttcgtcacccaccgcctcaccggtaatgcgcctgatgaactgctacggcggctcattgaatcagtacggaacctacagtacagcgcaaattgcctgcgccatgccctacacctacggcagcaatgatggcaacagcacctccgatattgaaaacagcaagctggtggtgatgttcggtaataacccggcagaaacccgcatgagcggtggcggcatcacttattatttagaacaggcgcgcgagcgctctaacgcgcgaatgatcgttatcgacccgcgctataccgataccgccgccgggcgggaagatgagtggatcccgattcgccccggcaccgacgccgcgctggtggccggcatcgcctgggtgctgattaatgaaaatctggtcgatcagccattcctcgataaatactgcgtcggttacgatgagaaaacgctgccggcagatgccccggcgaacgggcattacaaagcgtatattctcggcgagggtgacgacggcacggcgaaaaccccacaatgggcatcgcggatcaccggcattcccgccaaccgcatcatcaagctggcccgggaaatcggcagcacgaaaccggcttatatttgccagggatggggaccacagcgccaggctaacggtgaactatcggcccgagcgatcgccatgctgccgatactgaccggcaacgtcggcattaacggcggcaacagcggcgcccgcgaatccacctataccattactattgaacgcctgccggtgctgaccaatccggttaaaaccgccatctcctgctttagctggaccgacgccatcgctcgcggcccggaaatgaccgccacccgcgacggcgtacgcggcaaagagaagctggatgtgccaattaaattcctctggaactatgccggcaacaccattatcaaccagcactcggatatcaataaaactcacgagatcctgcaggatgaaagcaaatgcgagatgatcgtggttatcgaaaactttatgacctcatcggccaaatatgccgatattctgctgccggacctgatgaccgtcgagcaggaagatattattcccaacgattacgccggcaatatgggttatctcattttcattcagccggtcacctccgccaaatttgagcgcaaacctatctactggatccttagcgaagtggcaaaacggcttggcgaggatgtccaccagaagtttaccgaaggccgtacccaggagcagtggctgcagcatttgtacgcgaaaatgctggcgaaagacccggcgctcccgagctatgacgaactgaaaaagatggggatttataaacgtagagaccccaacggccactttgtcgcctatcgcgacttccgtaaagacccggccgccaatccgttaaaaaccccgtcgggtaaaatcgagatttactccagccgtctggcggagatcgccgcaaactggcagctcgaaaaggacgaaaccattagcccgctgccgatctacgcctcaacctttgaaggctgggatgatcctttacgcgagaagttcccgctgcaaatgttcggcttccactacaaggcgcgcacccactcaagctacggcaatgtggatatactgcaggcagcctgccgtcaggaggtgtggctaaatcctctggacgccgaaaaacgcgggatcaagaacggcgatatggtgcgcgtattcaacgcccgcggcgaactgcggatcccggccaaggtgaccccgcgcatcatgcccggcgtgtcggcgatgggccagggggcctggcatgatgccaatatgaatggcgatcgtatcgatcgcggctcgtgtatcaatacgctgacgacgcaccgcccttcgccgctggctaagggcaacccgcagcacaccaatctggtcgaaatcgagaaggtttaa

SEQ ID NO: 171940 - DNA, 252 bp, Klebsiella oxytoca
atgaaactatccccctggctctgtgcggccctgcttctgggttcgacagctgctttcgcggcgccggattcctgcgagcgggtaaaaagcgatattcagcagaaaatcatcaacaacggcgtcccggaatcgggctttagcctggcgatcgtcccgaacgaccagcccgatcggcccggcgagcaggtggtcggccactgcgccaacgatacctttaagatcatctacacccgcgacagcggcgcgcagtaa

SEQ ID NO: 171941 - DNA, 711 bp, Klebsiella oxytoca
gtgaaaaaacggtttttgctgttactggctgtcggagcgcttagcgcctgcgatgaaaagggagctcctcaggccttcactcccgaaatggccagtttttctaacgaatttgagttcgatccgctgcgtgggccggtgaaagagtttagccagacgctgtatgacgaacatgatgaagtggtgaagtgggttaaagggcgtttatccagcgaagggtgctttgacctgctggcatttgaagacctggagaacaaaaccggcgcggcgctggtgctggacgcgaactactatctggatgcgcaaagccaggaaaaacgcctgcgtttgcaaggaaaatgccagctggcggaaatgccttcggcgggcgtgtcgtgggaaaccgatgataacggatttgttgtcaccgctcgcggcaaggagagcaccgcgacctaccgctatgatagcgaaggctatccgctgggtaaaacgaccaccgctaaaggcgagcgttttacggtaagctcaacgccgtcgtccgatccgcgcaaaaagatggactacaccgcagtgagcatctttaatgaccgcacgctgggcaacgtaagtcagacctgcgattacgacgaccacgacaacccggtaagctgtgagcttaaggttgtcgacgacagcgtacagcctgcgctgatccgccactacaccatcaaaagcaccattgactattactga

SEQ ID NO: 171942 - DNA, 561 bp, Klebsiella oxytoca
atgactgacgcttatcacgtcaaactccgcccgcttgagcgcgaagacctccgctttgtccaccagctcgacaacaacgccagcgttatgcgctactggtttgaagagccctatgaagcctttgttgaactttccgacctgtacgacaagcacattcacgatcagagcgaacgccgctttgttattgaatgcgacggcgaaaaggccggactggttgagctggttgaaatcaaccacgtgcaccgtcgcgctgagtttcagatcatcatctcccctgattatcagggcaaaggactggccacccgcgccgcgaagctcgccatggattacggctttatggtgctcaacttatataagctctaccttatcgtcgataaagaaaatgaaaaagcgatccacatctaccgcaagctcggatttatggtggaaggtgaactgatccacgaattctttattaacggtgaatatcgcaataccatccgtatgtgcctgttccaacaccagtatctggccgagcataaaccacagggccagacgctgctgaaaccgacggctcagtaa

SEQ ID NO: 171943 - DNA, 342 bp, Klebsiella oxytoca
atgaacacaacactgaacaaacgctggtgtctgaccgccctgctggcgctgagcgcgatggtctttaccgcatcgtcgttcgccaaaacggacaagctggtcattgagtccggcgacagcgcccagagccgccagcaggccgcgatggaaaaagagcagtggaacgacacccgctctttacgccagaaggtcaacaagcgcgccgaaaaagagtgggacaaagccgacgtggcttttgatgcccaggacaactgccagaagagcgcgaacgtcaacgcgtactgggaacctaacaccctgcgctgccttgaccgccgcactggccgcactattactccgtaa

SEQ ID NO: 171944 - DNA, 327 bp, Klebsiella oxytoca
atggtaaaaaccacgctgcttttctttgccaccgcgctgtgtgaaatcattggctgctatttaccgtggctatggttaaaacgtggggcgacgccctggctactgattccgaccggcctggcgttggcgctttttgtctggctgttgacgctgcacccggaggcaagtgggcgggtgtacgccgcttatggcggggtatatgtttgcaccgctctgctatggttgcgtttcgtcgatggcgtcaaactgagccattatgattgggccggggcgctggttgcgctgtgcggcatgctgattattgtggccggctggggacgcgcttag

SEQ ID NO: 171945 - DNA, 1215 bp, Klebsiella oxytoca
atgaagatcgttgccgctgaagttttcgtcacctgcccgggacgcaacttcgtcacccttaagatcaccactgatgatggtatcgtcggtttaggtgacgcgacgctaaacggccgcgagctgtccgttgcatcgtatctgcgggatcacctctgcccgcagctgattggccgcgatgcgcaccgcatagaagatatctggcagtttttctacaagggcgcctactggcgtcgcggcccggtcacgatgtcggcgatttccgctatcgatatggcgctgtgggatatcaaagcgaaggctgcgggtatgccgctgtatcagctgctgggcggggcttcgcgggaaggggtcatggtttattgccataccaccggccactctattgacgaagtgctggacgactacgcgcgccataaagagatggggtttaaagcgattcgcgtgcagtgcggcgtgccgggaatgaaaaccacttacggtatggcgaaaggtaaaggccaggcctacgaaccggcaacgaaaggccagtggccggaagaacagctatggtccaccgaaaagtatctcgatttcactccgcgcctgtttgccgccgtgcgcgaaaagtttggttttgacgagcatctgctgcacgacatgcaccatcgcctgacgccgatcgaagcggcgcgttttggcaaaagcattgaagagtaccgcctgttctggatggaagacccgaccccggcagaaaaccaggagtgcttccgtttaattcgtcagcataccgtcacgccgattgccgttggagaagtgttcaacagcatctgggactgtaaacagctgattgaagagcagctgattgactatatccgtaccaccatcactcacgctggcgggattacaggaatgcgccggattgccgatttcgcctcgctttatcaggtgcgcaccggctcgcacgggccgtccgatctctcaccggtctgcatggccgccgcgctgcatttcgacctgtgggtaccgaatttcggcgtacaggaatatatgggttactccgagcagatgctggaagttttcccgcatagctggacatttgataacggctatatgcacccgggggaaaaaccgggactcggtatcgaatttgatgaaaaactggccgcgaaatacccctatgaaccggcttatctgcctgtcgcacgtctggaagacggcacgttgtggaactggtaa

SEQ ID NO: 171946 - DNA, 1020 bp, Klebsiella oxytoca
atgaaaagtatcgtaattcgtcagccgaatgaactggttattgaagaacgtccgctcccgcaacctgccgcaggagaagtacgggttaaggtgaaactggcgggaatatgcggttccgatagccatatttaccgtggtcataatccgttcgccaaatacccgcgggtgataggccatgaattttttggcgttatcgacgccattggcgagggcgttaccgataaagccatcggccagcgcgtgagcgttgatccggtcattagctgcggtcattgctacccctgttccgtgggcaagccgaacgtctgcacttcgttagtggtgcttggcgtgcatcgggacggggggtttagcgaatacgcggtggtgccggcgaaaaatgcctggcgggtgcctgacaacgtttccgacaaggatgcggtgatgattgagcctttcactattgcggccaacgttaccgggcacgtttcgccgaccgaccaggatattgcgctggtatacggcgcgggtcctatgggcctgacgaccatacaagtgctgaagcgggtgtaccgcgttaagcaggttatcgttgtcgaccgcatcgatgaacgcctgcagatggccgagcgtaacggagcggattgggtaattaacaacagcaatgagcctctggctgacacgctgaaggcgcaggggatccttccgacgctgatcattgatgcggcctgccatccctctattttacaagaggcggttaccctggcctcgccggcggcgagaattgtcttgatgggcttctcgactgagccttcgcaggtggcgcagcaaggaattacggggaaagaactgtcgattttctcatcgcggcttaacgccaataaattccccgtggtcattgattggttagaacaagggttaattgatccgcaggagttgattacccacgaatttgcgtatcaacacgttgttgacgctcttgagctttttgaaaatgacagaaaacgttgctgtaaggttttattaaccttcgggcaataa

SEQ ID NO: 171947 - DNA, 1377 bp, Klebsiella oxytoca
atgactaccgttaaaaatgagagaaccacttccgatctcattcgtgcagccgtatctggttggttaggtactgcgctggagtttatggatttccagctctattccctgggcgcagcgctggttttccacgagatatttttcccggagcaatctgccgctatggcgcttattctggcgatgggcacgtacggcgcaggctatattgcgcgcatcgtcggcgcctttattttcggtaaaatgggcgaccgtattgggcgtaagaaagtcctgtttattaccatcacgatgatgggtatttgcactacgctcattggcgtgctgccaacctatgcgcaggtggggattttagcgccggtattgctggtcacattacgcattattcagggtctgggcgcgggcgctgaaatatccggtgcgggcaccatgctggcggaatatgcgccgaaaggtaagcgcggaattatctcttcgctggtagcgatgggaaccaactgcggtaccttaagcgctacggctatctgggcggtgatgttcttcgtgctggatcgcgaacagctcgtcgcgtggggatggcgtgtgccgttcctcgccagcgtagtggtgatgatctttgccatctggctgcgcctcaatctgaaagaaagcccggtatttgaaaaggtgagcgaagaaggcagtctgcaaaatggagtggccgctcaggaaggctccttcagcgcaatgctgaaaagtaagtctttctggctggccacggggctgcgctttgggcaggccggaaattcagggctgttgcaaacgttcctggcgggctatctggttcaaaccttaatgtttgataaaggtatccccaccgatgcgctaatgatcagctccgtgattggttttatcaccattccattcctgggctggctgtcagataaagtagggcgccgcatcccttatattatcatcaatatttcagccattattctggcctggccgatgctgtcgattattgttgataaaagctacagcgcgagcaccattatggcgtcattaatcgtcattcataacgtcgctgtattaggcctgtttgcgctggaaaatattacgatggctgaaatattcggctcacgtaaccgctttacccgcatggcaatctctaaagaggcgggtggtttagtcgcggttggctttggtcctgttctggccggtatcttctgtaatatgaccggttcatggatgcccattgttgttatgctggtgtgctactcaatcatcggcttaatttctgccatcctgatgcctgaagttcgcgatcgcgatctgagcttgctgaatgatgcagcggattgcgcaccgcagaataaagcggtgggcaacgggcaatatatttaa

SEQ ID NO: 171948 - DNA, 1464 bp, Klebsiella oxytoca
atggaaaatatgcttttaacagcgcatgccacgctgccatcctacgatcgtaaccgtctcgttccgcgcattgtccatctgggctttggcgcatttcatcgcgcgcatcaggccgtatatacagatattctggcgacggagcacgacagcgactggggttatattgaggtaaacctgatcggcggcgaacagcagattgccgacctgcagcagcaggatttactttataccgtcgcggaaatgtcggccgatgcctggaccgctcgcgttgttggcgtggttaagcaggcgatacatgcccaggtggatggcctggaaagcgtcctggcgaaaatgtgcgagccccaggtcgcgattgtgtcactgaccattactgaaaagggctactgccactctccggccagcggccagctgcagctggaccatccgttaattgctgccgatttacaacatcctcatcaaccgaaatctgcgccgggcgtggtggttgaagcgctggcgcggcgcaaagcagcaggactgccgccgttaagcgtcatgtcctgcgataatatgccggaaaacggtcacgtaatgcgtaatgtcgtctgcgcctatgctaacgctgtcgatgctgagttagccgagtggattgcgcgtaatgtcacttttccctccactatggtggaccgcatcgttccggcggtaacggccgatacattagagaaaattgagcagcttaccggcgttcgtgacccggcgggcgtcgcctgtgagccgtttcgccagtgggtcatcgaagataactttgtcgccggtcgtccagaatgggagaaagccggcgccgaactggtctctgacgtgctgccgtttgaagagatgaagctgcgtatgctaaacggcagccactctttccttgcctggctgggctatctggccggctaccagcatattaatgactgcatgctggacgacaactatcgccgcgccgcgcatgcgctgatgatgactgagcaggcgccgacgctaagcgtgcagggcgttgatctggcacgctatgccggcctgttgatcgatcgctatagcaacccggcgctgcagcaccgtacctggcagatagccatggacggcagtcagaagctaccgcagcggatgctggattcgattcgctggcacctggttcatggcagcgactttacgctgctggcgatgggcgttgccggctggatgcgctacgtcagcggggtggacgaccgggggcaggaaattgaaatttccgatccgctattgccgatcatccagcagactgtccaaaatagcgcggacggagaagagcgggttaaagcgctgatgggcattgaggctattttcggccaggacctgagccaggagccccggtttgttaatgaggttacgcgcgcttatctgtcgctgaaaaaacacggagccaaagcgaccgttgccgcctgggctcaggagaactaa

SEQ ID NO: 171949 - DNA, 432 bp, Klebsiella oxytoca
atgtacaaaaaaattttgttgccagtagacgtttttgaaatggatttaagtgataaggcggtgcgtcatgccgagtttttggcctcagcggatgaaggtgaaataacgctgctcaacgttctgccgaacagcagtagctcaatattgcgcggctttgcggctgatatacgtaagtttgaagcctatatgcgcgaggagtcggagaaaaaaatgaagacgatatcccgtctgttctcgattcccgccgggcgaattcactccagagtggtgtttggcaacgtacgtgatgaaatcctggcggtgagcagtaatgaagaatttgatgttatcgttattggctcccgtaaaccgggaatatcaacccatctgttgggctctaacgccgagtcgattttacgccacgccaaaataccggttttggttgtcagataa

SEQ ID NO: 171950 - DNA, 687 bp, Klebsiella oxytoca
atggccgcagaagctcaactgaatccgacacagcccgtaaatcagcaaatttatcgtatccttcgtcgggatatcgtccattgtctgattccgcccgggaccccgctttcggagaaagaagtctccgtgcgctttgacgtttctcgccagccggtgcgcgaagcctttataaaactggctgaaaatggcctgatccagatccgtccgcagcgcggcagctacgtaaataagatctctctctcgcaggtacgaaacggttgttttgtccgccaggctatcgaatgcgccgtggtgcgacgcgctgccggaatggtgaatgatgagcagctctaccagcttgagcaaaatcttaatcagcagcgcacggcggttgagcgccagcagttaaccgattttttccagctggatgatgagtttcatcagaagctttcgcaaattgccgactgccagctcgcctgggataccgttgaaaacattaaagccaccattgaccgggtgcgctacatgagcctcgatcacgtcactcctcccgatatgatgctgcgccagcattatgatattttccagccgctggtggcccgcaacccggatgcggttgaaaaggcgatgagcctgcatctgcaagaaattagcgaatccgtgctgctggtacgtcaggaaaatagcgactggtttagcgaagagtaa

SEQ ID NO: 171951 - DNA, 750 bp, Klebsiella oxytoca
atgattatcctggttaccggagcaaccgcgggttttggtgaaagcattactcgccgttttatcgctaacggtcacaaagtgattgccaccgggcgtcgcgaagaacgcctgaaaactcttaaggatgagctgggcgagaatctttataccgcccagctggacgtacgcaatcgcgcagccatcgaagagatgattgccgggctgccggctgactggcaggcgattgatgttctcgtcaataatgccgggcttgcgctgggtcttgaacccgcccataaagccagcattgaagactgggaagacatgattgacaccaataacaaagggctggtttatatgacccgcgccgttctgccgggaatggttgaacgtaatcgcggccatatcattaacatcggctcggtcgccggcgcgtggccatatgcaggcggtaacgtctacggcgcgaccaaagcgtttgtgcgccagttcagcctgaacctgcgtacagacctgcacggtacggccctgcgcgtgaccgatattgaaccgggcctggttggcggaaccgaattctctaacgtgcgctttaaaggtgacgacgcgaaggcgggtaaagcctacgagaataccgaagccctgacgccggaagacgtcaccgaagcggtctggtgggtcgcgaacctgccaaaacacgtcaacatcaacaccctggaaatgatgccggtcagccaaagttttgccggactgaacgttcaccgtcagggctaa

SEQ ID NO: 171952 - DNA, 2043 bp, Klebsiella oxytoca
atgtcggagaacaatccttttttcagcgttagcctgctgccttatcaggcgccgcgtttcgatctggttgacgtcagccattaccgacccgccttcgacgaaggcgttcgtcgccagcgtaaagaaattgccgctatcgttaataacccgcagccggctgattttgccaataccctggaggccctggagcagagcggtcagctgctggcgcgggtaaccaacgtcttttttgcgatggcaggcgcggagactaacccgaccattcaggcactcgatgagcagttttccgccgagctggctgaactggctaacgatatctggctcaacgatgctctttttcagcgggtgaagctggtgtgggagcggcgagaatcgctctcccttgacgccgagtccagacgtctccttgaggtaacctggcaacgctttacccttgcgggagccacgcttgcggaagagcaaaaagcggcgctgcgcgcgctgaataccgaagcggcggcgctgcaaagccagttccaacagcgcctgctggcggcggtaaaatcgggtggcctggcggtggattatgttcatcagctcacaggtctcagcgatgatgagataagcgcagcggcagaagccgcgcaggagaaagggttaagcggacgctggctgctttctctgctcaataccacccagcagcctgcgctgctttcgttgcaggatcggcaaacgcgagaaaatctttttgcagctggctggacgcgaaatcagaagggcgatgcgaatgacacacgcgagctggtgctgcggttgacggcaatccgcgcgcgcaaagcgcaactgctgggcgcagatgactttgccagctggtcgatggccgatcagatggcgggcgccccggcagaggcgtttgcctttatgcggcgaatcgctccggcggcgcgggcgcgagccgaacaggagctggcggatattcagcaggttatcgatcaggaaggcggcgacttccgcgcggcagcgtgggactggctctattacgcagaacaggtgcgccgggcgaaatttgctatcgatgaagcacagcttaagccctattttgctctcgagcgcgttctgcgtgatggcgtattctgggcagcgacacagctgtttggcattcgctttgtggaacgattcgatatcccggtttatcaccctgacgtgcgggtctgggaaatcatcgacgctagcggcgagggtatcgcacttttttatggcgactatttctcgcgggatagcaaaagcggcggggcgtggatgggcgtatttgtcgaacaatccaccctgcgtgcgcagcatccggttatctacaacgtctgtaactatcagaaaccgaaagccgggcacagcgcgttgctttcctgggatgaagttatcactttatttcacgagtttggccatacgctgcacgggctgtttgccagccagaagtacgccagcctgtcgggaaccaatacgccacgcgattttgttgagtttccttcgcagatttatgaacattgggccagcgagccgcaggtgtttgcccactatgcgcggcattaccaaaccggcgaggccatgccggcagcgcttcgcgacagcatgttccgcgcggcgaagtttaataaaggctacgatatgagtgagctgctcgcggcggcgctgctggatatgcactggcacagcgtagccgtggataagctacccgatgacgttgatacttttgaagccgcagccctgcatgcggagaaaatggatcttcccgccgtgccgccacgctatcgcagcagctacttctcgcatattttcggcggcggctacgcggcaggctattacgcttatctgtggacgcagatgctggcggatgacggctaccagtggttcgttgagcagggcggtttaacccgtgaaaacggccagcgtttccgcgaagcgattttgtctcgcggcaatagtactgatttagctgaactttatcgccagtggcgcggacacgatccgcagattgagccgatgctggaaaaccgcgggctgagttag

SEQ ID NO: 171953 - DNA, 447 bp, Klebsiella oxytoca
atgagattttatggcatcgattatctacaaatgcagtctaatatcaatgattatttaaaatacattattatatttagtacattatttatcctgatcgttgtttttagcctgtatatgcgccatcgtttacaaactaaataccgtgacttaacgatcattgcgttcttatttttactcttcatttctggtgttcagtatgcagattataccgatagccaaaatatacactccaggtcatcacaaatggtcaactttattaggttgttgtcacaagaaaaaaaagtgagtgttaattctatattctccagttcagtacaactttcggatggcattatcgttaaaattaatgatttttattatcgtgtcaacttaagtctggatcaaaaaacatacagcctggtagaggtttcgttagtaaccccagatgttgaaatcgtgaaaaactga

SEQ ID NO: 171954 - DNA, 636 bp, Klebsiella oxytoca
atgataatttatacacctatcataataaagttgggactgggaatactgtgcttaattgttcaaataaatctcatgggaaagggaaatctggccccttcatccgcaatggatcaggttcagaactatgtgctgggggggattattggtggcgtaatttacaatgaatcaataacagtactacaatttgttctggtattaattatatggacttttctggtttttgttcttaagtttttaaaagaaaataatcggttagtaaaaagaattcttgatggaaagcctattactttggttcataatggaagtgtcaatgttaaggaatgtttacgcaatggtgtttcagctaatgatttgatgttcaaattaagagcaagtggtatttatgaaatagaacagcttaaacgagtgatacttgaacaaaatggtcagttaaccattatacaaaatggtgatgaaaatatacgttatccaatcatagtggatggtttggccaaccatgatctgctcgaaatccttaacaagaatagtgactggttagaaaacgaagttataaagcaaggcttcaataaaatcagtgaagtgtatttaggtgagtatttatcaggtagaatcaatttatacggatatgaaaaataa

SEQ ID NO: 171955 - DNA, 354 bp, Klebsiella oxytoca
atgaagccaaaagaagtactttgccaatgggttgacgcatttaataatgcagatatagaaaccatctcagaattatatgatgataatgcaataaaccatcaggttgccaatgagccagttgttgggaaagaggctataaagaaaatgtttgaacaagatttttcttacgcacaaatggtttgtatcgttgaaaacattttcgaagatgggcaatgggcaattttagagtggcgtgacccattcggtttgagaggttgcggtttttttcaaatagtaaataataaaattttatttcaaagaggctactgggataagctatctttcttgaaattgcgcaatttacctatggaataa

SEQ ID NO: 171956 - DNA, 360 bp, Klebsiella oxytoca
atgaagatatcattattagcatttatatttatcaccctgaccggctgtgtggaccccggccttgtcgggatacatccagaattacgcacgagttattttaatggttataaaaatgaagtcgcgtcatgcttacaatccgcagcggtgaacaacgacttattgatgcaacaggatgactcgctgccagacggttcctatagatataacattctggacgcaggaggaaacaccgtagcatgggtcgatatagcagattttagcggaaagcaaagcaccgtaagtttttattatgcccgccataacaaggatatgtatgaagctatttcatcaataattgcacagtgtaaaagggtgtcttaa

SEQ ID NO: 171957 - DNA, 408 bp, Klebsiella oxytoca
atgttctccaggaaaattaaaatttttagtctgtttctatctttaatggccgccggtcaggcgatttccgccgttaagtccccagacgtcactgtctatgcgcagaaagagggggccggaagtgtatggaacagcgtgacggggaaagctgagcatttgctatcatatcaggttacggttaacaacaactccagtgaacctttggttcctggtaaagataataaaatgtgtttttacctcgatgataatatggggaaaaccttaatggggcatgggatacagttagaacttttatccccatataagccaggagagtcccgcactggcgtcatttacttttccagtactgaacccgatatgctgtcattaccttatgtcaaacttggtttaggttcccagtgtaaataa

SEQ ID NO: 171958 - DNA, 234 bp, Klebsiella oxytoca
atgcgtttaagggttgatgctggagaagaaaaagaacagaaaaccgggctctggcacccggttctcgatgaatcgacaaagcgctcgacgaacctcagcccgcggttttccggcaccactcaatatccggatcctgcccgcgtcgctggcgataacgctcagctaaatcagatcagtcctgttgccgcgagacagctccgcctcgcgcaagcgctggccgttttctcgcgttaa

SEQ ID NO: 171959 - DNA, 261 bp, Klebsiella oxytoca
atgtatagttacaatgatatagaaataattaaagccaacctcgagtggattgttaatcaaacgactgcgaattcccggagcccctcagtttccgatcgcaaaacgctcaacagccttcaggagctcatacagagctatgaagggctacttgagttaatcatccagtatggaattgctgtagtagataaggaaatcatcgaagggctgtcccttacggagaagtttattgctaaggttaaatcgaatgcgcatgcattttag

SEQ ID NO: 171960 - DNA, 420 bp, Klebsiella oxytoca
atgattttttacaccccagcagagctgcgagaagtcctttcacttccgctatacagttgtctcgttcaatgtggttttccgagccccgctcaggattatgttgaacaacgaatcgacctgaacgaactgttagtcaatcacccctcagcgacgtattttgtcaaagctgcgggcgatagcatgaaggatgcgggcattggtgagggggatcttctggtcgtggatagctcaagaactgcagtccatggcgatatcgtgattgccgcggtggacggggagttcaccgttaagaagctgcagcttcatccacgggttcagctcaatccgatgaatatcgcttatacccccatcgtcgtgggtagcgaggacacgctggatgtattcggtgtggtgacgtatatcatcaaagcggctggctga

SEQ ID NO: 171961 - DNA, 1269 bp, Klebsiella oxytoca
atgttcgccctgtgtgacgtgaactcattttatgccagctgtgagacggtgttcagacccgatttaaaagggcggccggtggttgtcctttccaataacgatggctgtgtgattgcgcgcagcgcagaagctaaagccgccgggataacgatgggagaaccgtttttcaaacaaaaggatcttttcagacgggctggcgtagtttgcttcagcagcaattacgagctttacgcggatatgtccaaccgcgtgatgacaacgcttgaggagatgttgccgcgggtagagatttacagcattgatgaggctttttgcgatctaacgggggtgcgaaactgccgtgacctgacggagtttggtaaagagatccgcgctacggttcttaagcgtacgcatctgaccgttggcgttggcattgcccaaacgaaaacccttgctaagctcgccaatcatgcggctaaaaaatggcaaaggcagacgggcggcgtggttgatttgtcgaacgttgagcgtcagcgccggctgttggccctggttcccgtggaggatgtctggggcgttggcagacgcatcagtaagaaactgaatacgatgggcatcaaaacggctctggatctctcagagcagagctcatgggttatccgaaaacactttaatgtcgtactggagcgaacggtaagagaacttcgcggcgagccctgccttgaactggaagaattcccgccggcaaagcaggagatcgtctgcagccgatctttcggcgaacgcgtcaccgagtatgagcaggtgcgtcaggcgatctgcagctatgccgcccgcgcggctgaaaagctgcgcggtgagcatcagtactgccgctttatttcgacgttcgtgaagacttccccctttgcactgaatgagccttactatggcaacagcgcccaggtgatgcttctcatccccacgcaggattcccgcgacattatccatgcggcggtaaagtgcctggataaaatctggcgcgatggccaccgctatcagaaagctggcgtcatgctcggcgacttttttagccagggcgtcgcgcagttaaacctgtttgatgacaacgccccgcggcataacagcggcaagcttatggaagtgctcgatcatctcaactcgcaagagggaagaggcaccctttattttgccgggcagggtattcagaccgcatggcaaatgaaaagagagatgctttcgccgcgttacaccacgagatacagcgatttgcttcaggtcaggtga

SEQ ID NO: 171962 - DNA, 612 bp, Klebsiella oxytoca
atgactgtacttaaaagctttttcttcttccttggcgcggcttgtacctgcgcatttgtggtactttgcctgtgggtcgatatacattattgggattataatatttcggaattatcactcactgaaattgttcaggagttggtgttagctaccattgttgttattcattttctgctggcgaagcagtataaatccatgcgctactgcaatattcttattggcggctttttccttgccatgctaattcgtgagctggacgccctttttgatcttatttctcacgggagttgggtgtggtttgcgctgattgccgctctggcagccttaattaatccacttattcattatcgtcagaccatggaacagcttacacaatatacccgtacgcccgggtacggcatgttaatcagcgggctgctggctattctggtcttctcccgactcttcggtatgcaaggtttatggcaggccatactcgatgacggttacgttcgggttgtaaaaaatgtcgttgaggaaggcagcgaatcattcggttatatgctttgtctcaccgcctctattggttattactgcaattttcgcggaaccctggggcaggaatcaacctga

SEQ ID NO: 171963 - DNA, 672 bp, Klebsiella oxytoca
atgtgcggacgttttgctcaatcacaaaccagggaagaatatctgacctatctggctgaagaagccgagcgcgacattgcttatgatccgcagcctataggacgctataacgtggcgcccggtaccaaagttctgttgctcagcgaacgtaacgaacggctgcacctcgatccggtacactggggctatgcccccgggtggtgggacaaacccgcgcttattaacgctcgtgccgaaaccgcggccaccagcagaatgtttaaaccgctatggcagcatggccgggcgatttgctttgccgacggttggttcgagtggaagcgtgaaggcgataaaaaacaaccctacttcatccatcgtaaagacggtaagcctctattcatggcggcgatcggcagcgtacctttcgaacgcggcgatgaagcggaagggtttcttatcgtcacgtccgccgccgatcgaggccttgtcgatattcacgaccgccgcccgttagtgctggagcctgaagctgccaggaaatggatgcgccaggatgtcggtgggaaagaagcggaagagattattgccgacggggcggtttccgcagaccatttcgcctggcacccggtatcgcgagcggtaggtaatgtgaaaaaccagggaccggaaatgatacaagcgctcagctaa

SEQ ID NO: 171964 - DNA, 561 bp, Klebsiella oxytoca
atgaaaaaactactcttaattgctgttgttattgggtctttaacaggatgtgccagcgttccacctctgaatttttctacacctggcgttggcgttagccagaagaaaattgatgcacagctaaaatcactcacggtttcgcttgcgcgtcccgatgagcagaaaggcgatatcgtcgcggggatggaaaccattacccccatttggcgagactcgttacaagaggcgctcgatagaatggcgatctttaaagataactctgctaatacggtgagccttaacgtgaaagtcttggcgattgatgttccgagctttggcatggccatgacaacgaaagccgttgcgcgttatgaggtaattaaccgctctaatggcgatattatttatacgcaagatatcgaatctactggaactgtgcctgcatcctatgccttcgtgggcgttgttcgcgcccgtgaatcaataaaccgcgcggtacaaaacaatattacgcagttcttacaagcgttagaaagcattgaactctcccgcccgatgttcccttcgaaggtagataaatga

SEQ ID NO: 171965 - DNA, 453 bp, Klebsiella oxytoca
atgagacgggtcgctttaatcacgatgctcacgttgttaggggggtgtgcgcaggatatttccccgaatagctattccgtgggttcggtaggcatggtgaatcgctctattgccggcactatcattagcgcgcgaccggtcgatattcgtggcacatccgctttgggcggtgctgcgggtacggccgcgggagcggctgcagggtctgcaattggaggaggcactcgcgcgaatattgtcggcgctattggcggggcggttgtcggggggctaaccggcgcagcgcttgaagcttctgcgacaaaacagacggggatggaatatgttatcgaaacggaaaacggtaatctgatgaccgttgtacaaggtaatacccccttgtttgtcgaaggtaataagatactcgtactatacggcagtccttcacgtatcattgccgatcctcggcattga

SEQ ID NO: 171966 - DNA, 477 bp, Klebsiella oxytoca
atgaacggaacgatcacaacgtggtttaaagataaaggttttggatttatcaaagatgaaaacggcgataatcgctactttcatgtgattaaggttgccaaccctgagctgattaaaaaggatgcggcggtcactttcgaacccacaaccaataacaagggtttgtcagcgtacgccgtgaaggtcctcccggaaagcaaatatatctatatcgcaggcgagcggattaagctcacgtcgataaaatcttacctggtttataacgaggaggagcctgccgacacccgcattgataaagagaacgcggtcctctccgtgggcctgctgatgggaaatatcaggccaaaatcagccgctaagcccggggaaatgcgctcggtcaaaaagctggccatcaccaccttccagggcaccacgctcatcttcacggaagatgagatagacatcgacgccacggtgaaactgcttaaggtgtaa

SEQ ID NO: 171967 - DNA, 540 bp, Klebsiella oxytoca
atgacaaaactcaccttacaagagcagatgctaaaagccggcttagtgaccagcaaaaagatggccaaggttcaaagaacggcgaaaaagtcacgcgttcaggcgcgcgaggccagagaggcggtggaagagaataagaaagcgcagctggagcgggataaacagcttagcgagcagcaaaagcaggcagcgttatcgaaagaatataaagcgcaggtcaaacagctcatcgagatgaataaaatcgatatttctaaaggcaatattgattttaatttcacggataacaatttcattaaaaaaatcaccgtggataaactgacccaggcacagctgataagcggtcgcctcgccattgcgcgcctggcgggtgatagcgacggcgagagcaaatacgcgattatcccggcaagcgtagccgataagatcgcccagcgcgacgccagcagcattgtcttaaacagcgcgctcagcgcggaagagcaggatgaagacgatccgtatgctgattttaaagtacctgatgatttgatgtggtaa

SEQ ID NO: 171968 - DNA, 312 bp, Klebsiella oxytoca
atgattgtcagaacctggcatggttgtgttcccgttgcgtttggcgatgcgtttgcggggcatttgcaggcaaccggagtgcagcattcgcggagcattgccggcaacgcgggcgccttcgtcaggcgggaaacgcagggggagtgggaacacttctttctggcgacctactggaacgatctggatgctatcatcgcttttgccggtgaagagtaccatgtcgccgtcacctatgccgatgatgagcaattccagctgctgtccgatccgtacgttttccagtttgaggtggctgcggtggtgggaatttaa

SEQ ID NO: 171969 - DNA, 273 bp, Klebsiella oxytoca
atgtcatcacaagagtatgaaaacgacgcgcagaatctggccgataaagtgggcaataaagtcaatgaatttgccggggaagcccagcagcagtttggtgatgcggtagattcgccgaaacatcagctaaaaggcgcggcccgtaaatacgccgctcaggcttcggatgccgtttcagaggtctccgagcgcgtcagggaaaatccgttaaccggactgctggccgccggcgctatcggcctggtcattggtctgttggcaggacggaagtaa

SEQ ID NO: 171970 - DNA, 327 bp, Klebsiella oxytoca
atgacaaaactccctctgatacttcttctggctggcgcggggctattacagggctgctcggcgttcgataaacatcacggcgttaactggggcgaaggtacctgcccgactcccgcgccagaagcgattagcaaatcgaagcagctgattattgaggatggtaaaaccctcaaatgccagattcgtccttatgtcagcaatatggcctgtcaggggatcaccgataaaactcatgccgatggcgtcgtttgccagaacggattagggcaatcaattttgtttaccttcgacgataaaggcgtactgcaaaaacacggtagcgtgtaa

SEQ ID NO: 171971 - DNA, 255 bp, Klebsiella oxytoca
atgaactataagaaagtactgaagaatacgttactgcttgctcccgtggcgctcctgagtctgcaaatgcccgcctggggcgcagatgtgacgaaaacggcgacctgccagaaggcgccgcctgcggtggacaaagaaggcgtgccgttaccgcccgttgttggtaaagagggcgcgcgtccggcttccccgaaaggctcgtccggccagggcggcgcagcggccaactgtcagccagcggccatcgaaaattaa

SEQ ID NO: 171972 - DNA, 264 bp, Klebsiella oxytoca
atggtgcacccgttaattaaggtgatgctggttggagggaaaggcgacggcctgatggtcagcgttgccgataacgcgacggagatttccgtgacgcctgcgcagtatggcgcgaaatccggtcagccgctgagctacagaatcgtatcgcagaccattgatgatgaacgctattttttcggcgttttcaacgagagccatgaggatacggaaaaactcaaaagagtcgcgctaactcgcggcatgaaaaaactcttcggctaa

SEQ ID NO: 171973 - DNA, 1089 bp, Klebsiella oxytoca
atgattaaccatatccggataaaaaatttcagatcggtcagggatattgagctggaactcggcgcgctgaatatcgtctttggccccaacggctgcggcaaatccaacatttataaagccatccatctgttaaccgcctgcgccgatggaaagttctccggttatatcagcgatgaaggcggcctggagaacattatgtggtccgggccgagcgcgccgaacgatcgctttccgcggcggctgcagattgcctgcctgaccgatgagtttgactaccagctgcaggtaggtttcccggaaaaactgccgtatccgactcagttccagctggatcctatcgttaaagaggagtctatctggctggcaggattttcccgacgcccttcatcgcgcgtgctggaacgcaaaaaccaggcggcgttcctggttgacgtcaatggtgaaaaaagcacttttaccgacgcgatttatgagaatgaatcgatttttggccaactgggcgagccgcaccgctttcctgaagtctccagggtcagggaaaccatgcgccactggcgcttttatcacgaattcaatataggcagactctcgccgttgcgtcatccgacggtaggttaccgctcgccggtgctggacagcgatgggcacaaccttgccgccgcttttcagaccatcgtggaaatcggcgccgaagagctgctgcatgagatcctcggcgaagcgttcccggagtgtacattttactgtgaaaatgagaattcgcgtttctcgataaagatgcgccgcaatggcgtctggcgacctttactggcggcggaaatgtccgatggcacgctgcgtttcctgtgcctggcggtggcgctgctgagcccgcgtccgccggcatttctggctattaacgagccggaaaacagcctgcatcgtcaaatgttccccgcgctgtcccggctgattgtcgaagcttcccgctatagccaaatctggctaaccagccactccgcggagctggctgagctggtttcatccatggcggaagcccggatttacgggctggaaaatagcgatggggaaacgcggatcgccagctag

SEQ ID NO: 171974 - DNA, 1251 bp, Klebsiella oxytoca
atgaaactctctgaactggcgccacgagaacggcataattttatatatttcatgctgttctttttcttctactatttcatcatgtcagcctattttccctttttcccggtgtggctggcggaagttaaccatttaaccaaaaccgagacggggatcgtcttctcctctatttcgctattcgcgataatcttccagccggtttttggcctgatttcggataagctcggtctgcgcaagcatctgctgtggacgattacgattttgttaattctgtttgcccccttttttattttcgtcttttcgccgctgctgcagatgaatatcatcgcaggcgcgctggtgggcgggatttatctggggatcgtcttttccagcggctccggggcggtagaagcctatattgaacgcgtcagccgcgccaaccgttttgaatacggtaaagtccgcgtctccggctgcgtcggctgggcgctgtgcgcgtcaatcaccggcattttatttagtatcgacccgaacattacgttctggatcgcctccggtttcgctctgatcctcggcgtactgctgtgggtatcaaagccggagagcagcaacagcgccgaggttatcgatgccctgggcgccaaccgtcaggctttctccatgcgcaccgccgcagagcttttgcggatgccgcgcttctggggctttattatttatgtcgttggcgtcgccagcgtctatgacgtttttgaccagcagttcgccaacttctttaagggctttttctccagcccccagcgcggcactgaagtattcggcttcgtcaccaccggtggggaattacttaacgcgctaatcatgttctgcgccccggcgattattaaccggattggcgctaaaaacgccctgctaattgccgggatgattatgtcagtacgcattttaggatcgtctttcgctaactcggcggtggaagtgatcattttaaaaatgctgcatatgttcgagatcccgttcctgctggtcggcacctttaaatatatctcttcggcatttaacccgaagctctcggcgaccctgttcctgatcggtttcaatttatcaaaacagctgtcaggcgttgtgctctcggcgtgggtaggacggatgtatgataccgtcggcttccatcaggcctatctgatcctgggctgtattaccctgagctttaccctcatctcactgttcaccctgaaaggcagcaaaaccctgctcccggccgcggcataa

SEQ ID NO: 171975 - DNA, 3108 bp, Klebsiella oxytoca
atgcaacaacaccactctatttccgccgcagcagccacgttccatcagattctcgcccgcgaggactggcagaaccagaccattacccatctcaaccgtttaccggcccacccgactttcgccagctggcgcgataccgacgccgcgcggaaaaaccagccctccgcgttccgccgccggcttgacggccagtggcaattctcctgggcccgcagcccgtttgacgtggatgcccgctggctggaagacgatctgccggacagccgcagtacgccggtaccctcaaactggcaaatgcagggctacgatgcgcccatctataccaacgttcgctaccctatcgacaccaccccgccgcgcgttccgcaagagaacccgaccggttgctactcattgacctttcgcgttgatgagagctggcgggcagacggccagacgcagattatcttcgatggcgtcaactccgcgtttcatctgtggtgcaacggcgaatgggtcggttattcgcaggatagtcgtctgccagcggccttcgatctctccccctatcttcagccgggcgataaccgtatctgcgtgatggtgatgcgctggagcgcgggaacctggcttgaggatcaggatatgtggcgcatgagcggtatcttccgctcggtctggctgctgaataaaccgacgttgcacctctgcgacgtccagcttacgccgcagctggatgccctctaccgcgatgccgaactgctggtgaacttaagcgtcgccgcaccggtcgcgctgctggaggagctgacggtgaaagtcgaactgtgggatgacgatcgcctggtcgccagccaccagcagtcgcccggttcgccgattatcgatgagcgcggaaactatgcggagcgcgcggccattcgtctgccggtagaacgtccggcgctatggagcgcggaaacgccagactgctatcgggcggtcgtgtcgctgtggcgcgctgatgaaccgattgaggccgaagcctgggatatcggtttccgccgcgttgaaatcaaaaacggcctgctgctgttgaacggcaaaccgctgctgatccgcggcgtcaaccgtcacgagcatcaccaccagcgcggacaggtcgttaccgaagaggatatggtgcaggacattctgttgatgaagcagaacaactttaacgccgtacgctgctcgcattatccaaacaccccacgctggtacgagctgtgcaaccgctacggcctgtacgtcgttgatgaagccaatatagaaacccacggcatggtgccgatgaatcgaatatccgacgatccggcctggctaccggccttcagcgcccgcgtcagtcgaatgctgcaaagcaaccgcaaccatccgtccattattatctggtcactggggaatgagtccggcggcggcggtaaccatgaagcgatgtatcactggctgaagcgcaacgatccctctcgcccggtacagtacgaaggcggcggcgccgacagcaccaccactgatattatctgcccgatgtacgcccgcgttgaccgcgaccagccgattccgacggtgccgaaatggggaatcaaaaagtggatcagtctgcctggagaacaacgcccgctgatcctctgcgaatacgcccatgcgatgggtaacagcctcggcaactttgctgattactggcaggcatttcgcgactatcctcgcctgcagggcgggtttatctgggactgggcggatcaggccatcagtaaaaccttcgacgacggcagcgttggctgggcctacggcggtgattttggcgacaaaccgaacgatcgccagttctgcatgaacggtctggtgttccccgaccgccgcgcgcatccttccttaatcgaggccaaacatgcgcagcagtacttccagtttgcgctgctcgcgcaatccccgctgcgtatccgcctcagcagcgaatatctgttccgcgccaccgataacgaagagctgcgctggcaggttcaggccgcgggtgaaacttttgctgagggtagcgtgaagctggcgctttgcccggagggccagagtgagctgacgttgtgcgatgcgctgacgctgcccgccggcgcggaagaggtgtggttgacgctggaggtggtccagccccaggccaccgtctggtccgacgccgggcatcgcgttgcgtggcagcagttcccgctcgccgcgccgctggcgctacgcggccctcggtctgccggtatcgcgccagcgctggagagcagcgacgcggcctggattgtccgcagcggctcgcagcaatggaccatcgatcggcaaagcggtctgttaacccactggcaggtggacggcgtggaacagctgctgaccccgctgcgcgaccagtttgtgcgcgcaccgctggataacgacattggcgtcagcgaagtggagcgtattgaccctaacgcctgggtagagcgctggaaaagcgccggactttacaagctcagcgcccgctgcgtccagtgcgacgctcagcgcctggcccatgaagtggttatcgatagccgctggcactatctgcgcggcgacgaagcggtgattgtcagccactggcggatgacatttgatagcgaaggcaagctgcatctggcggtcgatggcgaacgtgccggcaccctgccgccgctgccgcgcatcgggctgaatttccaggttccggaccagcaccaaccggtatcctggctcggctacggtccgcatgagaactatccggaccgccgcaccagcgcctgcttctcccgctggcagctgccgctggaggagatgaccacgccgtacattttcccgacggaaaacggcctgcgctgcgacagcaaaacgctggactgggggcgctggcacgtgggaggcaacttccacttctcggtacagccctatggcaccacgcagttaatggagaccgatcactggcactggatgaagccggaaaacggcgtctggatcaccctcgacgctcagcacatgggcatcggcggcgatgactcctggacgcccagcgtactacagcaatggctgctgcttgagacacaatggcaatatcagttaacgattcacttccaataa

SEQ ID NO: 171976 - DNA, 1071 bp, Klebsiella oxytoca
atgcagcgtcgcctggcaacgcttgacgatgtggcccgtgaggccggcgtttctcagcaaacggtctcccgggtgctgaataatcctggggtggtgtccgaacgaacccgcgaaaaagtgatccgcgcgatgcagacgctgcgctatgtaccaaaccgctccgcgcagctgctggcgggtaagtccgcgccgtcgattgggctgattaccgcctcgctgacgctgcacgcgccttcgcaaatcgccgcggcggtgaaaagctatgctggtttgcatcagcttgaggtctcaattgcgatgccggtgcaggtcgattacgcgtctctgcaggcgcgactcaatgagtttcgcgcccagcatattcgcggagcgattatcagcctgccgctggaaagtagtcttgcggagcgtctggtggcggagaatccagatatagcctgcatgtttctcgatgtttcgccggaggccgacgtttgcggcgtgcgtttcgatcatcgtgatggatgtggcgcctgcgtgcggcatttgtgggacgccggacaccgcgagttcggactgcttgccgggccggaaagctcgatctcggcgcgaatgcggctcagcagctggcgcgaggcgctgcaccgcctgggcgtcagtaatgccgtaacggtgtttggcgactggagtgccgccagcggctggagtaaaacgttcgagctgctgcatcagcatccgcgcattagcgcgatcgtggtcgctaacgatcaaatggcgctcggggtgctgagcgcgctggcgcagctttatcgtaccggcagccaggccatctcggtgaccggttatgatgacacggcggacagcctctacttccagccgccgctgaccaccgtcgcccaggatttcaacgtgctggggaaaagggcggtcgagctgctgatcaagcttatggctgccccacagctgaaaattcgcgaactgctgcccacccgcctgattatccgccagtccacctggcccgttacggagaacggggagggggaaaaagatgagctgattagtcaacttaaggcgctggtggaaaagctatga

SEQ ID NO: 171977 - DNA, 459 bp, Klebsiella oxytoca
atgatggtattaaaagagaaagagcacctggagtctgttgactggcgcagggttgcggagatcattgccgatgcgggacttaatcagcgcgatgttgcattggttgaacgggcgtttcgtcatagtactttttgctggtttggctatgaaaagggtcagctggtcgccgttgcccgcgcgattagcgatctgacctggtgcagctatcttgcggatgttgcggtggccccgaactgccaggggaagggatacgggaagttgctgatgcaggcggccagcgagcggctgcggccgtttggcaaaacctttatctattcggtggtggataaagtcggcttctaccgccgttttggttttgaaatgctgactacgggtatggtctgcgccagcgccgagagtctactgcgcatgcgcgagcagggatatatttgccaggacagcgacactagccagctttag

SEQ ID NO: 171978 - DNA, 1230 bp, Klebsiella oxytoca
atgctgacaaccctgatttacagaagtcagatacctttaactcatgaaattaatctctctttgctggttgaaaaagcgaatgttaataacatgtctcatggcgtttcaggcattcttctttttaaagataatgttatccttcaagtgcttgaaggtgacgaaagtattctggagcagctcttcagcaagattaaacacgacagccgacactttggtgtcgtcgagctgatgcgagattacgccccgcgcaggcgcttcgaaaacgtcggtatgatgtactttgatctggatacgctagaagccgatgccgtgctgaaaaccgttcgccagctaagcaagttgaagagctatcttctgacggaagagcgcgtttataaatttattcatacgtttataacgcaaaaaagagctctcccggtttcccagtatttccagcctgaaaaatggtcagttatcccacaaagatcgccttttcatacacctgaacgctccccagttgatactcaatgctgccagtttgcatttcagcccattattgagcccctggccggtcatatcacttcactggaagcgcttattcgtaataaagatggtgggagtccggcgagcttttttgcttcaatcgaccataataaacgttatgaaattgacctcaactctaaatcggtggctttcgcgctggcaaaagaaatagacatcggcgatcataaaatatccattaatattctgccgatgtctttggtggtggttcccgatgccgtggaattcctgctgcaggaaattaaaaagtatgggttgatgcctgaacaggttattgtggaagtgactgaagacgaaatgatctccggtttcagccagtttagtagtgcgattaaaaaactgcgcgtctccggaatggggctggctattgatgattttggtgccggttatgccggactgtcgttgttaaccaaaatccagcctgacaaagtcaaaatcgatcgtgagattattaccaatatccacctgagcggccctaagcaggccgtcgtccgttctatcatcagctgctgtcatgagctggaaattgcggtggtggcggaagggattgaacgtatcgaagagtggtgctggcttgaatccgcgggtatcaagcgttttcaggggttcttgtttgccctgcccgaactgaacggcgtaggagagatacgctggccggtgaacacagcggatagcctcgtacaggcgtaa

SEQ ID NO: 171979 - DNA, 978 bp, Klebsiella oxytoca
atgaataaagattttacgtttaccattaaaagcacactgtttgatgaaaactataacccctcggaaagtacgcgtattacgaccaactttgctaatctggctcgcggcaaaaatcggcaggagaatttgcgcaacaccttaatcatgatagacaatcggttcaatacgctggcgcactgggataatcccaaaagcgatcgctactctgttgcgttgaatattatttccgtggaaatggttattgaagagactggaaccacctttccggcgattgagatattgcaaaccacaattattgataaaagaacgggtgagcgtattgaaggcatcgttggcaataatttctcctcgtatgttcgcgactatgacttcagcgtattgctaccggaccataataaacaacgttctggctttagcatcccagatgattttggcaacttgcacgggaagatctttaagcatttcgttcattccgccgaatataaagccaatttcaaaaagccgccggtgatctgcctcagcgtgtccagtaaagacacctatcagcagaccggaaaccgccatccggtattaggccttgagtatcggcctaacgcctcgtctttgaccgagcagtattttgcaaaaatgggcctgcaggtccgctattttatgccgaaaaacagcgtagcgcctttggcattttattttaccggagatttactgagcgattacagcagccttgagctgatgagtaccatcagcacgatggagacgttccagaagatataccggcctgagatctacaacgctaactccgcagcaggcctgtgctatcagcccgatctgaatcatcaggatcattcgttaaccaaaatagtttatgaccgggaagagcgtagccagctggctatagagcaggggaagtttactgaagagcactttatcaaaccgtataaaaatattcttgagcagtggtctgctcattccgctctttaa

SEQ ID NO: 171980 - DNA, 1032 bp, Klebsiella oxytoca
atgaaaaaattacttcctacttcaacggccggcagcttaccgaaaccttcctggcttgcagagcctgagaaactatggtctgcatggaaactcgaaagccaggaattaatcgacgggaaaaaagatgcgctgagtttgtccttattcgatcagctacgcgccggcattgatatcgtcagcgatggcgaacaaacgcgccagcactttgtcaccacgtttattgagcacctcagcggcgtggatttcgcaaagcgcgaagtcgtcaaaatccgtaatcgttatgatgcaagcgtcccgaccgtcgtgggggccgtcgagcggcaaaagcccgtttttgttgaagatgcgcgttttttacgtcagcttaccaaacagccgatcaaatgggcgctccccgggccgatgactatgattgatacgctctatgacgatcactataagagccgcgaaaaactcgcctgggaatttgcgaaaatactcaatcaggaagccaaagagttggaagccgccggcgttgatattattcagtttgacgagcccgcctttaacgtattctttgacgaggtcaatgactgggggatctcggcattagaaagagccgttgaagggcttaactgcgaaactgcggtgcatatctgctatggatatggcatcaaagccaataccgactggaaaaagacgctggggacggagtggagacagtatgaagaagcgtttcctcaactgcaaacctccagcatcgatatcatttcgttggaatgccataactcgcatgttcccatggatctgcttgaactgattcgcggtaaaaaagtgatggtgggcgctatcgacgtggcgaccaatgcgatcgaaacgccggaggaggtcgccgcaaccttacgtaaggcgctgcagtttgttgatgccgataagctttatccttcaaccaactgcggtatggcgccgctatcgcggcgggtcgcaaccggcaagctcaatgcgttaagcgccggggcggaaattattcgcagggaacttcagggtaaatag

SEQ ID NO: 171981 - DNA, 279 bp, Klebsiella oxytoca
atgcgtatcaataccaaaatgaggctggcagcactgttataccttatggcggcctacgctgttgccctgccgacactggcgctgttcacggacctggtgataaacggcgggattattgatatgtggcaaggctcgtattcatttttgaaccttcttgatctgcgtaaaattctctatctgcagtttgccgggctgggcgctatcctgggttttgtctactggctatttttctttagaaaataccgtcatcacgatccgctggataaatattttaagtag

SEQ ID NO: 171982 - DNA, 126 bp, Klebsiella oxytoca
atggtagaacgcccagatattactgaaccgctaccgggtactgaccctttacctgacgaagatttacctgaaagtccggacgtaaacgatccggtagtccctgaagacccggatgtcattaaataa

SEQ ID NO: 171983 - DNA, 1011 bp, Klebsiella oxytoca
atgactgaaaacgctgaaatcatgacaatcccatcagtgacgttgtcacgccaccgggtggttgccctcgcctacgatggcctgtgtacctttgaatttggcgtcgcggtagagatcttcggcctgccgcgtccggaaatgggcgagcgctggtatcgtttcgccgtggccgcggtggatgaaggcgagctgcgggcaaccggcgggatacgtctgatgaccgacggcggcatgtcgttgttaagcgaagcggacacgatcgtagtgcccggctggcgcagtatcgattcccctgtaccgcctgacctgtgccaggcattggttgccgcccatgcgcggggctgccggataatttcgatctgctccggggtgttcgttctggccgctgccgggttgcttaacggccgccaggcgaccacccactggcgctacaccgatcagctgcgggcgcgttttccgctgattgaagtcattgatgacgtgctgtacgtcggcgctgagggcgtgatgacctccgcaggcagcgccgcaggaatcgatttatgtctgcatctggtgcgcgaggatttcggaattgatgcggcgaatattgtcgcgcggcgtttagtggtgtccccccatcgcgacggcggacaggcgcagcagattgttcggccggtagccaaagcgcgagaaagccaacgactcggactattattcgattttctgcaccagaatctcgccgccaaccataccgtggcatcgctggcggaaagagccggtatgggctcacggacctttttacgccgttttgaagacgctaccggtaaaacccctgcccgctggctgcttgatgagcgactgctgcgcgcgacccagcatttaacccacagccgcctgagcgttgagcagattgccgagctttgcggtttcgcgaatgccagcaccctgcgccatcacttccaccagcagtatgcgcttagcccgttgcagtatcgaaaaaagatgcagagtgaaacaaaccgagcgtaa

SEQ ID NO: 171984 - DNA, 393 bp, Klebsiella oxytoca
atgagtgttgtaaccgcgattacccccgccagctctaccgatgccgccgcctggtttcgtcataagctaagcctcgaaactgactgcgccgatgtctacagcgcgatgcgcgaagaagacgtggattttgttctgctacatgtcgtcggcagtgaggaaacctttgcccgtcgtcatctgccgggggccctgcatttaccgcaccgacaaattgatgcaacccgaatggcgcagtggcctgaggatacactgtttgtggtttactgcgccgggccgcattgcaacggagcagatgttgccgccatgaagctggcgctgctgggacgtccggtaaaaatgatgctcggcggcctgacaggctgggaagatgaagggctacctttcgcaaaatga

SEQ ID NO: 171985 - DNA, 1104 bp, Klebsiella oxytoca
atgcaacgtcatcaggccccgttccgcgcagatatcgtcggcagttttttacgtccggacgccatcaaacaggctcgccaacagctggctgcaggcgctattgacgcgcagcagctacggcagatagaaaatgaagctattcgtcatctggtgcagcagcagtgcgagtgtgggctgcacgtggtgaccgacggtgagttccgccgcgcgtggtggcactttgatttctttgacggtttgcagggcgtcgaacgctacgattccgaaaagggtatccagttcaacggggtacaaaccaaagcgcacggggtacgcgtcaccggtaaactggcctttggcgatcacccgatgctggaggattttcgctatctgaagagcatcagcggcagcgcgcagccgaaaatgaccatccccagcccaagcgttttgcacttccgcggcgggcgcaaagatattgacgcgacggtttatccggacctcgctgactatttcgacgatctggcgaccacctggcgcgatgccatccgcgccttctacgatgcgggctgccgctatttacagcttgatgacaccgtctgggcctatctgtgctccgatgaacagcgccagcaggtacgcgatcgcggcgaagatcccgatgagctggcgcgcatctatgcccgcgtgctgaatcaggccctcgagggaaaaccgcaggatctgatcgttggtctgcacgtatgccgcggtaacttccgttcaacctggatatccgagggcgggtacgagccggttgccgaagtgctgttcggtggagtgaacatcgatgccttcttcctggagtacgataacgaccgttccggcgacttcgcgccgctgcgctttatccgccctggccatcagcaggtggtgctgggtctgatcaccactaaaaatggcgagctggaaaacccggaaggcgtgaaggcgcgtttgcgggaggcggcgcagtacgtcccgctggagcaaatttgccttagcccgcaatgcggttttgcctctaccgaagaggggaactcgctgacggaagcccagcagtgggacaaggtccgtctggtcaccggtatcgccgctcaggtctggtaa

SEQ ID NO: 171986 - DNA, 1272 bp, Klebsiella oxytoca
atgcagcgtcgaacactattaaaagcttttgctctctccgcctctgttatcagcatgggcttctccttgcaggtatacgccgccgacaccatcaaagtcgggattatgcattcgctctcagggacgatggcgatttccgaaaccccgcttaaagaggtcgccctgatggcgatcgacgacattaacgccaaagggggcgtgctgggtaaaaagcttgagccggtggtcgttgacccggcctcaaactggccgctgtttgcggaaaaggcgcgtcaactgcttacgcaggataaggtcgcggcggtgttcggctgctggacctcggtgtcgcgcaaatcggttctgccggtatttgaagagctgaacggcctgcttttctacccggtacagtatgaaggcgaggagatgtcgccgaacgtcttctacaccggcgcagcgccaaatcagcaggctatcccggcggtggaatatctgctgagcgaagacggcggcggggcgaagcgcttcttcctgctgggtaccgactacgtttatccgcgcaccaccaacaaaattctccgcgcgttcctgcacgccaaaggcattcaggataaagacatcgaagaggtctataccccgttcggctatagcgattaccagaccatcgtcgccaacattaagaagttttccgccggcggtaaaacggcggtggtttccacgatcaacggtgattccaacgttccgttctataaagagctggctaaccaggggctaaaagcgaccgatgttccggtagtggccttctcggtgggtgaagaggagctgcgcgggattgataccaaaccgctggtgggcaatctcgcggcgtggaattacttcgaatccgtggataaccctaccaacaaacagtttgtcgccgattatcgcgcctgggccaaagcgcataagctgccgaacgcggatagtgtggtcaccaacgatccgatggaagcaacctgggtcggtctgcatatgtgggcccaggcggtaaccaaagcggggaccaccgatgtcgataaagttcgggaagccatggccggtcagacctttaaagcgccgtcgggcttcaccctgacgatggatgcgaccaaccatcacctgcataaaccggtcatgatcggcgaaatcgaaagcaacggccagtttaacgtggtctggcagactgaagcgcccgttcgcgcccagccgtggagcccgtggattgccgggaacgacaaaaaaccggatcacccggtaaaaagcgccagtaactaa

SEQ ID NO: 171987 - DNA, 1575 bp, Klebsiella oxytoca
atgaacccattgcgccttatgagttattttgcgctgctgctggtattgatgccgtggcgggcgcaggcagccgacgccgacgatttcgtggcagccacccgcagccaacaggcgctgctgcttgagcagtgggccgtcgcgcctgcagcgccgcgtttaccgctgctaagggcgctgaaaagcgagacattacaatcggacagtcgcggtcatgcgttcagcaagcagggtgataagctactggcgctgggcgcggttgcggctcccgaaggaacaataaaaccggtacgcctgaccaatcgtctgcgtaacctcgcggcaggggcgctggccacgcatcagctggtcagtgacaacgtcacggaaagggcctctgcggcaaaaatcctccagcgcgaagcgacgccagaaatggcgggcctgttacagcagcgcctgacggcggaaaccgacggcgcggtcaaatcgctgctggaaattgcgcttgctcgtctgcagctaaccagtccgcagcctgcgcaaaggctggcggccattgaacggctcggtcactcaggcgacccggaaacccaggcgctgctgacgccttataccgacgcccggcatgagccagacccggcgatccgcgcggcggcgcaggagagcctgagcaaaatccagcaccgcctgctgctgggcgatctgctcggacaggcgtttatgggcctctccctcggctctgtcctgctgctcgccgcgctcggcctggcgatcacctacggactgctgggggtcatcaacatggcccacggcgaaatgctgatgattggcgcctacagctgctggctggttcagcaggcgctggcgcagctggccccgcagtggctggccttctatccgctgattgcgctgccggtggcgtttctgattgccggcgggatcggcatggcgctggagcgcaccgtgatccgtcatctctacggtcgcccgctggagacgctgctggccacctgggggatcagcctgatgctgatccagctggtgcggatgctgtttggcgcgcagaacgtcgaggtcgccaatccggcgtggctttccggcggcgtgcagattctgccgaatcttatcctgccgtggaaccgtctggcggtactggcctttgtgctgctggtgctgctcttcacctggttgacgctgaacaaaacccgcctcgggatgaacgtgcgggcggtgacgcagaaccgcgcgatggcggcctgctgcggcgtccctaccggccgggtcgatatgctggcgtttggtctcggctccggtattgccggactgggcggcgttgcgctatcgcagctcggcaacgtcgggccagagctgggccagggctacattatcgactccttcctcgtggtggtgctcggcggcgtcggtcaactggccggcagcgtggcggcggcgtttggtcttggcatctttaacaaaatccttgagccgcaaatgggggccgtgctgggcaaaatcctgatactggtactgattatcctgtttatccagaaacgtcctcagggactgttcgccctcaaagggagggttattgactga

SEQ ID NO: 171988 - DNA, 1074 bp, Klebsiella oxytoca
atgagccaacctgttaccttaacgctggcgcgcaaagcgccgcgcccgctgcgctggatcggcattctgctgctgttgggcctgctgagtatgccgtttctggcgctgctgcctgctacgcatccgctggcggtttccgcctggctgctgacgctgaccggtaagatcctctgctacgctattgtcgctgtcgcgctggatttagtctggggctatgccgggatgctctcgcttggccatgggatcttttttgccctcggcggctacgccatgggcatgtatctgatgcgccaggcggcgggagacggactaccggcctttatgtcgtttttatcgtggagcgagctgccgtggttctggtggggcacccagcattttgcctgggcgatgctgctggtggtgctggtgcccggtctgctggcgctggtgtttggctggtttgcctttcgctcgaaaatcaaaggcgtctatttttcgatcatgacccaggcgctgacctacgccggaatgctgctttttttccgcaacgaaaccggctttggcggtaataacggctttaccggctttaccacgctgctcggtttccccgtcaccgccattggtacccgggcggcgctgtttatggcgacggtgctgctgctgttgctcactctgtggattggctatttgctggcgcaaagcaaatttggccgcgtgctgacggcggtgcgcgatgctgaaaaccgcctgatgttctgcggctacgacccgcgcggatttaagctgctggtctggacgctttctgccgtgctgtgcggccttgcgggggcgctgtacgtgccgcaggtcgggatcatcaaccccagcgaaatgtcgccaaccaactctatcgaggcggccatctgggtggcgctgggcggtcgtggaaccctaatcggcccggtacttggcgcagggctggtcaacggcgcgaagagctactttaccatggcgatgccggagtactggcagctgtttctggggctgatttttattatcgtgacgttgtttttaccgcgtggcgttatcggcctgctgcgtaaaggagatcgctga

SEQ ID NO: 171989 - DNA, 798 bp, Klebsiella oxytoca
atgcaaccggatgaagagctctttacccgccagctgccgacggaccgctttcgtgagcagaccgatccggtgctgcagctggaaaagattaacgtcaactttgacggttttcaggcgctgaccgacctgtcgctgcagattggcgtcggcgaactgcgctgcgtgattgggccgaacggcgccggtaaaaccaccctgatggacgtcatcaccggcaaaacccggccgcagagcggcagggcgctttacgatcagtcggtggacttaacgaccctcgatcccatcgccatcgcccggcaggggatcggacgcaagttccagaaaccgacggtctttgaggcgctgacggtggcagagaatctcgaactggcaatgaaaggtgataaatcggtgtgggccagcctgcgggcgcgcctgaacagcgagcaggccgaccgaatcagcgaaaccctgcgcctgctgcgcctggagggcgaacgccatcggccggcggggctgctgtcgcacgggcaaaagcagtttcttgagatcggcatgctgctggtgcaggagccgcatctgctgctgctggacgagcccgcagccgggatgaccgatgcagaaacggagtatacggccgagctgttccgcacccttgccggtcagcattcgctgatggtggttgagcatgatatgggctttgtcgagaccatcgccgaccgggtgacggtgctgcatcagggacaggtgctggcggaaggatcgctgcgcgaggtgcaggctaacgaacaggtgattgaagtttatctcggacgctaa

SEQ ID NO: 171990 - DNA, 699 bp, Klebsiella oxytoca
atgctacaggttaatcaactacatcaatattatggcggcagccatattctgcgcggcgtcgattttgccgcgcgtcagggggaggtcacctgcttgctaggacgcaacggggtggggaaaaccactttgctgaagtgcctgatggggctgatcccggcgcgcagcggcgaagtgctgtggcaggagaagaatatcacccaccgtaaaccgcaccagcgggtgcagtcggggatcgcctacgtgccccaggggcgggagatttttccacgcctgacggttgaggagaatctgctgatggggctgtcccgctttcgcgcccgcgacgcgcgcgcggtgccggaagagatttatcagctgtttccggtgctgaaaaccatgaagcagcggcgcgggggcgatctttccggcgggcaacagcagcaactggccattggccgcgcgctggccagtcgcccgcagctgttgattcttgacgaaccgacggaaggtattcagccgtcggtcatcaaggagattggcgaagttatccgccagctggcgaatcgcggtgatatggcgatcctgctggtcgagcagttctacgatttcgccgccgggctggcggaccgctacctggtgatgtcgcgcggggcgattatccaacagggcagcggcagtgatatggaagccgaaggcgtccgcgggatggttaccatatag

SEQ ID NO: 171991 - DNA, 471 bp, Klebsiella oxytoca
atgaacagtagcaatcaggttaaacaattacgtttacagcgcgcctggtcccaggagcagctcgccgaactggcgggcgtgagcgtgcggaccattcagcgcattgagaacggggaccgccccggtctggagacccttagcgcgcttgcggcagtctttgaagttaacgtcgccgagattagcggcgattcgccggaaggccatgacgaatcgctggatttacgcattgaggaagccaaagcgcgtgtcgaacgcgaaagccgtttttaccgttcactgaccgtggcggtcgtggtttgcatcctgctggcggtgctgaactggctgaccggcgcagacagctactggtccgcatgggtggcgatcatctggggggcgctgctggcggtaaaaggattacgcctgtttgtgtttggcgaatggatcaaaaactggcgtcaggcgcggctgcagcggctgctgcgaaagtaa

SEQ ID NO: 171992 - DNA, 1194 bp, Klebsiella oxytoca
atgataccgacactcaggcgctcaacggcggcgctgctggcttcgtcgttgctgttaacgattggccgcggcgcaacgttaccttttatgacgatctacctcacccggcagtaccagctggaggtggataaaatcggctatgcgctgtcgagcgcgctgatcgtcggggtactgttcagcatggggtttggcattctcgccgataagttcgataaaaagcgctatatgactctcgccgtgctggcgtttattggcggtttcatcgctattccgctggtcaatagcgtcgcgctggtggtgtttttcttcgcgctgattaactgcgcctactcggtattctccaccgtcctgaaagcgtggttcgccgacgtgctgtcgccggaaaagaaggcgcagattttttcccttaactacacctttcttaatattggctggaccgttggaccgccgatcggcactctgctggtgatgtacagcattaacctgccgttctggctggcagcgggctgcgccgcgctgccgctggtgtttattcagctgtttgtccagcgcaccagcgccgcgattgctgaggataatgcggtccagtggtcgccttcggtgctgctgcgcgatcgtgcgctactgtggtttacgctctccggcctgctggcgtcattcgtcggcggctctttcgcttcctgtatttcccagtatgtgctggtggtagcggacagcgattttgctgaaaaagtggttgccgtggtactgccggtcaacgccgccgtcgtggtggcgctgcagtacgcggtcggccgtcgcctcaccgcgcgtaatattcgcccgctgatgacctttggtacggtctgttttgtactcggactgggcggttttgttatttccgataatagcctgctgctgtggggcctctctgccgccgtctttacgctcggtgaagtgatctacgcgccgggtgaatatatgctgatcgataacattgctccgccgggcatgaaggccagctacttttccgcccagtcgctgggctggctgggagcggcttttaacccgatgctgaccgggacgattctgacccatctgccgcactggtcgctgtttgcaatattgatgctcgctattattgccgcctggctgatgattttccgtgggatgaacgtacgcccgtggaacggtagtgcggtcgcccgcgcctga

SEQ ID NO: 171993 - DNA, 900 bp, Klebsiella oxytoca
atgacgcgaaaagacgggctgctggcattactggtggtggtggtatgggggctgaatttcgtggtgattaagctggggttgcataatatgccgccgctgatgcttgccgggctgcgttttttgctagtggctttcccggcgctgctcttcgtcgcgcggccaaaaattccgctcactctgctgctgggctacggtctgactattagctttggccagtttgcgtttctgttctgcgcgattagcctcggtatgcctgccgggctagcctcgctggtgctgcaggcgcaggccttttttaccattattcttggcgcgtttatcttcggcgagcgtttgcaggcgaaacagctggcaggtatcgcactggcgattttcggcgtcctggtgctggtcgaggccagcctcggcggacagcatgttccgctggtgggctttttgctgaccctggcggcggcgctgagctgggcctgcggcaacatcttcaataaaaaaatcatgtcccatgcgagccggccgccgattatgtctttagtcgtgtggagcgcgctgatcccggtgctgccttttatgctggcgtcgtggatcctcgacggcccgcaggtcatggcggaaagcctgctgcatatcgacctgctgacgatcctgtcgctgctgtatctggcgtttattgccactatcgttggctatggtatttggggggcgctgctcggccgctatgaaacctggcgcgtggcgccgctgtcgctactggtgccggtggtgggaatggccagcgccgccttgctgctcggcgaaacgctgaatagcctgcaactgctgggggccgtgctcattatggccgggctgtatatcaacgttttcggcctgcggatcgtgcgtccgggaatggcgagaggataa

SEQ ID NO: 171994 - DNA, 219 bp, Klebsiella oxytoca
atgaaactattcgcttccgccgccatcgtgctattggcgctggtctccagccagagttatgcggagcagaccaccactccggttcgccacaacaaccgggatgcgatgattattccttccgagcataatgattcgccttttgatttcaatcacatggcttcgggcagtgataaatcagatgaactgggcgtaccctattacaaccagcaaggcctgtaa

SEQ ID NO: 171995 - DNA, 381 bp, Klebsiella oxytoca
atgtccagacgcaataacgacgccatcactatccatagtattttgtcgtggatcgaggataacctggaatcgcccctgtcgctggagaaggtttcagagcgctcaggttactccaagtggcacctgcaaagaatgttcaagaaagagaccggtcactcgctgggacaatatatccgcagccgtaagctgaccgagattgcgcagaagctgaagcagagcaacgagcctatcttatacctggccgagcgctatggctttgagtcgcagcaaacgctgacgcggactttcaaaaactatttcgatgttccgccgcaccagtatcgtattactaacgtgccgggcgagtcgcgctacctgctcccgttgaacaactgttgttaa

SEQ ID NO: 171996 - DNA, 435 bp, Klebsiella oxytoca
gtgaaaagtacaagcgacctgtttaacgaaatgatccccctcggacgcttgatccagatggttaaccagaaaaaagatcgcctgctcaacgactacctctcaccgatggatattacgtccacccagtttcgggtgctctgttccattcgttgcgaagtgtgtattacccccgttgagctgaaaaccgtcctttccgtcgatccgggcgccatgacgcgcatgcttgaccgcctggtctgtaaaggctggattgaacggttacccaacccgactgacaagcgtggcgtactggtgcagctaacgccagacggcgcagccctttgtgagcagtgtcatcaggttgtgggtcagaaattgcaccaggaactaacaaaaaatctatcgacggatgaagtggccactcttgagtgcctgctcaaaaaagttctgtcgtaa

SEQ ID NO: 171997 - DNA, 669 bp, Klebsiella oxytoca
atgatggatctttttaaagcgataggcctgggactggttgtgatcctaccgctggcaaacccgctgactaccgtggcgctgttccttggcctggccggaaacatgaataacgccgagcgtaaccggcagtcgctgatggcctcggtctacgtgttcgctatcctgatggtcgcgtggtacgccgggcaggtggtgatgaacacctttggcatatcgattcccggactgcgtatcgccggggggctgattgtcgcctttatcggcttccggatgctgtttccgcagcaaaaggcccatgattcgatggaagctaagctcaaatcggaagagctcgaagatgaaccgacggccaatattgccttcgttcccctggcgatgccgagcaccgcagggccggggacgatcgcgatgattatcagctcggcgtcgacggtgaagcacggcgcaaacttcccggagtgggttgtgctggcggcgccgccgattacttttgcgctggtcggcattattctgtggggttgcctgcgcagctccggagcgattatgcgtctggtcgggaagggcggtatcgaggcgatttcccgcctgatgggcttcctgctggtctgtatgggcgtgcaattcatcatcaacggcgtgttggagattatttcgacctatcacgcctga

SEQ ID NO: 171998 - DNA, 1200 bp, Klebsiella oxytoca
atgatgacaaatacggtttcacgcaaggtcgcgtggctgcgcgtagtcacgcttgcgattgcggcatttatttttaataccaccgaatttgcgcccgttggcctgctgtcggacattgctgacagcttcggcatggaaacggcgcaggtggggattatgctgacgatctacgcctgggtcgtcgcgctgatgtcgctgccctttatgctgttgaccagcaagatggagcgccgtcgtctgctggttggcctgtttattctgtttatcgccagccacgtgctgtcgttcctggcatggaactttaacgtgctggtgatcagccgtatcggtatcgcttttgcccacgcggtattctggtcgattacttcagcgctggcgattcgtatggcgccagccggtaaacgggcgcaggcgctgagcctgattgctaccggtaccgcgttggcgatggttttcggtatcccgatcggccgtatcgtcgggcagtactttggctggcgcaccaccttcctggttattggcctgggagcgctgatcaccatggtatgcctgatcaagctgctgcccaggctgccgagcgagcattcaggttcgctgaaaagcctaccggtgctgttccgccgccctgcgctgctgagtatttatttactgacggtgattgtggtgaccgcgcactataccgcctatagctatattgaaccgttcgttcagacggtcgccggcctgagcggcaacttcgcgaccgtgctgctgctgacgctgggcggcgcgggtatcgtcggcagcattctgtttggtaagctcggcaacctgcatgcttccggattaatcaatgcggcgattggcctgctgctggcgtgtctgctactgctgctgcccgcctcgcacaacgctaaccacctgatgctgctgagcgtcttctggggcgtggcgatcatgattatcgggcttggtatgcaggttaaagtgctggcgctggcgccggatgcaaccgacgtggcgatgtcgctgttttcggggatctttaatatcggcatcggcgctggcgcgctggtgggcagtcaggtcagtacccatctgtcgatggcgtcgattggctatgtcggcgcgatcccggccgtcgtcgcgttaatgtgggcggtgatgattttccgccgctggccgatctcgctggacgaccatcagccgcatcactcctga

SEQ ID NO: 171999 - DNA, 792 bp, Klebsiella oxytoca
atgcaggaaattaatttttatctggtcgatgcgttcagcgaccatagctttggcggcaacgcagcggcggtttgcccgctcaccgaatggctgccggacgaaacgttgctgaaaatggcgcaacagcataatcagtcggagacggcgtttttcgtccgcaccgatgaaggatacgagctgcgctggtttaccacgctggatgagatcaacctttgcggccatgcgacgctggcggcatcgcacgtgatttttgaatatttcgatcacccgtcatcaacgattgtctttagcacccgttttgttggcgagcttcgcgtcacgcgcagcggcgactggctgaccctggatttcccggcctgggcgacgaccgccgttgagcagccgcctgcggaactgctggccgggctcggactgcgcgaagcgcaggagatacgcgtggcgcgcgattatctggtgattctggccaaccgccagcaggtggaagccgtgcgcccggatatgcagagactccagcgcctcggtaaaatgatctgtatcagcgcggcggatgaagagtatgactttgtcagccgtttcttctgcccgggcgaggcggtggcggaagatccggtgaccggttcgacccacagcatgctgattccctactggggcgaaaagctcggcaaaacggagatgcaggcgcggcaggtttcggcccgcggcggcgatctgcgctgccagtggcggggcgagcgggttctgatcggcggtcaggcgactacctatttaatcggcacgattacgctgcgttaa

SEQ ID NO: 172000 - DNA, 816 bp, Klebsiella oxytoca
gtgaaggaaatccctttttatctggtggcggctttcagcgaccagccttttgccggcaatccggcggcggtatgcctgcttaaagagtggctgccggatgcgctgctgctcaacatggcgcagcagcacaaccagtcggaaaccgcgttcgtggtgccagaaagcgatggttttgcgcttcgctggtttaccacccgcaacgaggtcaatctctgcggccacgctacgcttgccagcgcgcacgtgatatttcatcacctggattatcctgacgcggtcattcacttcgcgaccgcttccggtcgcctgaccgtgagccgtgaaggcgagtggctgacgctggatttcccggcgggagaaacgcaggagggtgagccgcccgccgcgatgctctccgcgctgggtattgatagctatctgcacgcgggtaagggacgcgcatggcttatcgagctggcctctcgcgacctgctagaagccctgcggccgaatattaccgcgatgatcccgggtgagcataaagttaccgttaccgccgcaggcagcggcgaatatgacttcgtcagccgctttttctccccgggagaagcggtgtgggaagatccggtaaccggttctgcgcataccatgttgatcccctactggcgtgcgaagctgggcaaaacccggatgctggcgcggcaggtttccgcgcgcggcggtgatattcgctgcgagctaaagggcgagcgggtattaatgagcggccaggcggtaacctatttaaatggcgtaatcacgctacgtgaaataacgtcaggcgagtacgaaaaataa

SEQ ID NO: 172001 - DNA, 1281 bp, Klebsiella oxytoca
atgacaatggaaatgattctggcgctgggcattctggtgctaatgatagttcttattatgtcagacaaaatggcgtttggcgcaccgccgctgctcgcctgtctgctattggttgtgacagggctctccaacgttcagcaggcctttgccgggtttgttaactcaagcgtcattatgatcgccggctttatggtggtgatggcggcgctgcagaaaacgcggctgatcggtaacgtaaaatcggcgatggttaatctggtaaataaaggcagctataaaagctacgcgctgctactggtgattgtcatgattggcgccagcctggcgggtaccggttcaaccggctactacgtgctgattctgtcactggtttcgaccatcccctacagcaagaagctgccgacctcaaagctgatgatgccgctgggattcgccaccaatcatcctctgttcccggttaacgtcgcgctgctgtttggcgtcaccgccacggtactgcaaaccgccggtttcaacgaggagatttcaatggtgaaatttgctctggtcaatctggtgatgtcgctggcctttttggcctggtgcctggttgcgtatcgctttttacccgatcacccgatcgccgatgcctccgaggaagcgatggcggtacgcgaagaggaagccgtggtgctgcccgcgtggaaagagtattgcaccgttggcgcctttgcgttcagcgtcgtgggtatgatgctgatgaatcagttaggcaatatcgcctatgtcgtaccgggtctcgccgccgccttcgtgatgatgattaacgttgtcgacttcaaagaggttcgcgatcatatgggcgcgccggttatcctgatgatggctggggtgatcggcgttgccgatgcgctggcaggcacgggcttcacggcaatggtcggcgatgcggtggcgggcgtgctcggcgcaaacgtatcgcccttcgtgtttatttttatctttgcgctactgaccagcacctgctcaacctttaccgggtcgaacatgggctcggtgtatatcttcgcgccgatcgcgatcgccgcctgtaccagcctcggcctcaaccctaccgcagccgcgattgcggtggtcatttctggctggaacggtggctatatgccgattgacggtatgccggcaatgattctgggaatggggaaatataaattaccggaattctggatattctcggtgccgatgtacttaatacggattctggcactgtgcgtcggcgcgattgtgatattcccgatgtag

SEQ ID NO: 172002 - DNA, 471 bp, Klebsiella oxytoca
atgatcgtcggcaaccttaacgccctgccgctggcagggcttcccccggcgctgcggcagatcctctcccttccgcaagccacgctagcggcgctgagcgacaggccggacggccgctggcagccggaaaactgtcgctggtattgcaatatcggcgaagcgcatacccagccgaccgcccagcggcacaccgaatatcaccatcagtgggccgatattcaggtgatgctggcgggctgcgaggtgattaacgccggaatgctctgcgtcgcgcaggatagcgatgaagagcgcaaaccggatctgtttatcgcccgcgattgcccgttgccggtatccatcaccctgtatcccggtgattttgcgatatttctgcccggcgaaccccatcaggcgctgtgcgcggtagacgtgccgtcaacggtacgcaaagccgtatttaaagtgccgagcgacatgctggaagggtaa

SEQ ID NO: 172003 - DNA, 1173 bp, Klebsiella oxytoca
atgtctgtaaccgcaattcgtgacggaatcattaatcagcatgaacaggacgcgcggctcgaaaccgcgatgttaccgtcatcctgcccgcaaaaccatgcggcaaacctgctgccgctgccggacggctccctgatgtgcgtctggttcggcggtacccaggaaggcgttgccgacatctccgtttggggatcgcgtctgctgcccgggagccgccagtggagcgatgcggtcaaactgtctgatgacgccagccgttccgagcaaaacccggtgctgtttctggcgccggataacgtgctatggctgctgtggaccgcgcagatctccggcaaccaggataccgccatcgtgcgctatcgccagtcaacggatctgggtcaaacctggggcgagattgccaccctgctcgataagcccggcacctttattcgccagccgatcatcgtcctcgacaacggcaactggctgctgccggtcttctactgccgcactcaaccgggtgaaaaatgggttggcaacgacgatatcagcgccgtcaaaatctcctccgattgcggcaaaacctggcgcgacgtcgaagtcccgcaaagcctgggctgcgtacatatgaacatcaccgcgctgccgggcggcacgctggttgcgctgttccgcagccgttgggccgacaatatctactacagtcagtccgtcgataacggcgaaagctggtcagtgccggaaccgactgaactgcccaataacaactcatctattcaggtgactaccctcgccagcggcgaactggcgctggtctttaaccacatgagcgccgccggcgcgcgggaacgccgggcatcgctttacgacgaaatcgacgatggcgataacagccgtaaagagccggaagtgaccagcgggcgttcggccttctggggagcgccgcgcgcgccaatgaccgtagccatctccgccgacggcggtaaaacctggccatggcagcgcaacctcgatgaaggcgacggctactgcatgaccaataactcgctggataagcgcaatcgcgagttctcctacccgagtatcaaacaaggggcggacggcacgctgcacattgcctacacctggttccgccaggcgattaaatacgtgcacgtttcgcccgagtgggtgaaggagtccgcacgatga

SEQ ID NO: 172004 - DNA, 762 bp, Klebsiella oxytoca
atgtttatatggatgcttgaccctgaaatatggttgacgctggtaacgctcacctttctggagattattctcggggtcgataatattatctttctctcgctggtagtagccaaactgccaccgcatcaacaaaatgttgcgcgtaagttgggattaagcggcgcaatggttatgcgcgtgctattgctggtatctattgcctggctggcgcatataacggtgccgctgtttactattgcgcattttgtcgtatcggtgcgcaccatcattttatttgtcggtggttgtttccttatttacaagtcactgcaggagatacgcggtgaactgcagctggaagaagagtcgcacggcggcggccagcgtcagctttcgctggcgggcgcggttgtccagattatgctgctggatattgtctttagcctggattcagttattaccgcagtcggtttgtcgcaacatattttcattatgattacggcagtcattattgctgttggcattatgatgttcgcggcaaagaccattggcgattttgtcaataacacgccaacgatgaaaatgctcgctttaacctttttgttgctggtggggatattattggtcgcggatagtctggagatacacattgcaaaaggttatctctattttgccattttcttttcgctggcggtggaaacgctcaatattattcgtaataaaaaaatcattaaggcttcgcagcccgcagaagcttacgactcattacagctaaacaaataa

SEQ ID NO: 172005 - DNA, 885 bp, Klebsiella oxytoca
atgagcaattcaattaccggcgttctgaccgccatcgtcacgccttttaccgcagagggagccgtgaatatcccggcgctaaggcagcaggtacagcgccagctcgccgcgggcaacgctattttttgcggcggtaccaacggcgaattctttgtgctgaatgaagcggaaaaaatcgccgtcgctaaagcctgcgtggatgaagttgccggtcgggcgccggtggtggcgcatattggcgaagtgtcgactcgcgaaacgatccgcctgggtcaacagatcgaacaactgggcgttgacgcggtctccgtgattaccccctggtttgtgccgctaaagcaggatgagctgatcgcccactataccgccattgctgacgccctgagcgtaccggtatttctctacaacatcccggcgcgcaccggcaacaccattgaaccgcaaaccgcgcgcgcgctggcgcagcatccgaacattatcggcgtcaaagacagcgccggcagctacgaaagcctgaagggtttcctcgatgcggtccgggatatcgccgattttgacgtgctgaacggccctgattcgctgatacaccagggttttgttgatggctgctccgcctgtatttccgggctggcgaacgtcgcgccaaaagagatcaacgccatctgggcaaattttaaagcgggcaatgttgagggctcccgccaggctcaggagagcgtcaccggtctgcgcaccgatctttataaagttgcgttctcgccggcggcggtaaaaaaagcgctgcagctgatgggccacgatgttggcgacagtcgctacgcggtgagcttcacctcggcgcagtgcgcggaaattaatcacattattgccaaatatatttcctga

SEQ ID NO: 172006 - DNA, 1146 bp, Klebsiella oxytoca
gtggcaaccattaacagcaccctgattagcggcgcgggcgcgtttaccgccctgctaccgctgctgaccggcaaacagcgcattttgctggtcaccgatgccaacgttggcaaactcgatgccgcacggcagatccgtacgcttctggaagacgaagggcgtcaggttcagatcgttgattccgtacccgcagagccaagccagcatgatatgacgcaaattctgcgcctcgtcagcgctaaccagccggagctaattgtcgggattggcggcggtagcgttctggatgtggccaagctgctctcggttctgctgcatcccgactcgccggggcttgaggcgctgctggccggcgaaaagccgcagcaaaaggtgacctcgttattaattcccgccactgccggcaccggttccgaagccacgccgaacgcgatcctggcaatcccggaacagaatacgaaggtggggattatctccccggttctgctgccggattatgttgccctgctgccggaattaaccaccagcatgcccgcgcatatcgcctcctctaccggcattgacgcgctgtgtcatcttattgagtgctttacttcgaccgttgccaatccggttagcgataacgcggcgctgattggcctgcgcaagctggtgcgcaacatcgagctatcggtgagtgagccgcacaatctggcggcgaagctggagatgctatgggcctcttattatggcggtgtggctattaaccatgcgggcactcatctggttcatgccctttcctatccgttaggcggcaaatatcacctgccgcacggcgtggctaacgccattttgctggcgccttgtatgaaggtggtgcgcccacacgcggtggcgaaatttgcccaggtctgggatctgctccctgaaaccgacctgacgcttagcgaagaagagaaatcccatgcgctggtcgcctggctcgccgcgctggtgaaacgcctgcagctgcccgataaccttgccgcgctgggcgtaccgccagagagcatcagcgaactgagcgaagcggcgctgaacgtcaagcgtttactgaataatgcgccatgcagcgttaaccaggatcaggttgaagcggtttaccgcaccctgttccccgcacaataa

SEQ ID NO: 172007 - DNA, 1239 bp, Klebsiella oxytoca
atgggcagcggcgataacaaggtgctggttctggcggatgactttaccggcgcaaatgacgcgggagtcagcctggcggagacggggatgcgggcggaagtggcgtttagcgccagctaccagggagaggcgcaggcgctgatcctcaatagcgacagccgcgcgcagcccgccgcagaggcggcacggcgcatcacgcatcttttacaggcggtgttgccgcgttttcagccgcgctggacggtgaaaaaaatcgactccacgctgcgcggcaatctcggcgccgagctggaagcaacgatgcgcgcgctgaactgcgccgtagcggttctggcgccggcttttccggcggctggccgggtgacgcgccggggtgtgtgctatgtgcacggctcgccggtgaatgaaaccgagttcgcgaccgacccgaaaacgccggtcagcagcgcggatatcgccgccgtggtcgctcaacaaagcgatttgctgtgccgcgggacaacggtccccgggctggcggcagagctggaacaaacggttgagacgccgcgggtgctgatcgtcgatgccgaagaaaaccagcagttggatgccattatcgccacggtcgctctgtgcgagcagcgggtgctgctggtggggtctgcggggctatgcgacgccctggcgcgtcggctggcgactatgccgcacggcccgctgctggcggtggtcggttcaatgagcgaaatcgcgcaacagcaggttgcccgccttaatgagcatccgcgcgtccggcgggtcgacattgatgtggctatggcctttgacggcgatgccgcccttgatgcccggcgtatcgtggcggtattgagcgaaaataatcattgcgttatcaccacccgacccgatagcgaggcgcgaaaggcggttgaagccttgtgtcgtcggcatggggtcgatcgcaccgcccttggcgaacgcatctgcgcatacctggcgcgggtcagcgcgctggccatcgcgcagagccagccgggagcgctctatttatccggcggcgacgtggcgatcgccgtggcgcaggcgctgggcgccagcggatttcatattacaggccgggtggcgcaatgcgtgccgttcggcaattttctgggtagtagctggcagcggccggtaatgaccaaggcaggcggattcggaacggaaaccaccctgctggaggttgtgaattttattgaggagaaaatgagtgactaa

SEQ ID NO: 172008 - DNA, 987 bp, Klebsiella oxytoca
gtgactaacatcattgcggtaacgatgggagacccggcaggcattggcccggaaattattatcaaatcgctggttgaggggaaactcaacggcgcgccggtcgtggtggtgggctgcgcgcagacgctgcggcggatcctggcgatggggataaccccgcccgccgagctgcgtatcattgatcgtccggaacaggcgcagttcagcgcgggcacgattaacgttatcgacgaaccgctggccgatccgcaaggactacgcgcgggggaagtgcaggcgcaggcgggggatttagcttaccgctgcatcaagcgagcgaccgcgctggcgatggcgggtgaggtgtttgcgatcgctaccgcgccgctcaataaagaagcgctgcatctggccgggcacaacttcccgggacataccgaaatgctcgcccatctgacgcaaaccaaagattttgcgatggtgttatataccgataagctcaaagtgatccatatctctacccacgtggcgctgcgaaaattccttgataatctgaaccagccgcgagttgaaacggtgatcggcatcgccgatagcttcctgcgccgggtgggtttcactaatccgcgcattgccgttgccggagtgaaccctcacgccggggaaaacggtctgtttggcgatgaagagattcgtatcgtgggtccggccgttgaagcgatgaaggccagagggctcaacgtgaccgggccatgcccgccggacacggtatttatgcagtgtcacgaaggtctgtttgatatggtggtcgcgatgtatcacgatcaggggcatattccgctaaaattacttggattttatgatggggtaaatattaccgccggactgccgtttatccgcacttccgcagaccacggcacggcgtttgatattgcctggacaggtaaagctaagtctgacagcatggcaacctctattgagctcgccatgcaaatcgcacaggaataa

SEQ ID NO: 172009 - DNA, 762 bp, Klebsiella oxytoca
atgaagggatataaccggttagagcagattatggattttctgaagagccataatctggtgacagtggaccagctggtggcggcgactcacgcctcgccggcgacaattcgccgcgacctgattaagctcgatcaggaaggggtcatcagccgtacccacggcggcgtcacgctcaaccggtttattccttcacagcccaccacccaggagaagtcccagcgcagtctgcaggaaaaatacgccatcgccagcgcggcggcggcgttagtcaaggccggggacgccatcgtcctcgatgccggaaccacgatgatcgaacttgcccggcagataacccacttgccgctgcgggtgatcaccagcgatctgcatatcgccctgtttctctcggaatttaagcaaattgaagttaccatcatcggcggacgcatcgacgacagcagccagtcctgcatcggcgatcacggacgccgtctgctgcaaaatatctggcccgatctggcgttcgtcagctgcaacggctgggatctggagaagggcgtaacctcgccaacggaagagaaagcggcgctgaagcgggatttaatcgcgaacgcccggcggcgcattctgctggcggacagctcaaaatacggcgcctggtcgctgtttaacatcacccatctcgactcgctcaccgacatcatcaccgataatcatctgccggaagagacgcgtgaactgctggggcatatccatccccggctgatcattgccgactag

SEQ ID NO: 172010 - DNA, 945 bp, Klebsiella oxytoca
atgaataccaaagcgcgcaaggtcatgattatcggggcaggcaacgtcggcgcctctgcggcctatgccctgttgaatcagaatatttgcgaggagttaatcctcgtggacctgaataaagcccgcgccgaagcgcacgcccaggacctgagcgatgcggcggcctacatgccggggatgatgacgatttcctcgcgggaagccagcgactgcgccgatgttgatattgcggtgctcaccgtttccggcggcgcgctcaaaccgggccagactcgactggacgaactgaccaacacggcgacaattgtaaaaagcctcattccgcaaatgatgagcggcggtttcaacggtatttttttgattgccaccaacccctgcgacatcatcacctggcaggtatggcggctttcaggtctgccgcgcagccaggtgctgggtaccggcgtctggctggataccacgcgcctgcgcagagtgctggctcaggagctggatatcggcgcgcagagcatcgacgcctttattctcggcgagcatggcgacacccagtttccggtctggtcgcactcagcggtttacggcgccgccatcggcgatgtgtaccaaaagcatactggtcaaattctcgaccgggagcggattgcggaaaaggtgcgcaggctgggatttgaaatttacgccggtaaaggctgcaccgaatacggcgtcgccgggactatcgccgaaatctgccgccatattttcaccggcagccatcgtgcgctggcggtatcgtgcattctggatggcgaatacggcattaccggcgcggcggcaggcgtacccgcggtgcttacccaaagcggcgtacagcagatcattgagctgcagctggccgatgatgaagcagagaagttccgccgctctgtggaagtgattaaagccaatatcgcccgcctaccgtaa

SEQ ID NO: 172011 - DNA, 483 bp, Klebsiella oxytoca
atgtacacaatcaccccaaccccgcaaaaccacccggatctgatggccttaattgccgaactggacgcgtatcagcagacgctctacccggctgagagcaaccatttgatcgacctgagcgcgctaccggcggagtcggttattgcgcttcttattcgcgatacgcagcgccaggccgtcggctgcggggcgatcgtgctcggcgaagagggggttggcgagatgaaaagggtgtttattcacccggcccatcgcgggcagcagctgggagaacgactgctggccgcgctggaggaagaggcgataaatcgcgaatgccataccgtgcgcctggaaacgggcatccatcagcacgccgccgttgcgttatatacgcgcaatggctaccagacccgtagcgcctttgcgccgtatcagccggatccgttaagcatctttatggagaagatgctgcttgccgatcttcgttcagcagcgctataa

SEQ ID NO: 172012 - DNA, 879 bp, Klebsiella oxytoca
atggacctgacccagcttgaaatgtttaacgccgtcgccagcaccggcagcattacccaggccgcgcagaaggtgcatcgcgtgccgtcgaacctgaccacgcgcattcgccagctggaggcggatctcggcgtagagctgtttattcgcgaaaaccagcgtctgcgcctgtcgcccgccgggcatagctttttacgctatagccagcagatcctcgccctggtagatgaggcgagaatggtggtcgccggagatgaacctcaggggctgttttccctcggctcgctggaaagtaccgccgccgtgcgcatttcaccaaccctggcgcactttaatcaacgttaccccaaaattcatctggccctctccaccggcccttccggcaccatgatcgacggcgtcctggagggaaacctgagcgcggcgtttgttgacggcccgctggtgcatccagggcttgaggggttaccggtatttcccgaagagatgatgatcgtcgcgccctttggccacccgcccattgcgcgcgccagtgaagtgaatggcgccagcgtctatgcgtttcgcgccaactgctcctaccgccgccattttgaaagctggtttcatgccgatcgcgccacgccgggacgcatccatgaaatggagtcctaccacgggatgctggcctgcgtcattgccggcgccggtctggcgctgatcccacgcagtatgctggagagcatgccgggccatcagcaggtttccgcctggccgctggcggaagagtggcgctggctgaccacctggctggtctggcggcggggggcgaaaacccgtcagctcgacgcgtttatagcgctgctgaacgaagatcggcaagcagcatcttctccataa

SEQ ID NO: 172013 - DNA, 1386 bp, Klebsiella oxytoca
atgaatgtatctgccactcatgcggtttccgtgaacccgaccacaggtgaaatcatatcgtctctgccctgggcgagcgagcaagaagtcgattcggccgttgcccttgcggaacaagcttatcgtcagtggcgcaacgttagcgttgcggaacgcgcggcagcgctgcgtcatgtcggtaacgcgatgcgcgcgcgcggcgaagcgctggcgcaaatgattagcctggagatgggaaaaccgatcgctcaggcgcgcggggaagtcgcgaaatcggcaaatctctgcgactggtatgccgagcacggaccggcgatgctcaaaaccgaagcgacgctggttgaagataataaagcggtcattgagtaccggccgatgggcgctatcctcgccatcatgccgtggaatttcccggtgtggcaggtgctgcgcggcgcggtaccgattctgctggcgggcaacagctatctacttaagcatgcgccaaacgtactgggaagcgcggcgatgatcggtgaaatctttgccgcagccggcgttccggccggggtgtttggctgggtgaatgccaccaacgatagcgtttcgcagatgatcaacgattcgcgtatcgccgcggtgaccgttaccggcagcgtgcgggccgggaaggcgattggcgcgcaggccggcgcggcgttgaaaaaatgcgtcctggagctgggcggttcggatccgtttatcgtgctcaacgatgccgacctcgacgaggcggtgaaagcggcggtgatcggccgctaccagaacaccgggcaggtctgcgccgcggcgaagcgttttatcgtcgaggcgggcattgccgaggcctttacgcagaaatttgtcgccgccgtcaccgcgctcaaaatgggcgatccgcgcgatgaacagaactacatcgggccgatggcgcgtttcgatctgcgcgatgagctgcatgagcaggtgcgcgcgaccttaaaagaaggagcgaccctgctgctgggcgcggaaaaaatcgccggcgcgggcaactactatgcgccgacggtgctgggcaacgtcaccgctgagatgaccggcttccgccaggagctgtttggcccggtggcgacaattaccgaagctcgcgatgccgaccacgcgctggcgctggcgaacgatagcgagtttggcctttctgcaacggtatataccaccagcgaagcacaggcccaacgctttgccgatgagctggagtgcggcggcgtgtttattaacggctactgcgccagcgatgcccgcgtggcgttcggcggcgtgaagaaaagcggatttggccgcgagctctcccattttggtctgcatgaattctgcaacgtacagaccgtctggagagatcgccgctag

SEQ ID NO: 172014 - DNA, 927 bp, Klebsiella oxytoca
gtggcgacggtaattaataacgcaatgctcgatgccattctggctgaagtcaggccgctgattggccgcggtaaagtggcggactatattcctgccctggccagggtcagcggcgataagctcggcgtggcaatctgtacggtggacggtcagcactgcagcgccggtgacgcccacgagcgtttctcgattcaatctatctccaaagtcctcagtctggtggtggcgatgaaccactatcaggaagaggagatctggcagcgggtgggtaaagatccctccggccagccttttaattcgctgttgcagctggaaattgagcaaggcaaaccgcgtaacccgtttattaacgccggggcgctggtggtctgcgatatgctgcaaagccgtcttagcgcgccccgtcagcggatgctggaaatcgtgcggcgcctgagcggggtgagcgatattgcctacgatccggtggtcgcccgctcggagttcgatcattcggcgcgtaatgccgccattgcctggctaatgaaatccttcggcaactttcacaacgatgttgccacggtactgcaaaactattttcactactgttcgctggagatgagctgcgtagagctggcgcgtacctttctgttccttgccgaccggggtatcgccccgcatcttgcgacgccggttatcgcccccattcagtcgcggcaggtcaacgctttgatgatgaccagcggcatgtaccagaacgccggtgagtttgcctggcgcgtcggtttaccggcgaaatccggcgtcggcggcgggattgtggccatcgttccgcaggagatggcgattgcggtctggagccccgagctcgatgacgccgggaactcgctggccgggatcgctttactggaaaaactgacgcaaaaactggggaggtcggtattttga

SEQ ID NO: 172015 - DNA, 375 bp, Klebsiella oxytoca
atggtgcccatagaaaatctgttcgcccgcctgcagcgctccacttttcgctcccgctttcgcctcggcgtaaaggaacggcagtattgctatgataagggggcggaagttatcgaccagcacgcggctgattttatcgccaggcgcctggctccggcgcaaattcctaacgatggcaaacagactccgatgcgcggacacccggtattcatcgcccagcacgccaccgcgacctgctgtcgcggctgcctggaaaagtggcacgctatccctcgggggcggggcctcagcgaggcggaacagcgctacgtggtgcaggtgattcaccactggctggtgatccagatgaactcgccggaccgcggcagagcataa

SEQ ID NO: 172016 - DNA, 1413 bp, Klebsiella oxytoca
atgtctccactgtcgattcggtcattcacgctgtttcgtgaggaacaacccgtgcgtgatgcgctggtgttgttcactttaacgctactcctgcatttctttggcgcgatgctgcgtctggtacaagaactgtcgtttttctggccgctgaatgcggtaatggcggggatttttgcgcgttatatctggctaaatcgcagttatttttacgccatctgttttgccgccatgctggtatatgacggtttaacctcgcgctgggggatgggcttcgcctccttcctgatcaacttctccaatctcgtttttattgtcactctggcgcagctcattttatgggacaagcgccggacggactcgatgccgggaccgattaacgcgcttagcctgttttgctactgcctgctggcggcgctgctctgcgccgccgtgggcgcgctggggtcggtagatgtcgagcgcgcaacgtttatcccgcagctggcggactggtttagcgaacagttctcaaccgccgtgctgatcctgccgtttatcttgaccctcacgctcccttcggcgttcgggcgttttcgcctgcgccagctgctgccggcgattgcgctggtgctgtcgattgtgctcggcgtagcggttggcggcgccgggagcatcaccttcccgttaccggcgctgatctggtgcgctattcgctacccgctgccgctgacctgtctgctgacctttattaccggcattagcgaaattctgctggtggcgaactcgcttatccacctttcgcccgatagccggatgcagccgtggcagctgttttcgacgcgtctggggatcgctgcgatgctgataagccccgttatcgtcgcttccagcgttgaggcgattaacaatctggtcaaacagctggccctgcgtgccgactttgacttccagactcgggtctattcccgctctgggttaagcgaagcgctgaagcgccagccgatcgcggaaaatacgctgctaacggtgatggtgctggatatcgacggcttcaagcaggtcaacgatcgctggggacatgaatgcggcgactgtatgctggcccagtttgcgcagcaggtgcggcagctggtgggagaagagggcatggtcgcgcgtatcggcggggaagagtttgccgtcgcagcgctgacctcatccggtcaggaagcgcagctgctggcagaaaaaattcgccagggtattgaaacgcaaaccttcacctggggtcagagcaaaatccagctgaccatcagcatggggctcgagagccagccgcttggcgccgccagaattacggatctgttcaaccagctgctgatggctgccgacgattatatgattcaggcgaaaaatgccgggcgcaatcgtattttcacgcaaaagatggcctga

SEQ ID NO: 172017 - DNA, 528 bp, Klebsiella oxytoca
atgaccacatccttttctctgcgcacgctgtcgcgtgacgatattctcgaacatcttcctgaattaaccgatatcctcgtcagctgcgtcaacggcggggcctcggtgagctttatgctgcctttcgcccctgaaaccgcgacggcgttctggctgcgaatggcgcagagcgtggcagccggggagcgggtcgtcatcgccgcggcggatgagcagcagcggctcgttggtacggtgcagctcattatcgaccagccggaaaaccaaccgcaccgcgccgacgtcgctaaacttctggttcaccaaaatgcgcgtcgcctgggtctggcgaatgcgctgatggccaggctggaagcgatcgcgcgcgagcagggcaagagcgttctggtgctggatacggcgaccggcagcggagccgagaatttttacgtgcaatgcggttgggaaaaggccggggaaattcctcgctatgcgctgatgccggacggcgaactgacggcgacatcgctgttctataaacttttgtaa

SEQ ID NO: 172018 - DNA, 1452 bp, Klebsiella oxytoca
gtgaaaacactaaaccgtcgcgatttcccgggcgcgcagtaccctgaacgtatcattcagtttggcgaaggcaacttcctgcgcgcgtttatcgactggcagatcgatctgctgaacgagcataccgacctgaattccggcgtggtgatcgtgcgtccgattgagagcgcattcccgccgtctctcagcatccaggacggcctctataccacgattgttcgcggcctgaatgagaagggcgaagcggtgagcgatgcgcgtctgattcgatcggtaaatcgtgaaatcagcgcctatgccgattatgaggagctgctgcgtctggcgcataatccggatatgcgctttgtgttttccaataccactgaggccgggatcagctaccacgccggcgaccgctttgacgatgcgccagcggtaagctatccggcaaaattgactcgcctgctgtttgaacgctacagccacttctccggcgcggcggataaaggttgggtgatcattccctgcgagctgattgattacaacggcgaggcgctgcgtgaactggtgctgcgctatgcccaggagtgggcgctgccggaagcgtttatcacctggctggatgaggcgaacgccttctgttctacgctcgtagaccgtatcgtgaccggctatccgcgtgatgaagccgcgcagattgaagaacagctggggtataaagacggtttcctcgataccgctgaacatttctacctgtttgttattcaggggccgaagtccctggccgcagagctgcgtctggataagctgccgcttaacgtcctgatcgtggacgatattaagccgtataaagagcgtaaagtggcgattcttaacggcgcgcacaccgcgctggtgccggtcgccttccaggcgggtctcgataccgtgggcgaggcgatgaacgataaggaaatctgcgctttcgttgagaaagcgatttaccaggagatcattcctgttctcgacctgccgcgcgatgagctggagtctttcgccagtgcggtcactggccgtttccgcaacccgtatattaagcatcagctgttgtctatcgcgcttaatggcatgaccaaataccgcacccgcattctgccgcagctgttggcggcgcagaagaaagagggcaagctcccgtcgcgcctgaccttcgcactggcagcgctgatcgcgttttatcgcggcgaacgtaacggtgagagctatccggttcaggatgatgctgaatggatggagcgctacaaggcgctatgggcccagcatcgggatgcgcaaatcaccaccggcgagctggtaaaagccgtactgtccgttgaatcccactgggagcaggacctgagcaaagtttcaggcctggtcgagcaggtgacgcaggatctggatgcgattctgcgcgacggcatgcgcgccgccgttcagccgctgtgctga

SEQ ID NO: 172019 - DNA, 441 bp, Klebsiella oxytoca
atggtcattgagattcgcgaacccgatcggcaggataaagcacagtggttatcgctttggcagggttatacccgtttctacggtagcccgcagccaacggaggtcacagaatacacctggcagcggatgctcgatgccgcttcgccgatgctgggtcgtttcgcggtggtggatggcaatgtggtgggctttgcgatttgtatcctccacgaaggaacatgggttaagacgcccatttgctatctggaagatctgtttgtcgccccgcagatgcgcgggcaaggcatcgccagaaccttaatacaggcgctgcaaacggaaggaaaagagaaagggtggtcgcgcctgtactggcacactcgcaccgacaatccggcacggcgtctgtatgatgaattcacgccagccgatgactatgttcgttaccgcgtgacgctctga

SEQ ID NO: 172020 - DNA, 753 bp, Klebsiella oxytoca
atggcagactggaatccctcactctatttgcaatttggcgctgagcgaacgcggcctgccgccgagcttcttgcgcgcattgcccatcatcccgtgacgctggccgttgatttaggctgcgggccaggcaacagcaccgctctgctgcaagatgcctggccggacgcgacgattatcggcattgataattccccggcaatgctggaagaggcctcacaaaggttgccgaactgtgggttcgttgatgcggatattgccgcttatcgcccggagcgtccggcggatctgatatacgccaatgcttcgctgcaatggctcccggatcatcagcggctgttcccttttctggtgagcaatcttgcagaaaacggcgtactggcggtgcagatgcccgttaactggcaggagccgtcccataccctgatgcgtcaggttgcagaagagcttgggcacccggccagcggacggcatccgctgccagaggtacaggagtattatgatatgctcactgcctgcggctgcgaggtggatatctggcgcaccacctactatcacccgctggcatcgcatcaggccattatcgaatggctgcagtcaacgggcctgagaccatttttacagccacttgatgagccacagcgcgaagcgtttctcaagcgctatctggaagagttgaagcggcactatccgttacagtgtaacggaaaggtattgttattatttccgcgcctgtttatcgtcgcgcgccgttag

SEQ ID NO: 172021 - DNA, 885 bp, Klebsiella oxytoca
atgtgccgggcgggtcacggtactcctgtagacaacaggctagagtatgcgcgcaattctctggtcaatgggtatgaaatggctttaatcattaagatgttacttgagaaccggcttggtaaggacaaggataaactgttgcaggtgaaacctgggctaagccttgttgttgaggatgaaacctgccgggttctgtttgataccggccctgacggcagctttttgcataatgcgcagcgcatgggggtttctttatctaacctgaccgccacggtactttctcacggtcattatgaccactgcggcggcgtgccgtggctgccggacaatagccgtattatttgccatccgcaggtcgggcaaacgcgctattcggcgttatcgatcggcgggcatcgcgtaaaggtcaaaaagctgtcgcgagagatcgactattcccgccaccgcatggaatacagtcgccagccgttggctatcagcgagcggctgatgtggtcaggtgagatcgcggttgccaggccgcgagcttatggcgtgctggcggggctatccccagcggaggattatattgccgatgagggcgtactgatttaccgctcgacgcgaggcttaatcattatttgcggctgcggacatcgcggcttgatcaatacccttcgccactgtcagaaggttaccggcgtccagcagatatacgccatcatcggcggacttcatctgcgccgcgcgccgccgtggagaatacgccagataaagcaatttttgcaccagcagaaggtggagaaagtgatggcctgccattgtaccggttcgtggggacgctggtggttatcggcggatagtgccccggcgaccggcgatacgttagtactggatcagggatga

SEQ ID NO: 172022 - DNA, 420 bp, Klebsiella oxytoca
atgattcagtcactacaggcattattcaaacaagccacccgacgccggcttcgcatccgcgccgggcttgttattgcctgttggttgctactcaatctacagcttgccgtcgcggcgcaccacggcggccagcagcagccggtcacgccgcaggtgcaaattcattacatcgttgatggcatgatgaccatgtccggcatggataacgtcgggcagaaagtcatctgtgagaaacactgcgaccccgacactgcgcaacctaatacctccacctctctacagctgaatgcattgcccgccgaaaccaccctgctggtggtttcgccgcagcaggagatttgcgctgaacgtatggactggcacacgccgcccgtcaccggtccgccggctgaaatacgtttctgccgtttcagagaataa

SEQ ID NO: 172023 - DNA, 369 bp, Klebsiella oxytoca
atgcgttcgacctctatttttctgctttttaccagcgttctgaccttttctttcaccgcattttccgccagcgcggaagatggcgcgatgcatcagcataatatgtccgcgatggcggaaatgccggggatgaataagcccgagaataccgccgcgctttattcggcaagcggggtgattaaagcctggcgcgaagatgcagtggtgattgcccattctccggttcccgggctgaactggccggcgatgacgatgagctttgcgctcgatggacatcaagataaaaagctgccggtgggacagcaggtcgatttcaccttccgccagaccgactccggctacgcgctcgtttcgattatcgcgcaataa

SEQ ID NO: 172024 - DNA, 1248 bp, Klebsiella oxytoca
atgcacatcttaactaaggcggcctgcgggctgccgctcttgctgtcgctgacgtccaccagcggctgggcgacgacgctctctgaggccctgtcggcggcggaaagctactctgccgagctctccgccaacgatcatcaggttaacgctttgaagaatatggcggattccgccatggagcttcccgatccgaagcttaagtttggtcttgaaaacgtcccgttggggggaagtaacgccagccgcctgacacgcgagggcatgaccatgcagcggattggcgtaatgcaggactacgttagcagcaccaagcgcgagcgcaaagccgactcgataaccgccgacgcgcgacgaaccgccgccaacgccgatgttatccgcgccaggctacagcgggaaaccgctcaggcatggctggcgctggcggtagcgcagaagtcgctgcgctcggtacaggcgctgattagcgaaacctcccggcaaattggcgtccataaggcggccgtcagcagcgccagcgctacccccggcagcgtgctcgacgtcgaactggcgctcaatgctatgaaaaatgagcaagataacgcccggcgcgatgtgcagatcgctcaggcgcgtctgatgcagctaaccggtaaggatatccgcgttatttccggcccgctgccgcgcattgagcgcctgcctgccgatgaagcgaccttaatcgaggggataaaacttcatccagaagtgattcaggccgcgcgtgaggctgatctggctaaagcaaaatccgggcagtcggaagtggcggcgatccccgacgtaggcgttgaggtctattacgccagacgcggagatgactatgacgacatggtcggcgttatgtttaccgtcgatttgccggtttttcagggtaaacgtcaggataaagaccacgctgcggatgtctcccgaacctatgaagccaacgatcggttgaccttattgatgcgcgagcatcaggcgcagcagtatcagctgatcgcgcagtataacgccgcgaaagccatttacgatcgccagcaaagcgaggtcctgccgctgctgcgcaagaaggtgagtctcgtcaatgcccagtatcggggcggcagctccgcgctgcctgaactgctcgccgcccgtcgcgacctgctgaacggggaaatcgccagcaacaacgccgagaaagcgctcgctgacgcgtgggccgccgttcgctaccttattccacaggatgttaaataa

SEQ ID NO: 172025 - DNA, 1470 bp, Klebsiella oxytoca
atgaagctgaaaactgcttttacccttgtggcgctggccgtcgctcttgccgccgcgggcggatactggctgggatcgcggaacgcctcgactgtcactccgggcggaaccgaaacggctgcgggacgcaaagtgctctactggtacgacccgatgacccccggtacccgttttgataaaccgggcaaatcgccgtttatggatatggacctggttccgcgttatgccgatgaagaggctgacgatgatgcgggaggggtgaagattagcacccgccagcagcaaaatcttggcgtacgcacggcgagcgtttcccgtcagccactggcgccggagcttaacgcttttgctaccgtcgccgtggacgaacgcggcgtcgagacggtgccggcgctggccaacggcttgattgagaaactctacgttaacgcctctcagcagtttgtgaaaaagaacgaggcgctggccgaactgtggatcccgcagtgggcggcggcgcagcaggagtatctggcggtgaggcggctgggcgacagcgggctgaccgccgccgctcgcgatcgtctgcagctgcagtttatgccggaagcgattatccgcagcgttgagcgcagcgggaaaccgcaaacccggatgacggtacgcgcgccgcacgatggttatgtcagcaagctggatgtgcgcaccggcgcgcaggtcaccccagcccagccgctgttcgagctggcccgtctcgacccggtatgggtcgtgattgattatccgcaaagccaggccagcctgctgcgcgtgggtagccgggtgacggcgaccaccggcagttggcccgggagcgtttttcagggctccgtgcgcgagctacttcccgatctggaagcgaccacccgcacgttaaaggcccgggtagttttgaacaatccgcagcatcagctcaaacccggtatgtacctgaacgttcagctggccgaggcgcatcaggcgcgcgccgttctgaccatccctgaagaggcattgattgccacgggtagcagcaatcgggtgttaattgccgatggcgaggggcatttccgtccggtcgaagcgatcgtcgggcgcacgcaaaatggtctggtcgagataaaatccggcctcaaagagggccagaaggtggtcacctccggacagttcctgattgactccgaagcgagcctgcgcagcgcgctgccgcaaatggccggggaggatccgcaggaaaaaagctataccacgcagggggtcatcaaagctgtaaccgatggggcggtgaccatcgctcaccagccggtgccggcgctgaagtggccggcgatgatcatggattttgccattacgccgcagcagcagggacagatgcgccccggcgagtcggttatgtttagcttcgtcctgaccgacgatggagcgcgagtcacctcgatgatgccgatgaacggcgctaaggagcagccatga

SEQ ID NO: 172026 - DNA, 3114 bp, Klebsiella oxytoca
atgattgccgccgttatccgctggtcgttacgcaaccgtctgctggtactgcttgcgtcgctgattatggccgcctggggcgtctggtcgatacagcaggcgccgctggatgcgctaccggatctctccgatacccaggtgattattcgcgtaagctatccgggaaaagcgccgcaaattgtcgaagatcaggtgacctatccgctgaccaccaccatgctgtcggtgccgggggcgaaaaccgtgcgcggtttttccatgttcggcgatgcttacgtttacgtactgtttgatgatggcaccgatccgtactgggcgcgctcccgcgtgctggagtacctgagccagatccagagcagcctgccgccggaagcgaaagcttcgctggggccggatgctaccggcgttggctgggtgtttgaatatgtgcttaccgataaaagcggtcagcatagcctcggggatttgcgggcgattcaggactggatcctgaaatatgaactgaaaaccgtgccggacgtatcggaggtcgccagcgtcggcggaatggtcaaagagtatcaggtgatccttaatcctgaccgcctgcgggccctgaacgttacccacgaacaggttatcagcgcgattcagagcgccaaccaggagggcggcggctcggtactggaactgggtgaagctgaatatatggtgcgcaccaccggctatctgaagtccatcgacgactttaagcaggtcgttatcgctgcgcgtgacggcgtgccggtgctgctgtccgacgttgccagcgtgcgccgggggccggcgatccggcgcggcgtcgccgagctcaacggtgaaggcgaagtggccgggggaatcatcattatgcgttcgggcaaaaatgccctgaccaccattaatgcggtgaaggcgaaactggctgaggtgcaaaaaagcctgcccgcaggagtagaaatagtgccggtttatgaccgttcgcagctgattaaaaattcagtcgaaaccctgacccacaagcttatcgaagagtttatcgttgtggcggtggtctgctcgctgtttctgttccatttccgcagcgcgctggtggcgatgatcacgctgccgctggggatcctcggcgcatttatcgtgatgcactatcagggcgtcagcgccaatatgatgtcgcttggcggaattgcgatcgccatcggagccatggtcgatgcggcaatcgtaatgattgaaaatatgcataaggtgctggagcagtggcggtatgagcatcctgagcgccagccgtcttccgccgactactggcaaattgccctacatgcggcatcggaggtggggcccgcgctgttttgcagcctgctgatcattaccctgtcgtttattccggtattcaccctcgaggcgcaggagggcaagatgttctcgccgttggctttcaccaaaacctggtcgatggcggtggccgccgggcttgggatcaccctggttccggtgctgatgggctactttattcgcggcaaaatccctgatgaggccgctaatccgctcaaccgctggttgatacgcgcctatgagccgctgctggataaggtcttgcagtggccgaaggcaacgctggcggcggcgggcctgctgctggtcgccacgctatggccgctggcgcagctcggcagcgaattcctgccgcaaatcgacgagggcgacctgctgtacatgccatccacgctgccggggatctccagccgcgaagccgcccgcctgctgcagcagaccgaccgtcttatcaagacgattcctgaagtacaaagcgtgttcggcaaggccggtcgggcggagagcgccaccgatccggcgccgctgaccatgctggaaaccaccattcagttcaagccgaaaagcgaatggcggcccggtatgaccatggataagctgatcggcgaactggacagtgcggtaaaagtgccgggcatcgccaacgtctgggtaccgccgattcgcaatcgcctggatatgctggcgaccggcattaaaagcccggtcggcatcaaagtgaacggcaacaatctggcggagatcgaaaaaaccgctgaggagattgagcgcatcgtgcgtcatgtcccgggtgtgacctcggcgctggcggagcgccttgacggcggtcgctatatcgatatcgctatcgatcgtctgaaagccgcccgctacggcgtgtcggtgaaggagctgcagtcggtcgtcgccagcgtggtgggcggcgataacattggcgagactatcgaggggcgtgaacgctatccgataaacgtgcgctatccgcgcgaaatgcgcgactcgctgcagaagctgcgcgatctgccggtggtaaccagcagcggggcgcaggtgacgctcgccgagctggcggatattgctatcaccgatggcccgccgatgctaaaaagcgaaaacgcccgtctgtcggactggatctacgtcgatattcgcgggcgcgatctgaaatccgcggttgatgaaatgcagcgcgaggtcagcaaacaggtcaggctgccgaatggcatctcgctgacgtggtccgggcagtacgagtatctggaacgcgctaccgcgaagctcaaaatcgtgctgccgtttactctgatgattatctttatcctgctttacgtcaccttcggtcgcgttaaagatgcgctgttgattatgggcacgttgccgttttcgctgatcggcggcgtctggttgctctggctgctgggctataacctgtcggtggccgccgccgttggctttattgcgcttgccggcgtggccgcggagttcggggtaattatggtgctctatttaaaccaggcgctcgcgaagcggcgcggtgagcttaatgaccggacgctcaacgaagcgatacatgaaggagccgtgctgcgcgtgcgcccgaaagtaatgaccgtcgcgacgattatggccgggctgctgccgattatgtggggtggcggtacaggttcagaagtgatgcagcgtattgccgcgccgatgatcggcgggatgatcaccgcgccgctgctgtcgatgctggtgatcccggcggtctatcttctgacgcaccgcaacaaaccctaa

SEQ ID NO: 172027 - DNA, 330 bp, Klebsiella oxytoca
atgcccggccgcaacctgattctggcgggaataaaagacatgcaccaaagttttaatcagcgcgttcatttctattactgcattctggtggcgctgaaaatacacgcaaaatcgaagaaatcgggcggtatccgcgggaaaaataatttcctgctcaagtggctacgcaaagcgcaggacaacaatatctttcacccggagattaccagtgagatcgaatggctgcggagcaaaatcattcaggccggctacgataccgacctcgagccgatgctggactttgtctacgccaccgccaaacgcgcgtccgatctcaaaaacgccgactga

SEQ ID NO: 172028 - DNA, 1191 bp, Klebsiella oxytoca
atggccacatccgtcagcaccacccagcttaatctgcgtattatttctatcgttgtctttacctgtatctgctatctctccatcggtttgccgctcgccgtgctgcccggctatatccattatcagcttggctatagcacctttatcgccggcgtggttatcagcctccagtacatttcaaccttgctcagccgcccgcatgctggccgctataccgatatctgggggccgaaaaaagtcgtcagcctggggattatttgctgtctgctcagcgggctcttcaccctgctcgcggtcttgctgcaatctgcgccgccgctggcggttgccgcgctgttggtggggcgaattttcctcggcgtcggggaaagcttcactgccaccggcgcgaccctgtgggggatcaaaaccgtgggcgcgatccacacgtcgcgcgtgatctcctggaacggcgtggcaacctacgtggcgatggcggttggcgccccgctgggcgtcatgctcaacggctattttggcatcagcggatttgccgccgttgtggtgctggctgcggcggttggcctgctctatgcccgtacgcgccaggacgtcagcgtgtcggcgggaatccgggcgccgtttcacgtggtggtacgcaaaatctggccctatgggatggggctggcgctgggtaccgtcggttttggggttatcgcgacctttattaccctctacttttcggctcatggctggcaaggcgcggcgtttaccctgtcgctattcagcatcggttttatctgcattcgcctgattttaggtaacaccattacccgctacggcggcgtgccggtatcgttaatctgttttgcgatcgaatgtctcggcctgctgatcatctggtatgcctcctcggcatggatagcgggtattggcgcctttctcaccggctcgggcttttcgctgatcttcccggcgcttggcgtggaagcggtaaaacaggttgaagagcagaatcagggcaccgcgctgggcacctattcggcttttctcgatctggcgctgggattaaccggaccgctagccggctgggtggcaggctactacgagctggagactatttatttgttggccgcagcggtggtcgcgctggcatttatcctggttttgcgcatttacctgcaacaacgcgctgctctgccgcgaacctga

SEQ ID NO: 172029 - DNA, 447 bp, Klebsiella oxytoca
atggaatacgatttagacggtatggatgttctttttgtcgcgggctttggaccgatcacccaatcaacgccagccagcagggaattttatgtggcggcgctgggcctgccgctcaaaccgatgcccggcaacgaagagtatttgctgaccgaacagcatgccctcgatggggtaaaacattttgcgctgtggccgctggctcaggcggcgcgctcctgttttgactcggatctctggccggactatctgccggtgccgcaggcgtgggtggagtttgaagtgcgcgatatcgataccgccaccgacgcgctgaaggccagaggctatcgtctgctggtggataatcgcgtggagccctggggacagaccgtcacgcggttgctgagcccggaagggctgctggcagggattaccgtaaccccgtggctgcgcgagggcaaagcatga

SEQ ID NO: 172030 - DNA, 219 bp, Klebsiella oxytoca
atgttgatttatgacgtattcggacgccacattggcgtccagcgtcggcacgggcgatggttactcttccgcgtcgatctcaacgaacggaaatattcgccgctgcatggggtcatcatcccggatgacctcacggaagcagaaattcccggctggctgggcgatatttttcatgaagccgcaagcccgcgccatcctgacgtccggctgatggagtag

SEQ ID NO: 172031 - DNA, 390 bp, Klebsiella oxytoca
atgactcttaacgctatgcgcatcgcccggccggtcaccgacctttctttgagcagcagcatgtactgcacgggccttgggctggagcagatcgcacagtttgccgatcacgctggcttcagcggtgtcatgatcggacgcggcgatctcggctggcatcttgagttcaccctctgccaccatcacccggtgaagccctccccgagcgaggaagatttgctggtgctctattatccacacaccgccgaatggcaggaacggtgcgagagaatgctgaccgccggctttacaccggtcagcgcgtttaatccgtactggaatgtgcacggcaaaacctttgtcgaccgcgacggttaccgggtggtgctgcaaaacagaagctggcggtag

SEQ ID NO: 172032 - DNA, 552 bp, Klebsiella oxytoca
atgaacattaaacgcgtaattctttccgctgcaatttcttctgcattaatgtctggcagtgttatggcggctgagaccggtaccgtgagtttcagcggcctgattaccggtgccacctgtgatgtcaacatcggtggtgcaggcgcaaacgcggccgtagtgctgccaaccgtcagcgcgaatacacttgatggcgcgactaaaacaaatggtaaaactcgtttcagtcttgaattgagcggttgtaccggtgcattaactcaggcgaaagccttctttgaaggtggtaatacagtaaataacgcgaccggacgtctgataaatacagagacgtccggtgcagagaatgtttctctacaattacgcgatggtcagaacaatagcgttattaatgttggcgatgctgcacaatttgattccgcagctattggttatgttgatatatcttccggtacggcttcacttccgtactatgttgagtattacgctgaaggcgccgtcgtagccggtactgtcgcttcccaggtggcctatagcctcatctataagtaa

SEQ ID NO: 172033 - DNA, 714 bp, Klebsiella oxytoca
atggatgtaaggaaaactattttcttgcctgctgcgctgagttgtctgatgagtgcgctgtgtacttttccggttcaggctggcgtggtaattaatggtacacgggttatctatcccggcgatgaaaaagaaattaccgttcaggttagtaataatgggcagcgtccggtattggtgcaaagctggctggataccggcgatagtgtggctacacctgatactatcaccaccccctttattctgacgccgccgatcaatcgtcttgactctggcaaggcccaggccttgcgcattagcagcctgacaacctcagcgctgccgcaggatcgtgaatccctgtactggctcaacgtgctggaaatccccgggcgccccggtagcgagatcaaaaatgaaaactatctgcagctggcggtgcgttcacgaattaaattcttctggcgtcccgcttcgctgaaagagggcgcagcgagagcgccgcaggcgctgagctgggccgccacggaacaggggctgaaagccatcaatccaacgccctattttatttccctcgccaccctcaccgtggcaggaaaaactgcggatgtggatatggtggacccgttcagcgatcgtatttttccccacgtgaaggcctcacgaggaagccaggtacaggctgaatggattgatgattacggcgccattcgttcgcagaattttaccgttaagtag

SEQ ID NO: 172034 - DNA, 2493 bp, Klebsiella oxytoca
atgcagggaatcgcactccccggtaaagcggcgctgctgtccgtttccgtattatctgcccttgcgctaaacgtcagggctaaagaaaacgctgagattcattttgatccttcattcctgagactgggcaccggtccagcgccggatttatcgcgttttagccatggcgcgagcctgtctgagggaacgcatcggctgcggatatggtttaacgaaaagccggtagtgaatcaggatgtccgttacgtcgcagaaggacatggtaccacgccctgcctgacgcctgagctgattacgcagcttccgcttcgccacgagatgctgcccgatagcgcctgggccagcgctgctgatgtctgtacagacctgacggcgctgattcctggggcgacggtaatgactgacagtaatgcgcaaacgctcaatattcaggtgccgcaggtctggcaacagcgcagcgcgcgcgacgcggtaccgcccgcattgtgggatagcggtattcccgccgcgctattgggctacaaccttagcgcatatagcagtgagaacaacggctataaccatgacagcctttatgccagtctcaacggcggcatcaacattggtagctggtacctgcgccataacggcaactggagccgggataatcacgctggcggccattatcaaacacagaatacctatattcagcgggatctccctgctttaaagggccggatttctgtcggccagatcaacacctcggggcagctttttgacacgctgcctctaagcggactaaagctggagagcgatgagcgcatggagccgctctcccgtcgcggctacgcgccggaaattcgcggcattgcccgtacgagcgctcggattgctgtccgccaaagcggtaacctgatttatgaaacaaccgtcagtccgggggcgtttgtcattgatgatctttatcctaccggctatggcggggatcttgacgtcaccgtttacgaagctgacggcagcgaacagcattttcaggtgccattcgcttccgttacgcagctattacgtccgggccagtcccgttatgaactctcaataggtgaactgaactatcgttcgttgcccgccgacccttcactctggcagatgacctggcagcagggcgtgaccaactggctaacggtttacggcggaatgcaggccagcgagcgttaccgggcgggtcagggcggtatcggcattgcgacccccataggtgcagtgagcgcagatgccaccctcgctcgtacggaattgggtaagcggggccaggatgacgaaatacgcagcggcgagagctaccggctcagctatagcaaaaatatcaccgaaacggccagtcatttttccctggccgcctaccggttttcgaccagcggatatatggactatttgaccgccatgcagacgcgtgaagcgattttccaggggaaccatgccgatagtatacggcgtaataaaagccgctatacgcttacggcaagccagggattgccgggtgggtgggggcagttttacctgagttcatcggtgcagaactactggaacgccaaaggtgtagacaagcaatatcagtttggctacagcaacaattatggccgattcagctacggggttaacgccggacgcagctggagcgcctacggacgttcccaggacacgctttccgtgaatctcagtttcacgccaggcagtagccgacaggccgtaacggggcgccttagctatgaccatactcgtcacggtgagcagagtctgcgaaccggtataaatggctcttttggcgaagatagccgcttcagctacggcctgtctggcacgacgagcagtcagggtaacggcagcagcgcggcggcgagcgcgcagtacctggccaatttcgcttcgctaaatgcggcgttcggcagcggtcgacattaccgcagcgtttcgggcggcgtaagcgggaccgtgataggccacagcggcggtctgacgctgagcccctttcagggagacaccttcgcgctggtagaggctaaaggcgctgagggcgctggcgtcaatggctatagcggtatccaggttgacaaacggggctatgcagcggtgccgtatctcagtccgtatcagctgaacgatatccatcttgacccgaaaggaacaactcggggcgtagagctggataacacatcgcaaagagttgccccgcgtgatggcgcggtagtgaagatcagctatcaggcccgtcagggatatccgctattaattaccgtgacaggtgccgcccatccactgcctttcggaacggaagttcatgacgcttcgggacgtacggtgggttatgtaggtcagggcgggcaaatctacgcgcgggtcgagcaggtccgcggggtgttaacggttcgtgctggcgaacaatcttgccgcctggcttatgttctgagcaacggacaagcggagacactggaacagctctctctacgttgtgaatag

SEQ ID NO: 172035 - DNA, 1059 bp, Klebsiella oxytoca
atgattatgagcaaaattatcaaaaaaaattgcctcccggcaggggcgttctcggtattggtcgtcttattttttgtcaccaccaatgctaaagcagcctgcactataaccagtacgccagcaccagctgcgctgcaaacgtattcgttgccaattaatcggatctctcctaatgtacataacaataatgttttattgagtgtgcggaaatattttgatgccgcagcggtacgttgcgctacgggcacgatttactgggtccataaaatagaaaatacctccggtactaccggcgtatttgttaatggttcgccggtgtataaaactaatattaacggcctgggggtatattatactcgtagtaattcaagcggcatggaggtaggctcaactggcgcagatattgtcctggtgcctgaagttaacatgaacctaattaagttaaataactctacgattagcggcgtcttagatgcctcgacgctgccggtggtgagtttctacgcaacagaatccagcagcggtgcattcaacagcagcgcggtgcaaattactaaaatggctttcagaggcactgtaagttatgttgtacccagctgtagtgctcaggataaagatatctggttgggagaatataccaccggcgatttcaccggtaactcaacgacgccgtgggtggatgccagtattttactgacctgtgatgcgacttttcgcaatgcttacaacaatgttgcggattcttatataacgggcaatatcactacgaccaccagacctgataattattattccgtatctctggagtccgttaatggttttgttgacagctcgcgaggcatcatggcgctggacagcggtggcgccaccggtcttggcgtacagatatcccgtacccggtcggaacaggcatggtcctctctggcatggactggggaaaataaagccggagccaatacgattaacattccgctctatgctcgttatatccagactgatagcaatgttagtgccgggcaggcgaacagtaaacttctgtataccgttcagtataaataa

SEQ ID NO: 172036 - DNA, 522 bp, Klebsiella oxytoca
atgcagcaagaaaggcaagtgagtccgctggcgctgaacggccttaaagctttggaacgagaacttgataaatattatcgcggtagatcttttatctatctgccagcaatgcatttgcagtcaggatgctattgccatttaacccgcaaatatatcgttgtaggcgtctcgcctccggcggagaatatgtttctcaaacgccatattagccttaaggattctctgacaactatcattaagaaacttaatttatatcgcgagtatcgctctcaagacaggtgtgaattttgctactttcttaataatttaaaagaagatgagcgaaggattttcagtatgttatgtaaaacaagcaattatcgaatggctgcaaatgaacttaacattaatgaaaagaatctgcggcgaaaagtttatacttttacgcaaaagatgagtattccaaatcggcgttggtttctctggtggattacctatatgagcaggcgccgcccccatttttttaacgtaagcgcggattag

SEQ ID NO: 172037 - DNA, 621 bp, Klebsiella oxytoca
atgtccgttgcagattccctgtttgcttactcttttgctgccctgttgctcacccttaccccaggcctggataccgcgctaattttacgaaccgcgaccgttgagggcggaaaaaaagcctttcaggcggcgttgggtattgatacgggatgttttatctggggagctgcagtcgccttcggtctcggggcgctgctggcggcatcggaactggcgtatgacctgctcaaatggtgcggggccgtctatttatgctggctgggcattcagttaattctcaagccgcgtcgtcatttggttcatcaggacagggcggcggccccggcaagtaactggtttgtaaaagggatgatggggaatgtgctcaatccgaaaatggggatcttttacgtctctttcctgccgcagtttattccggcagggcactcgcccatcgcctggacgttcctgctggtcgccattcatgtggcgatcggcacaatctggtcattaacgctgattgtgaccagccgctctgccgctcggctattaaaaacgccgctgttcattcggtggatggatcgcgcgaccggcggcctctttgtgctgtttgctgccaggctggcttttagccaccgctaa

SEQ ID NO: 172038 - DNA, 1188 bp, Klebsiella oxytoca
gtgaacgtttttcaactcaggccggagtggaaggcctttctgctggcgctggccggatcggtggtactgatcgtcggtatgggctatggccggtttgcctataccgggatcctgccgctgatgcttaatgaacaggtactgacgctacgcgaaggtaatctcgccgcttcggcaaactatgccggttatctggcgggggcgctgctgctggcgaaagccagacccacggacgccagatggctgagcctgctttccgcgctattgacgctactgtgcctggctttactggcggttttagtttctccgctggcgattatcgcggttcgcggtattgccggattattaagcgcggtgacgctgattgccgcctcactctggctgctccagcatatgaagcacccaaacggtgcgccggtgcttttttcgggcgtcggaatgggcatatttttgtcggcggaatttatctccctggggaaggcgctggcgctctccagccagcagatctggctgatgtgcgcgctaagcgccggcgtgctttttatcctcgcgctgcgtctattgctgagccccgcagactaccttatcgcttatcaacccgcagcaaccgcacagcatgagcaggccgaggggccggtgcgcgaggcatggaaactgctgctgatttatggcctggccggcttcggctacattattaccgccacctatctcccgctgtttctcagcggttcgctgaacgctatcgatccggtgcagatctgggccatcttcggtcttgccgccgtcccctcctgttttctctggcatcggctggtcatcaggcttggctaccgccgcgcgtttacccttaatttgctgatccaggccgttggcgtgatccttccggcgtggagccatacgttgccgttttgcatattgagcgcgctgctggtggggtgcacctttttgggcaccgtgaccatcgcgctgtcccaggggcggcggctgaatcatctggtttcgttcaatatgattgccgctatgaccgcaacctacggcatcgggcaaattgtcggcccgctggttgccggggcgctgtatgaccgcagcgggtcgtttaatccttcgctcagcgcggcggctatagcgctgctggctgccgctgcgctggtggcagcgggggcgcggcgagcgtcaaaggtcggaagctga

SEQ ID NO: 172039 - DNA, 837 bp, Klebsiella oxytoca
atgaaccacaccacattagagatttttaaaacggtggcggaagagcgcagcgtgactcgcgcggcaaaactgttgggacgggcgcagtccaatatcaccacacgcattcaccagctggaagaggagctgggcgttgagctgtttgctcgcggcaataaaaggatgcttctgtcccccgccggcgagcattttttgggctacgcgctgagaatcctcagcctggccgaggaggccagacaggcgctgcacccggcgacgccgggcggtaatctgcgcatgggggcgatggacgccaccgccgcaagccgcctgccgcagctgcttccccgctttcatgctcagtgcccggaggtcaaactgacccttaagacccagccaacccggcaacttgctcaacaagtcctggacgccgagctcgattgcgcgctggtgagtctgccgcagggagcgcctccgcctgacgacctggaatttgtcccgatctttcaagaacagttgatgctggtgcttcaggctcacccgcaaccttttcgttttgccgcctttgcggagggttgtacctaccgggcgatgggggaagcgtttctggcgcaatcagaggaggcggagatcgagatccaggatgtcggctcctaccacgcgatgctcgcctgcgttgcctccggcggctatgccggcatcgtgccgcagagcgtgcttgagaccctgacgctgcccgaagccagccagctgcaaccggttggccaggcgatcacccagcttatctggcgcaaaggctacgcctccccggcctttgagaagatgcgccagctccttgaatcagcttccgacctttga

SEQ ID NO: 172040 - DNA, 1047 bp, Klebsiella oxytoca
atgaaaaaccggctgacgcagcagcttgctattgattatcccattattcaggcgccgatggctggcgtgtcgacgccggaactggcggcagcggtcagcggcgccggcgcgctcggctcgctggggctggggtcgtcaaccatagagcaggctgaggcgctgattaaccagacccgtcgcttaaccagccgtccgtttaacgtcaacctgttttgccacgcaccagcggtaagggatcggcagcgtgaagccgggtggctggctcggctgcgcccggaatttgcccgcttcgccagccatccgccggagacgctggcggaaatctacctcagttttaatcagcagccgcgaatggccgagctgctgctcgatcttgccccggcggcggtgagcttccattttggcgtgccggatcgtgaaacgcttcgccgactgcgggataagggtatcgttaccctggcgagtgcgaccagcgtggcagaggcgctgctggccgaggcgcagggagtcgatatagtggttgcccagggctacgaggctggcggccatcgcggcatctttgaccccctggggccagacggacggatgagcacctttaccctgattcaggcgatgagacggcatactgatctaccgattattgcggcaggcggcatcatggacggcgcaggaatcaactgcgtaatgaacctgggcgcagacggcgcgcagctgggaacggcgtttctgctctgcccggaatcgtccacggatgccggctatcgtgaggccatcaaaggcgcgcctgatgggcaaacggttttaacctcggcgatctctggacgtccggcaagatgtctggttaacggctggcgtgaaataaacgatccgcatctcgttccggcttatcccgtagcttatgatgccggtaaagcgctggcatcggcggcaaaagcgcagggaaatcgtcaattcggcgcccactgggccggacagggcgttagcctgattcgcgagctgccggcagcggagctgatacgaaagctggtgagcgaaagcgggttttaa

SEQ ID NO: 172041 - DNA, 672 bp, Klebsiella oxytoca
atgcggagtagcatgagttgggaagatctctggccgctgttgtttcagggcacggtggataccgtttatatggtcggcctggcggcgctgtttaccgtgctgctcgggctgccaaccggcgtgctgctgtttgtttcacgccgcaacgggctggcgccgatgccgaagctcaacgccatcctgggcgcgattatcaactttggtcgttcgctgccgtttatcgtgctgctgatcgcgctgattccgttcacccggttgattatcggcaccaccctcggcagtaccgccgcggtggttccggtcaccattggcgcctttccgttctttgcgcggctgactgaaaatgcgctggatgaagtggactacgggcgtatcgaggcgattttatcgatgggcggcaatatctggcacgtcatctttaaatcgctgctgccggaagcgctgccgaccctgctggcaggcatcacgctgaccatcgtcatgctgatcggcttctcttcgatggcgggcgtgattggcggcggcggactgggcgatctggctatccgttacggctatcagcgctttaataacgaggtgatggtcggcacggtgctcattctggtcgcgctggtacagggggtgcagatggccggcgaccgtctggttcgcggcctcgcccaccgccgttaa

SEQ ID NO: 172042 - DNA, 792 bp, Klebsiella oxytoca
atgattgagattgtcgggctgagtaaaacctatgccggaacaggccgaccggcgctaaacgatgtctctctgcatgtgccgggcggtgccgtttacggcatccttggccgcagcggtgcgggcaaaagtacgctgatacgctgcctgaatttgctggagcggcccacggcgggccgcattattgtgaacgggaatgatattacccggatggataaaagcgcgctgcgcgaataccggctgcgcaccggcatgatcttccagcactttaatttacttcacgcccgcagcgtcgctgacaacgtcgcggtgccgctggagatagccaaagtgccgaaagcggcccgccaggctcgcgtggcggaactgctggagctggtcgggctggcggataaagccgccgccttcccgtctcagctttccggcgggcaaaagcagcgcgtggggatcgcccgcgcgctggccgcacggccggatgtgctgctgtgcgatgaggccaccagcgcccttgaccccgagaccacggcctcggtgctcaacctgctggcggacatcaatcagaagctgaacctcaccatcgtgctgatcacccacgagctggaagtggtgaaaaccctctgcgaccacgcggcgctgctggagcacggtgagattattgaaagcggcagaattgccgatttgctggtggcgccatggtcgcggctaaggcagtcgctgctgcacgacccgcaggcggagcgggacttcctcgctcgccacggtttacacgggaggcccttatgcggagtagcatga

SEQ ID NO: 172043 - DNA, 810 bp, Klebsiella oxytoca
atgatgaaatatgccgcatttaaactggcaggggttgcactgtctctctctctggcctggacttccgctcaggccgccgcgctgcgcgtcgccgccgacccggtgccgcacgccgaaattcttaactatactaaaaagatcgatcccagcctcgacctgaaaatcgtcgaactcaccagcggtgtaaacgccaacgagctgttggctaacggcgacgtcgacgccaactacttccagcacgtcccctatctgaaagatcaggaaaaagcgctgggcaaaaccttcgccgtcgcggcgaccgtccatattgagccgctggggatctattcgcgcaagcataaagattttaaatcgctgcccgagaacgccaccgtggcggtaccgaataacaccactaacctgagccgcgcgctattcctgctgcaaaatcagggtttgattaagctggcggcaaaattcaccgacccggcgaccaccctggcaacgccgaaagatatcgtggaaaacccgaagcacctgaaaatccttgagattgaatccccgcagatcccgcggtcgctggatgacgttgacctggcggtgataaacggcaactacgcgctggaagccgggctggtaccggccaaagatgcgctgggtctggagagcgccaccaacaacccgtacgctaatattctggtgacaacgccggcgctggcgaacgatccgcgcatcaaggcgctggccaaagacctcacctcgccgcaggtcgctgaatttattcgtaagcattataacggctcggtgatcccggttgcccctcagtcatga

SEQ ID NO: 172044 - DNA, 1029 bp, Klebsiella oxytoca
atgaacgcgacaaccttaccgatactggatcttgcccgctacgcggaccccgctgaaaaagcggcgtttctcgccgacctgcgccacgccgcccgcgatatcggcttcttttatctgatcaaccacggcgttgatgagtcgctgcagcaggccgtgcagcagcaatcccgcgccttttttgccctgcccgacgatcaaaagcagagggtggcaatgattcactctccgcattttcgcggctacaaccgcgccgcttctgaattaacccgcggtcaacccgactggcgcgagcagttcgatatcggcgccgagcgcccggccctgcagcttagcgaacgcgccccgcgctggcagcgtctgcaggggccgaatctctggccagaggcgttgccctcgctcaaacccacattactgacctggcaacgggaaatgacccaggttgggatcaccctgctgcgcgccttcgccgaagcgctgcgcctgccgcaggatgccttcgatggcctgtatggtgataagcccaatgaacatatcaagctgatccgctatcccggccagcaggagacccagagcgcccagggcgttggcgcgcataaggactccggctttctcagcttcctgctgcaggatgagcagaaaggattgcaggtcgaagtctctcctgaccgctggattgacgcgaccccgctggcgggcagctttgtggtgaatatcggcgagctgctggagctggcgaccaacggctatctgcgggcaacggtgcaccgggtcgtttcgccgcccgccgaccagcagcggctgtcgatcgctttcttcctcggtgcccagctggatgccgtggtccctgtctacaccctgcccgatgagctggcccgcgaagccctcggaccggatagcgacccgcaaaacccgctgctgcgcgaggtgggctggaattacctgaaagggcgtctgcgctcgcatcctgatgtcgccgagcgctactaccaggatgtttttcgcgaacgcgccgagcaattgatcgtttaa

SEQ ID NO: 172045 - DNA, 276 bp, Klebsiella oxytoca
atgcagcatccaaacgatcctctgcacggcatcacgctggaggcgctgttaaacgcgctggtcgcgcaatatggctgggccgaactggcgaaacgcatcaacattaactgctttaaaagcgatccgagcattaaatcgagtctgaagtttttacgccgtacgccgtgggcgcgcaaagaagtggaagcgctgtatatcgattcgctgtccgataccgatacggcaaaagcggaagcgccggcggataatccgtgggcacactggcagaaaaagtaa

SEQ ID NO: 172046 - DNA, 189 bp, Klebsiella oxytoca
atgaaaaatatcggcgtagtcaccgcactgctgttagccgctaccctttcgtccggcgcgatggccgcagagaatagctttgcgcgcccggaggcaggttcaaatatcgatacatctgtgcagcagaatcatattgatgtcagccatgcctttgataaagagagcctgaccgcaggcaatcttcagtaa

SEQ ID NO: 172047 - DNA, 210 bp, Klebsiella oxytoca
atgaaatccatcaaaactttcgttgcagttgccgcactctctatgatctctttcggtacttttgcgcagagcattagcgccagcgcttccacactggaccgcgcagaagccaaaattgccgctcaggccgcagagcaaggcgcgtcttacaaaatcaccagcgctcagttcaataaccgcgtgcatatgaccgctgagctgacgaaataa

SEQ ID NO: 172048 - DNA, 741 bp, Klebsiella oxytoca
atgataacgctcaataagatcagtaaaagcttctccggtgaaagagtgctaaaagaggtatccctcagcattcattccggcgagattatttgcattattggccccagcggctcagggaaaaccacgctattacgtacacttaatttcttagagcctgccgatagcgggcaaataagaatagatgacgtggcgctggattgcgcaaaagcgggaaaaaaggagattgaaaaactacgctcaaaaaccgctatggtttttcaatcgtggaatctttttcataatctcaccgcactgcaaaatattaccgaaggcctgatatacgctaaaaagcgcccgcggcaggaggcgctggctattgctgaacgactcttaaagcaggtggggttactgcataaaaaagaccactatccgcacagtctctccggcggccaaaagcagcgtatcggtattgcgcgggcgctggcgattaaccccgccgttctgctgctggatgagccgacctccgcgctggatccggaaaaagtcggtgaagtgctggagcttattcagaccattgccgccgcgggccagacgatgatcatcgtgacccacgaaatggcgttcgcccgtcaggtcgcttccagggtggtatttatggaaaacggtgaaatcgttgaacagggcccggcggaacagatatttggcgcagcgcagcagggccgaacccgggcgtttcttgcgcaactgcactatcatgcctga

SEQ ID NO: 172049 - DNA, 699 bp, Klebsiella oxytoca
atgaacaataacccgctgtttagctggcaggatatcgccggaatagtgccgaaactgctggaaaatttacccgtgactctcggcataacgctggcgtcgctgctgcttggtttgacgatcgcgctgctgattgtgctgctgcagtttagccgctttaagccgctcagcgcggcggcaaaggggtataccgacattctgcgcggcgcgcctctggcgctgctgatcctgctgtttttcttcggcggcaaattaattttgaccgcgctggcgctgccgccgctgtggattagcgataccacctttgcggtgctgtctatctcggtcagcatcagtccctactttgcagaaatgatgcgttcagcgtggcgcgcggtggatagcggccagaaagaggccattatcagcctgaatattccctggcatcagggaatacgacggattattttcccgcaggggattattattgctattcccgtctttggcaatcttttaattaatcttgtgaaaatgacctcgctggtcaatattattggcattgtggatatttttggtcgtgcacaaaagatttcgcaaaatagctacggggctaaacaagtcgcggcatttattagcgttattatcgtctactgggtgctgaatagtattattctctattttaccactcgtattgaaaagaaatatcagttcctgctggagtga

SEQ ID NO: 172050 - DNA, 753 bp, Klebsiella oxytoca
atgtttagcctggcgttcattcgggacaattttacgtttattttaagcgcgctgccggtcaccctgacgataacgttattatccttactgttttccactttgctgggcgcagcgctggcgtggacgattattcgtcaggtacccggcgttcaatggctggcgaaggttttcctctcctttggccgttcggtcccggtcctggtgatgctgtatttctttttttacgtctggccgtggattgccgccgggctgttcggcggcccgcaggacacgatgtaccgctataaactttcgccgctggcggcggcggtcaccgcgttatcgctgatcttcagcgcgtatttcgccgaaacctttcgcgcgggatggaacgcggttgataaggggcagcgcgaggctgcatggtcaattgggctgagcgggttcacgcagttccgacgcattatttttccacaggcggcggtatccgcgctgccgaactttaccagcgtgctgatcgatctgattaaagacacttcgctggtttacaccatcaccgttgttgatctgatggcgaaagccaatatcgccgccgcgcgcgggtttcattttgtcgaagcctactgcgtcgtgctggtgatttatatcgtgctgtgcctggcgattgccagagcattgcgcagggcagaaaggtttctgagcgtccgctggcaaggcaacgcagaaaagagtgttccacggttatcattttggggaaggtattttgaaaaataa

SEQ ID NO: 172051 - DNA, 843 bp, Klebsiella oxytoca
ttgaaaaataaaattttactggtgagtgcgctggtgttggcaatgggaatggacgccgcgcaggcggttgaaaaaagcccaaacgcgaaaacggttgaggttgtcgtcaatgctaacggttttccctttagctttgttgacgataacaacaatattaccggttacgatggcgacctgttaaaggtgctggaccagcggttaacggactatacgtttcattttaatgcggtctctcgcgatgcgatgatcgtcggcctatcgactggcgcctataccctcgcggcggatcacttttatctcaccaaagagcgggcggaaaaatacgaccactccggcgagccgaccgggatcagcgatttacgcctgattgtacgtaacgatgagaacgatattcataaccttggcgatctcgccagcggtaagaaaaaactggtgccgattcatacctccgacgcccgttatacggtgattgaaaactacaataaaaaacatccaggccaacaaattaacctgcagcccaacggcgagcagtctgccgccgatatctttaaagcggtagcctccggggaatacgatgcggcgatttatcctattggcgcgctgctggcgttaaataaggcgctaaatcttaatctgaaagcttcggattccgtcggcctgtttcctaacgtctatttgtataaaaaaaataccgatccgcagctaatcaaagcgattgacgcgcagctggttgccctgaaaaaggacggcacgctcgctgacctctcgcggaaatggtacgccgaagatgtatatgccctgccgggcgccagcgacgtgaaagtaaataccgactgggaataa

SEQ ID NO: 172052 - DNA, 540 bp, Klebsiella oxytoca
atgacgcaaataagctcggaaccggcgcataacgccgccaccttaaacgatgaggtgaccctggcgctgcgcgccattactgaaaaacgcgcggcaacgatcggttacctgttggacgaaagccgacagcgcgatatcgcggatgattctgtccgtgaagcaatacgccactatggccgcgatatcgggcataagctgcgcgcgcaaatgcgcgatcgaaaagatttgcaggagtttgccgggctgtttacccgcggtctggaatctcaggtttatgagatggagtccgttagcgccagccgggccgaatttatcgtcctgtttcactactgtccctatgtcaactgctggcggcagcaggggcgaggcgccagcgaaattgagacgctgtgcgatatctgcatggaaggcgatcgtgcgctaaccgacgcgtttccggggctgcatttagaggtgcagaccgcgctggctcgcggcgatgctgcctgtcggctgcgtttttatcaggcagaggagcgggagggcgaatggcaaccttaa

SEQ ID NO: 172053 - DNA, 135 bp, Klebsiella oxytoca
atggcaaccttaacgtggggccacgcggtccagtttgttaatcagccggaagcggcggttcaggtattaagcgggcaaaagctcaacgcgctggccggcgggcgccacccgggttggggacctgaaatgtgctga

SEQ ID NO: 172054 - DNA, 219 bp, Klebsiella oxytoca
gtgctgagctatttcggtctgacctggatcgaatttctggcgattgccgatgatacagagctgctttccgccgcggagacgtttttactctcccgggatgcgtcacgattgctgccggataatgaagcgctgtatcgggtggcgctgcgctccattcgcaggggctggcggtgggcggtcgagagttacttttcctccagggcgcggcgaatcaactga

SEQ ID NO: 172055 - DNA, 789 bp, Klebsiella oxytoca
atggccaggatccattttattggcgccggacagatggcggaggcgattattcgcgcgtcattaagccacggtgcgctgcgggcggacgcgatctcgctcgaggatatcgacagcacgcgagtcgaggctctgcgcgcccgttatcggctgtcgggcgacggtggtgtaaacgaggcctctttgctggtgctggggatccgtccgcaggacgatctggcgggggtggcgaaccgcgtgcgcgcgcagctaaacggctcgacaacggtggtatctctgatcgcgggggtgaccctggaaaagctggcctccctgtttggtgcggcaacgccgattgccagggcgatccccaataccctgaccgataccggatttggctatagcggcgtgaccttaaacgcccacgccagcgcggctgagatcgagccgtttctgcgcggctttggcaaagtgctgtatctgcctgagcggttgatcgatatctttaccggctttggcgtcgcgggacctaactatatttactactttattgagtcccttaccgatgccggcgtactggcgggactgcctcgaccccaggcaacggaggtggtgctggaaaacctgctcggcgcggtcgagatgctgcgccaaagccagaagcatccgcgccagcttctggatatcaacaattcccctgcaggagtcgggatccatggtctgtatgagttgaacaacagcgattttgccgcggggcttcagcgcagcgtacaggcggcggtcaggcgcacccgtgaactgggacagtgctaa

SEQ ID NO: 172056 - DNA, 957 bp, Klebsiella oxytoca
atgactcagcacgccctcgatctcaccagcgaacttctgcgcggcatgcgcctttccggcgtcaactaccgccgcatcgaaacctcgcgcccttttggcgtcgaattcggcttcgtacctggtaaagcgcagttccactttatcagccggggaccggtactgctgcgcatggtcagcggccagcgcctgatgctgcagagcggcgatgcgctgtttattcctaacggcgatggtcacgtgctgctctccgatgaccaggcaacggtggttaacgtgtccagactgcccagcgaaccggtttgcgactcggtaagctgcgtcaaaaacgcctgcaacgacgcgaaaagcgacagcgccattatcttcagcgcctgtatggactttgagctgggcggcatgcagccgttagtcaaagcgatgcccgaagtgatgctggtcagcagcctgctgaccagccgtccggagatcccgccgatgctggcagccatggaacgcgaaagcctcactcgacaggcgggctacgccggtattttggcgcggctggccgatgtggtcgccgcgctgattgtccgcggctgggtggagtgcggctgcggcaacgccaccggttgggtacaggtgctgcgcgatcctaaactggctaaagccatttacgttatgcatcagcagccgggcattaactggaaagtcgaggatctggcccgcgaagcgggaatttcgcgttcggtatttgctgaacgcttcctctccgccaccggcaccacgcccgcccgctatcttaccgagctgcgtatgcgcctcgcggtgcagtacatttctcatgagggtcaggcgctggaaaaagtggccttcaggctggggtacagttctcatgccgccttcagccgcgcctttaaacgcattatcggaaaggcgccgggcgcgctgcgcgatccgtcgcgggaagaaggattttag

SEQ ID NO: 172057 - DNA, 1200 bp, Klebsiella oxytoca
atgagttcctgcattgcagctgaagagagcctggccaacgccaggcccgcgtggcgcgccgtctatgcgctggcgctgggagtatttggcctgattgtcgccgagtttcttcctgccagtttgttgacgccgatggcggcaagcctgggcgttagcgaaggcatggcggggcaggcggtgaccgcgacggcgctggtggcgttagttaccgggctgctgatcaccaccgcgacgcgaaatattgaccgtcgctgggtgctgatgttcttctccgttttgcaaattatctccagcatgatggtggccttcgccggttcgctggagtttttgctgctgggacgcctgctgctggggatcgccatcggcggcttctggtcgatgtcgaccgcgaccaccatgcgtctggttccggcggcgatggtgccgaaagcgctggcgattatcttttccgccgtttccatagcgacggtggttgccgcgccgctgggcagctatttcggcgcgctgatcggctggcgcaacgtatttcttatctgtgcgctgccgagcgtggttgcgctgctctggcagctgtgggttctgccttccatgcggccggagagcgcgggcagctttgtcaccctggtcaaagtgctgcgccgtccgggcatggttggcggaatgctggcgacaatcctgatttttagcggccacttcgccttctttacctatctgcgtccgttcctcgaaaccgtggcgcaggccagcgtcgaaggggtttccctgatcctgctcggttttggcgtggcgaactttatcggcacgtcgattgccggacatctgttggccagaagcctgcgcatgacgctggcgctggtaccgctggcgatgagcgtgctggcgctgatgatggtgacgttcggccacttcgcgctgctggacggtctgctggtggcaatgtggggcttcgcctttggcctggtgccggtgggctggtcgacctggcttgccaccacggtgccggatgaggcggaaagcgcggggggtctgctggtggcttctatccagctggcgattagcgccggtgccgccggcggcggggcggtgttcgatcttaacggcgccagcggggttttcgccggcagcggtttgttgttggtcagcgcgatggtgattgtgctgtttgcggtaagagtaaaaccggtggcgagcgaggagtag

SEQ ID NO: 172058 - DNA, 1458 bp, Klebsiella oxytoca
atgctggattatcgcttaatcaatcaactggatagcgactgtaacggcgcgcacctggtgacctggccgggcagcacgctgttaaaacaggccccgctcaacgacagcactctgctcacagaaatggcggcgcaggccgcccgcggcgaggtggctgacacccgcttcggctgttcgcccttcgcgcgcatcactcttatcccgcaggcgcactggcaggatgcgcttaacgacgggctgagcgaggcgctgcggccgctatgtaaaaagccggtgagcgaatcgcttatccttgattgttcgctgggaaagaccgccggcgcgttaaccaaagcgctgcgcgaactatttaatctcgactggcagcttgctgatttaggtctgcatcagaatacagccgtcaggccacgcctgcgtcagctggtcctctacgccttacctgaacagcggtcgacgctggatgccctcgcccatcgtcaacgggccacggcgcacggtatgctcgccgcgcggcggctggcggatctgccttcggagcagtgtacgccgcagtacgtggtggaagaagcccgtcgtctgtgcgccgatattcctgctctgcgctgcgaagttctcgatgaaaaagcgattgtcgatcaggggctcggcctgctgcatgcggtgggtaaaggttctgaacgcccgccgcgcctgctggcgattcattatgagggcgtcagcgagggcccggttcgctgctacgtcggtaaaggcatcacctttgataccggcgggctgtggctcaaggaaggcgccggaatgtacaccatgaagtacgatatgtgcggtgcagccaacgttctcggcctgatgctgagcatcgccgagctggcgctaccggtgcgggtaatgggggtactggcgctggcggaaaacgcgattggtcccggcgccatgcagccgggcagcgtcgcccgggcctgcaatggcctgacggtagagatcaataataccgatgccgagggccgtctggtgctttccgacgccattgcctgggccagccagcggtatccgcaggcgcgctatattattgatattgcgaccctcaccggcgcggtggtcaaggcgctgggctatgatttgagcggtttgatgacccaaagcgacacgctacgagcggcgttgaccgaggcggggttaaagagcggagatgaggtctggtcactgccgctggatagcaggctgaagaaacagaccgcaagcgcaatcgccgacctgtgcaacacgccgggcaataacgcagcgatcagcgcttcggctgcctggcttttgcagcatttctgtccgccggagatcccgtgggcccatctggacgtcagcggtacagcgctgtggcgagaaggtggtaaaagcgtcgcttccggtcggcctgttccgctgctggtgcagcatctgctcgacgatatcggagagagttaa

SEQ ID NO: 172059 - DNA, 954 bp, Klebsiella oxytoca
atgtggggaatgattgccacctggcgaatggcgctggaaggggtaacggaagccgcgactgcgctggcagccggcgctgataccgccagcgccgtggtcgatgcagtggcggcggtagaagattttccgctctacaaatcggtaggctacggcgggctaccgacggaaaacggcgaggttgagctggatgccgcctttatgcatggcgataccctcgccttcggtgcggtcggcaacctggtggatattgccaacccggtcaaagtggcctacgccctcagccgccagcgctataacagtctgctggttggccagggcgccagagagtgggccatcagtcagggattcgccgccaaatccatgctgaccgagcgggccatgcagcactaccggaaacgctgtcgcgaaacgctggataaaggcctaagcccttacgacggccacgataccgtgggcattatcggcctcgacacacagggctccatgagcgttgccacctcgaccagcggcctgtttatgaaaaagcgcgggcggctcggtgattctccgattatcggctccggtttctactgcgacagcgaaatcggcgccgctacggcgaccggcgtcggtgaagatctgatgaaaggctgtaccagctacgagattgtccggcgaatggctcagggcatgacgccgcaggaggcggcggactcggtagtctgcgagctggaagacaaactgatgtcgcgctttggccgtgcgggcgatctctcggtggtgtgcatgaaccgccgcggcgaattcggcgcggccaccaatataaaaactttctcctttgtcgtcgccaccgcgacgcagccgctcaccgtattctgcgccgaacgcgtgcaggagaaaacccattaccgtccggtggacgacgaatggatgcaggcctatgccgcacgcattcgcgcccccatcgaggagtaa

SEQ ID NO: 172060 - DNA, 1320 bp, Klebsiella oxytoca
atgaacaatgttctgggatttcttgaagcaaaactgatgcctctggcggcgaaaactgcccagcagcgtcatctcggcgctattcgtggcgcctatgtttcattcatgccttttattattgtcggttcaattctgctggtgatctcgtcgtttcctaatcagagctatcagcagtttatggccagcaccttcggcgccagctggagtgcgataattgaaatcccgttcaatgcggtattttccacgatgtcgctgtttatcagcttcctggtggcctaccgcctggcggagcactacggggatgaccgtatctcctgcggcatcctgtcgctggtgggatttttgatcctcaccccctttattaaagtcgctgaaaacggcggtatcacggtgatccccgttgaatggatcggtaccaaaggtttgttcgtcgccatgatcggttcgctgctgtggaccgaactcttctgctggttaaagcgcaagaagctggtgattaagatgcctgacggggttccacccgccgtgcaggagtctttcgccgccctgatcccggccctgctggtgatgattctgatcctggcgattcgcatcgggtttgaacacacgcactacgccactattcaccagttcatttatgaggtcgtcgcctcgccggttcgccattacggtacctcctatttcggcgcactgatgaccgtattcagcatcactattctgtggtccgtcggcatcaactccggttcaatgatcaacggcattattcgtcctttgtggatggaaaatcagaccgataacatcgccgcgattcaggccggcgtgaccccgccgcacattatcaccgagcagttcttcgatatgatctggatgggcggcgcgggcgcaacgctgtcgctggtgatcgccatgctgattttcgcccgcagtaaaaatatgcgcgaggtcgcccgcctcggggccggcgcttccatctttaatatcaacgaacccatcctcttcggcctgccggtgatcatgaacccgatcatgctgatcccctttaacctcgtgccgctggtgctggtcacggtgcagtacgcggcgatgaaaatcggcgcggtggccgtcaccaccggggtgtttattccctggacgctgccgccggtgatcagcgggtttatcgtgaccggacatcttagcggcagcgtaatgcagatcctcaatttgctgattggcgccatgctatacctgcctttcatgcgtatcgtcgataagcagtatcgcgcggcggagacaacctcccgtaccgaaacggacaacacgcttgctaaacaggagtaa

SEQ ID NO: 172061 - DNA, 822 bp, Klebsiella oxytoca
atggaaataaagctgcatgccaacgccaccaccaccccaagaacgcgaaaatatctccaggagtcgacgaaaagcgaccgcgaactggcgcaggaactgggtatatcaatcactacggttcgtcgctggcgcaaccgcagccagatttcagataatcacaccacgccacatctgatacacaaagtgttgagacaagagcaggaggcgctgattaacgccctgcgcgatatactgcgtgcgccgctggacgagctgctgtttatggtgaatgaagggctgggtatcaccctttcacgggccacgctaaaccgctatcttcgtccggcccatgaagggcgaaaaaacgccgcgccgcagggaaagaaagcgttaaaagcgggaatgaggccggatactctgacgctgcattaccggcagctcgcgctgtcgatggacgatggcggcgagcatcatctgctgtgggcgcaggagccgatcagcggctggtgctttggtcgtatctattccggcatttcgcccgcgctggtggatagctggctgaaccaggcgctggaagcctgtccggcgcagatacaatgtcttgagacttatgctcataagggcttcgaaccgatacgcgcggatttatcatgcacaacggtgatcgcggaggagcgcggggcgttacagcttagcgaacgattggccaatattatcccggcgctggatgagcctgacgcaacgctgcagcggctgtgcacgctgtggaaccagggacgggcgcaaaagaaactgggtgacaatacgccgcagggctttcttgcctcgctcaatcagatctaa

SEQ ID NO: 172062 - DNA, 330 bp, Klebsiella oxytoca
atgaaaacggtagagtttttgctttatacccttaaacccggtaccgggaatgattttcaccgcataatgcaggagcaaagcgccccccgccatcgcgccgccgggatggatatcgtctcctttggcaattcggtggaagacaacgacgcttattacctgattcgggcttatgacgacctggcgcatttaaacgcttcccaggagcgcttttacagtagccccgcgtggcgcgaaggcccacgtcaggccatcatcgacatgattgccgtaagcgtaaaatcggttatggttctaagcgccagcgcggttgatggcctgcgaaacggctga

SEQ ID NO: 172063 - DNA, 810 bp, Klebsiella oxytoca
atggagaggcgtttgacaaatgggagtagggccagcgaagcggtgcttagcgtcaatatcgcatcgctaccgcgtcctggcggcggcgcgcttcttacggatattcatttccacgccagaaaaggagagtgcctggcggtgattgggcctaacggcagcggcaaaacctccttattacgggcgatagatcagcagctgacgacgcgggagggcgagattcgcttgaatggccgctcggtttcagcgttaacccgccagcagcgtgcccggcagatcgcggtcctggcgcagaatgatgccccggatatgcggctggcgcttgaggattatgtcgccctcgggcggatcccccacgccagggagatgtcgcgtcgtgaccatgacatcatcgtgacccgggcgattaatgatacgggactacagaggctgcgaacgcgctcgctatcggcattatccggcggtgagaggcagcgcgccgcgctggcgcgggtactggcccagtcgccagaactggtgttgctcgacgagcctaccaaccatctcgatcccccgggtcgggttgagcttctttctttagttaaaaaccaggggatcacggtcgtcgcggtattgcacgacctttcgctggtggagtcttttgccgaccgggttttgcttttatcgcaggggcgcgccgcagcctgggatgtgcccgagcgcgtccttatttcggaacagctctatcccgtcttcggcttaaccagctttaccgtgccgcatcccgagaccgggaaggcgctgcggatttttgaagttccaggctatgcgtaa

SEQ ID NO: 172064 - DNA, 957 bp, Klebsiella oxytoca
atgaataaatggcttgccggcatgatggcgattttttctattacagcggcgaacgcaggagattttcctgtcaccattgagagttgcggaacgcccgtaacctttacccaggcgccgaaaagggcggtcatacacgatctaaatatgtctgaaatggcttttgctctcggtttacaggaccgtatcgtgggtttaaccgggattagcggatggtacaaaatgacgccgcaatttaaacagcagatgggggcgattcctgagctggcgccgaagtatccctcgctggaaacgctgctggcggctaatccggacttctttttcgcgggctggaattacggcatgaaagtgggcggagaagtcaccctttccgtgctggctaaatacggtatcaagacctttgttctgagtgagagctgcgtgtttaccgctaaggacaaacgaaaagccagcatggacctgctgtataacgatgagctgacgctgggcaaaattttcggcaaacagcgggaagcgcaggcgctggtcgacggctggaaaaaaacgctcaatgcgctgcccaggccgccgcagggcgtgcagccgttgaaggtgtttgtttatgattccggcgaagacaagccctttaccagcgggcgctatgctatgccgaccgcgattatcgaagcggccggaggtcaaaacgtcatggatggcctcgaaataagctggggcaccacctcatgggaaagcgtcgcgacggcggaacccgactttattattcttctcgactatcagaccggaagcggcgccgacgcgctgcgccgcttcctcgaaaatcatccgttaatgaagcagaccccggcggtgaaacaccagcgttatctgaagctgcagtatgctgaattgacgcccggtccggcaaatattaaagcggccgaaaagctggcccatgcgatgtatccagcggctaaccaatga

SEQ ID NO: 172065 - DNA, 1008 bp, Klebsiella oxytoca
atgagttcaacgccatatcgttactactgggccgcgtggggcgcgctaccggtgttagccgggttgatgctgctcagcgtggcgaaaggcagcgtaccgctatcgctgacgcaggttctgggggctttacggctgcttgatgtgccagtttcggacatgatggcccgtatcgtcattgatttgcgcgtgccgcgaacgctgctgtcggtgctgaccggggcggtgctggcaatggtaggcggccttttacagaccaccacgcgcaacgatctggccgatccttttctgttcgggctctcctccggggcatcggcgggggcggtgctggtgattacccggttcggcgagcggctaggggggctgacgctgccggtgtcagcatttgtcggcgggatctgctctgcggtggcggtgatgctgctgtttcattttaaaaagcagcgcggcgccgagcatttagtcatttgcgggctggctatctcctttttattcggcgcgctgaccagctatttgattttctccggcgaccagcgggccgccagttcagtgctgttctggtcgctgggcggcctcggcctggcgcggtgggattatttaccttatgccgtattcagtctgctatttctctgcgcttttatcctgttacgctggcgatcgctggatggcctgttggccggagaacagaccgcgcagtcgctgggcatcaacgtcagccgcctgcgaatggaggtgtttttctgctgcgcgctggcgacatcgctgctggtggccttaaccggagtgatcggctttatcgggctgatggtgccgcatatgtgccgctacttttccggggttaagcatctgcggttgctgcctttatgtggtctgtggggagctgtactgctgtgcggcggcgacattgtcagcaggacgctgctggccccgcaggagctgcctatcgggatcattacggccggcatcggcggactgtttattattattctgctggcccggagccgggcataa

SEQ ID NO: 172066 - DNA, 507 bp, Klebsiella oxytoca
atgttaactattttcagccataatcatttttttaaaaaagccatgcgtctgaaaataaatgatataaaagcggtcagaaaggcgaatctcgtcgatctgtgcttaaccagatactcgtccagcagccatgcgcagtttcattttttgataaacagctttgaaatgaaaaagaattttgtgtgtttcaaggtggaaggcaatatcatttgcttgatcaacaaaaggcgcaccgcgcacatcgccagtataatcgccagagtcactgacggtatccctgtcggtgaggacatcaccctaacggaaagagaattccagtatatttttattatgaaatttaacgtgctggcaaaagactatccggaactgctcggcatctcacctaaagcctacagcaactataaaagaagattaattgataaattcggttttaactcatttcatgcgcttttggcgctgtctaattatttacacgcgttttcgctgattgataaattcaccccagactaa

SEQ ID NO: 172067 - DNA, 723 bp, Klebsiella oxytoca
atgatgaataaatttagtccggcgaattgcccgcagacgtatgtcaatcaaaatatgatggggccaaatgtattaaggctggttgaagagcttagccgctccctggaactgtggcctggaatgcgtattctcgatctgggctgtgggacagggttatcttcgatgtatctggcgacggaattcggcgtggaggtggtcgcggcggatctgtgggttcgcgccgacgataacgcccggcgttttgcggcagcgggcatggacaataaaatcaccccgatcaatcttgatatcagcaccctgccgggactgggtatttttgcccgcgacgcctttgatgccgtggtcagtatcaatgcctggcactattttgcaagcgatgccctgttctttgaccagcgcattgcgccttatgtcaaaggcggcggaacggtggctattgtcatcccgggtctgcgcagcagcgacgctgaaacgcgacctgaaatccatgcgctcattgctagcggcatcgccctttttaccaccgaccgctggcgcgcaatctggtccgggagccagcatcttgcggtcaatcagtgccgtcatatggcatccggccgtcaggcgtggctagagtggcaaaagtgcgataatgattttgccgctaccgatgccgccatgagaagtgatgagctgggtcagcagctgcgctttatgcaaatcattggccgggtaaacaaatag

SEQ ID NO: 172068 - DNA, 1086 bp, Klebsiella oxytoca
atgaaattaaaattactaacagtggccgtctctacacttcttgctgcaggaaccgtgcaggcagctgaggtgtataacaaggacggaaacaaactcgacctctatgggaaagtgaccggcctgcattatttctccagcgataagtcagaagatggcgatcagacctatgcccgtctgggcttcaaaggtgaaacgcagatcaacgaccagctgatcggctacggccagtgggaatataacttcagcgccaataacgttgaaggcgacaactccggcgacaaaacgcgccttgcgtttgctggcctgaagtttggcgaatttggttctctggactacggtcgtaactacggcgttgcctatgatatcggcgcctggaccgatatgctgccggagttcggcggtgatacctggacccagaccgacgtctttgccaccgcgcgtaccaccggcgttgccacttaccgtaacaacggtttcttcggtctggttgacggtctgaatatcgccgtacagtaccagggtaaagaagagggcaacgaccgcgatctggcgaaacagcatggcgacggctggggtatggcctcgacctatgagtacgaaggatttagcgcaggtgcggcctacgcggcatccgatcgtaccgatgcgcaggtcagggaaggtcgcgtcaaaccagacttctacgcccgtggcgaaaaagcggaagtgtgggcggccggtctgaagtacgatgccaataacatctacctggcgaccacctatgcggaaacccgcaacatgactaagttcggtaaaggctatatcgccaacaccgcgcagaactttgaagtggttgctcagtatcagtttgatttcggcctgcgtccgtccatcgcctacctgaaatcaaaaggcaaagatctgggccgctatggcgaccaggatctggttgaatacgttgatgtaggcgcgacttactacttcaacaagaacatgtctacctacgtggactataaaatcaacctgctggatgacagcaggttcaccaaagatgccagcatcagcaccgataacatcgttgccgtgggcataacttaccagttctaa

SEQ ID NO: 172069 - DNA, 1263 bp, Klebsiella oxytoca
atggatattatcaacagcattattagcctgggggcatcagtgatgatgccagtaatattctttattatcgcactgtgctttggggttaaaatcggcaccgcatttaaagccgggatgctggtaggcatcggctttgaaggggtgggactggtgatcggcctgctattaaccaacctcgggccggcatcgcaggccatggtagagcgtatcggcctgcacttgacggtggtcgatgccggctggccgaccgcctcgactatcggctggggctcgccgctgatgctgccggtagtggtgggatttatcgttatcaatattgccatgctgctgctgaaattaaccaaaacggtaaatatcgatatattcaactactggattttcctgattatgggttcagtcgtctatgccggtaccggtaactactggctctccgtcggcattactttcggcatatttatcttaacgctactggcggcggatttaaccgcaccctatctgcaaaaaaactataatctgcaagggatatcatttccccatcttacctgtataacctacgtgccgtttggtattgcctgtaactatattattgataagatcccgctgatcaataaaattaatttcgacccggaaagcattaataaaaaattcggcgtcttcggggagccactcactctgggcttcgtgctggggctgctgctggccttcctggccgggtacgatgtctcggcggcggtatcgctggcgattaaagtttccgccgccatgctgctgctaccgaaaatgatcgaaattttagtgcagggcctgctgatcgtgcgcgatgccgcggaagcgaagctgaaggcgaaattccccaaccgcgacttctatatcggcatggataccgcactgcttattggcgaaccttcggtgctggcaaccggcctgctgctgatccctatggcggtggtgctggcgattattctgcctggcaaccgcgtgctgccgtttgtcgatctggcctccctgatgttcctgctggcgatggtaacgccgttttgcaaacgtaatatgttccgcatgtttatcaccggcacgctggtggtcacctgcattttgtacgtcggaacggatatttcgcgggaatacacccaggcggcggtcaactctaatattcctgtgccggaggggatggcggaaattaccaatatcgttggcggagccaccacgccggtgggctggctggcggtgaaattcggcgagtttttcactaccgcgccgtaa

SEQ ID NO: 172070 - DNA, 996 bp, Klebsiella oxytoca
atgaaatgtctggcaattgccgatctgtttatcaatgcagcgatgatggacgcgggtctgaaagcgctcaaagataaaggtattgcagtggaagtacgcgaatggtcgcacgagtcaattgaaaaactgcaggaggataatttactggttgaacagcaaggttctgaggcgctggcgctgcctgccgctctgcttcagggtgctgaggagacggagatcctgatagtccagttcgccccggttaacgcggcggtattcgacaagctgccaaagcttaaatacgtcggggtgctgcgcggcgggattgaaaacgttaatcaggaggaggcaaaagcgcgcggaattgaggtgatgaacacgccggggcgtaacgcccgcagcgtggcggaatttaccgtcgggatgattctggcggaaatgcgcaatatcgcccgctcacacgatgcgctgcgcgataagttctggcgcaaagagagtcctaaccaccgggccattcctgaactgggcggcaaagtggtaggtctggtcgggctggggcatatcgcgcagctggtggctggcttcctgcgcggtttcggcagcgagattatcttttacgataagtacgtccccggccatgaaagttatgaaaaggtggatactctcgacgaactggtgcgccgtgcggatgtgatttcgctgcatgcccgtatgaccccggaaacggaaaacctgatcaacgcccatcattttgaattaatgaaggagagcgccatcatcgtcaacacggcgcgctccgggttaattaatgaaggcgatctgatcgccgcgcttcgggcgggtaaaatcatgggcgctgccctcgacacttttgatgacgagccgctgccggacgatagcgcgttttattcgctgaataacgtcacgataacgccgcatattgccggcagtaccattgatgccttcagcaattcgccgaagattttttcagagatattgctgaagcaactcggttaa

SEQ ID NO: 172071 - DNA, 762 bp, Klebsiella oxytoca
atggatctgaatttacaccaccgcacggctatcgttaccggaggcgctacgggcctcggcaaagagtttgtcctttcactcgcccgagaaggggtcaacatctgcttcacctatatgcgtgatgaggagcgcccggaacagctgatcgctacggtaaaaagtagcgctagcgtcgaaattattgcggtgaaaaccgatctttccgacgagcatagccgggagaatcttttcgcgacctgcctcgaacgcctggggaacgccgatattctggtcaataacgccgggatctggctgagcggttacgtcactgaaatcacccagcaggagtgggatagcgtgatgaacgtcaacctgaaggcggtgttccacctgagccagctgtttgtcaaccactgcctgacgaaagatcaggccggcagtattctgaatatcacgtctcaggcagccttccacggttcaaccaccggtcatgctcattacgcggccagtaaggcgggtctggtggccttctcaatctcgctggcgcgcgaggtggcgaagcagaaaatcaatgtcaacaacatcgccgtcggcatcatggataccgcgatgatccgtaaaaacattgaacagaatcctgactattacgtcagccgtataccggtaggccgggtggcccaaccgcacgaaattgccgacatcggcgtcttcatggtctcaccgaaaacccgctatatgacgggagcgactctggatgtcaccggcggtatgttgatgcgttaa

SEQ ID NO: 172072 - DNA, 1539 bp, Klebsiella oxytoca
atgaaacaacactatgtcatgggcattgataacggcggcaccgttacaaaagcggcgatttacgatcgcgccggcaacgtggtggccagcgcgtcgaaatcaacgcaaatgctgaccccgaaggaatttcataccgagcgggatatcaacgaactctgggcggctaacgtcgaagtcattaaaaaagccatcgcgcagtcgggtatcgacgccagccaaatcaaaggcgtggcggtaaccggtcacggcaacgggctttatatggtggatgaaaccggtgccccggtgcgcaacggaattatctccaccgatagccgggctaaggcctgggtagaaaagtggtaccgcgacccgacgtttgttagcgatattttgcccaaaactatgcagtctatctgggccgggcagcccgtcgccctcctcgcctggctgaaagagaacgagcctgaaacgctgtgtaaagcgcgctacattttcatggtcaaagatctgattcgtttttatctgaccggcgaagcttttctcgaacttaccgatatctcaggaaccaacctgatcaacgttcgcgaccgcgactatgacgcctcgctgctggcctggtggggactcggcgatctgcgcgataagcttccgcccatcaagctctccaccgattgctgcggctacattaccgaagacgtcgcgcagctcaccggattgcgtgccggaacgccggtctcgggcggggtgtttgatatctcggcgtcatctgtcgcatccggtatcaataccctagataagctggcaattattaccggaacatggagcattaacgaatacgtgaccgaccatccggttattgaccaggatctctttatgacctcgatttatccgattgagggcaaatggttgattaccgaggcaagccccacctccgccagtaatctggagtggtttatcaataactttatggagagcgatcgcaccgccgccgctgcgcagggatcgtcagtctacgatctgtgcaatgagctggtctccacaaccacgcccgcggagagccacctgctgttcttcccgtttgtcttcggttccaacaccatcccggacgcctctgcggggtttatcggcctgaatagtttccacaaaaaagcgcattttttacgcgcgatatatgaaggggttgctttcagccacctgtatcacaccgaacggttacgcaatattaacccgcagctcagccgcaccatccggattgcgggcggcgtgactaactcagcggtctggctgcagatattcgccgacattttccagtccaccctggagattgtcgacgtgaaagagcacggcacgctgggcaccgcgatgaccgccgcagtaatggttggctggtttgatgacgtctttgccgcctcaaatgagatggttcacgtttcgcgaacggttacaccggacccggacagcaacaaggtctatcaggataagtatcagctttacaaaaacctgctatcggaaatgcagtctccgtggaaaagctgcagtaactacatcacgcattaa

SEQ ID NO: 172073 - DNA, 552 bp, Klebsiella oxytoca
atgctcttaaataacaccatcattccttcaatcagaaaatataaacattttgaacaggcgctggcctgcgcatcagaatacgtactgttatccgaagcgaatattggcaatctgcaatcgttgatcggtaaatgtcatcagagtggcaagaaagtgcttattcacctcgagctactgggtggttttaaacctgaccaggcgggtattagtttgctcaaaaattactacaaggttgatggtgttatttcgtccaatctctcggccctacgctatgccaaaaaagagggattgttaactatctttcgggtactgctcatcgactcgcgctcgctggatcactccatcgatattgttaagcataacccgccagatgctattgaaatcttacctgctgaatatgcctgccagtgtctggaattgattagccggaatttaaaaggctttgatgtgatattcatcgccggaggctttgttaagcggaaataccttgtagataaaattttccatgccggatttaaaggcattaccaccagcgaacccggtttatggtaa

SEQ ID NO: 172074 - DNA, 792 bp, Klebsiella oxytoca
atgtctaaagaacgtcgtctctctcgcattttcgcaaaagatggtaaatcagtcactctggcgctggatggctactatttttcgaccaaaactaatggtattgataatacgataaaccagctcccggccctcgtcgacagcggtctggactgcgcgctggtgacctggggcatgttgaaaaatttccgtgaagttttcaattgcgtccccgttgtattacgcgtcgatagcacagtgagtatttttgacaataccgttcccgacaccacccccgtattttccattgaggacgcgctgaaagtggcggcggaaggcgtggtgtgcatgacttttcccggcgcgttcaatgaggagaaaacgcatatcatggcgatgcagctggcgcaggccgccgaccgctggaacgtaccgctgatcgtggaatccctgccgtacggctatcccgtcactagcgacgactccaacaatccggccgttatcgccgcctctgcccgcattgccgttgaactgggggctgacgtgatcaaaacccgcttcaccggcaccgaggacgaccggcttatcgtcgaagcggccggcgtgccggtgctggcgctgggcgggccgaaaaccgggattgacggttattttaaatttgttcatcactgcatgcaggttggtgcaaaaggcgtggcggtgggtcgcaatatcactcaggacccacagccggcaaaagtagtagcaggtctgaatgccatcatccatgaaaatgcgacagcggaagatgcctacagcctctatatggctaaataa

SEQ ID NO: 172075 - DNA, 588 bp, Klebsiella oxytoca
atgaaaaagtctcttctggcagcatgcgcgacgtccattcttttttgctccggcgccatggctgcggacgtaacggcttccgcaacggcaagctgggatgcttctgcaacaaaagataccaccagcctgttggtcgttacgccgctgcgttccgtctcttttgaatatgccgaaggtctgaaagcgtttaattcacaggatggggcgtttgatattaccattcaggggcaggagaacgcgtccgatttcgttttaacctctcaactggtgaccaacacgctgacccgcgctacggataactcaacgctggaaattggcgtggcatggaacggtgagaagctgtccaaatccacgccggtgaaaatgatggatattaacaataatattaccgcaggcctggaagcgctgatcgcgggatatgctgataaagataaccgcaccagcacgcagagcgccttcctgtttaccgtcgattccgctacctcaaatggtaccaccgcgacgcctttcgcttcccttgccgacggctactggagcggcgatgtgaaggtgcagtttaccgccgagtggacgctgtctcagagctaa

SEQ ID NO: 172076 - DNA, 678 bp, Klebsiella oxytoca
atgatgaaaaaattatacccatttttatttctgccgctgttaatcagcgctagcgcggcggcgattggcgttggggaagtgacctccattatgttcgccaatgaccagatgctggcgaaagagatcgataacgccagcgactcggcgcgatttgttagcgtcagcgcccaccgcctctctacgccgatggcagggggcaaaattattccgatggaacagcccggcgagttgctttctaccccggcaaacgtgattcttcccgccggcgccagagaacatttccgctttatttatcatggtcctgaagatgataaagagcgctattaccggctgtcgtggctggatgaaccggtgagcgatcatcaggccagcagtaattcacgtcacggtatggcgacaacctcagcgcaaattaacaccattctggtggtggcgccgcgcaaggcggaatttaactatcagcatcgcggcgatacggtgacgaataccggcaatgtgaccttccgggttatttcctatgggccctgtaaagatcctgaaaaaaacaaaggtgagggctgccgtgaacgttattacgtgatgcccggacttagcgcaaaaataacgcatacgcaggtcgcgaataaacagacgcgaatcggtatctggcacgaaggtaaatatattcacgtcaaatag

SEQ ID NO: 172077 - DNA, 2547 bp, Klebsiella oxytoca
atgtcaggatggttattcagaaaaggaatgctgctgccgggaatatgtctcgtctgtaccgtcgatgcttcagccaacgaaagcgcgggcagagcgacgctgctgcgggtgggggattatgttattccgcccgtttttgctgatgcgcttaagcaggggatgcgggtaccggtttttatccgctacaaagaggcggagctgccgtcgcgcagtcggcaaaaaatcgccgatgcgctgattgcgaccaaggacggggcgctgacgatccgcgaactgacgctgctctccacgccggataacctgtcgctatctgcgccggtagaggaaattgtcaatggtctgcaggaccaacaattttctgcggatatgacgctgcgtctctccggggcggcgcagatcactttcgacgtccgggcattttaccttgaaatgaccgtcgatcgcagcgcgctggcggcgacgacgcttgccaggcacagcgttttgggcgactcaaccgccggtgcgccgtcgaacgtgctcaattatacctttggtacttatcatcaccgttataacggctacgacggcaccagcagctacctgacgctggataacaccgcggcatttcgcgagcaccacgtgaatatcaacggctctttctacggtatcggctctggcgacagcagcggtaacctctaccgggcgatgtatgagcgcgatatggcaggccaacgcctggcgttgggaatggtcgatacctggaatctacaatccatcgccagcatgagcgcgctgaattccagccgcatctacggcgtgagctatggcaataaaagcaactcgcgccttgaagataccgccctgtccctgacgccgattaccgtctttttaccggcggcgggcgaagtgcatattctgcgcgatggcaaattactgagcattcagaaccttgcgatgggcagctacgaagtcaataccgcaacgctgccgttcggcatatatcaggttgaggtgcaggttgtgatcaacggcaaagtggccagcagccgcacggaacagattaacaaaacctacgcccgtcgctcgagcgtcaccgagcgctggtcgtggcaagtattcggcggaatgctcgaataccataaaaccgactatcgaccacaacatgcccggcgcgaggggaagcaggaaacctggcttagcggcggcgcggcggcggtcacgctgccctggctcgccgggactgggtttaaaaccacgctatacggtttcgacagcaacgccgtaaacgaaagcgaagtggatgtgatgttcaacgaacgtctgcgggttaatcagcaggttttgctggccaacgacggcagcaggaaaagcatcaccaccctcaatctgagtctgcctgcgggctatggttcactttggggttcgcgagaatttacgcatattggcaaccacttaccgctgcgcaaaggggattactttacctgggggacaacgctgccgctgcaatcgctgacgccctacctcggcacattgaccttcagccgtacggaaaactacagtaacaaaacgcgttataacaaccttgattactcgcagacgctggcgtcggggcgctacggtaccgttactctgagaaccggggtgcagaattaccactatcagcgcaaccaggacaccacgcgggataaatacattaacctcgatttttcgttgccgctggcggcgtggttcagcgccggtgtttccagcgaaaacggcaacatgctggcgaatatggcgctcagaaaacgcttcgccgatagcgccatcactcaggcgggcatctcagcttcccggcggttaaaaagcaaagagagcgagagctaccgcagcgataaacgggcgatcaatggttttgccagctacgacactaaatacagcagcggcacgctatccgccacccatgcttcggataacagtaccaacctcaatttcagtaccctgggcagcgtcgcctgggccggaaaagatgttgttccggccaaaggaagccatacatcgggggtgctgatccataccgatttccgcgacaacgccactatgactgccaaaattaacggccagcattacccgctcagcggccagaaaaactttattccgctgcccgcctatgggcgctacagcgtggagctgatgaatgacaaacgcagcgccgatagcgtggatatcgtcagcggcagaagccatcaggcggtgctgtatcccggtaatgtggacgttattcgtccagagataaaacagctggttacggtgtttggccgcattcggcgcgataacggcaccgtcgccgcccacctcgatattcataatcacatcggcaaagggcgcaccgatggacagggagaattcgccatggatgttgataaacgctatccgaccatcactctggtcgaaaaaaacggacagcgctgcgagctggagctgaatctgcaggaagcgcgcggcgcggtgtggatgggggacctgcagtgcgaggcgcagatgcgtatggcggtacagggggaggggcagcgtgacacctggtaa

SEQ ID NO: 172078 - DNA, 1614 bp, Klebsiella oxytoca
gtgacacctggtaaactgatttgcggcctggcgctgggcgcttgcctggcgaccacgtcattccagagcctggcggtgaaagccagcagcagcggctcggggaaaaatgactatatgtttattgaaaaccatgtcgataacgaatatttcgttacccccggcagcctggacccgcgcttttccggcgcaaacgtctggacccgctactcgacgaagcagcgcagtctgggctatatgggctacgtcagctggagctatcgatcctactactacgatatgtggttgtcggactcgccggtgaattcaccgtttatcggcattcgctgtatgaccaccggcgccgactgcccgtcgcagggctatatttccggcgaggtcattgatagtgaaggtttttatcatacgatgtccggaagctctttgaacaatggcggcaccggctacgccacgttctccccggcaatgtatgaatatctgcgcaaccgtcagcctggcgagagcgatgcctttgtgctcaatctttgttacaccaaaactaattacgatgcggcatccggccagcgctgtcgggatctcgcctcgggcgcgacgtggcgttattacaccatcaatgccactaaagtcgggcatttaacgctgaacagcaccggcgcgctggcggaaatctggattgccagcgacggcacgcccagcgtcaatatcggtagcgagcactgcgaggtcagtatcgtcggcggcgaaagtgggatgacctgtaaaatggtgtcgtatcgctatcgtcaaaccaagcgggtgacctcttctctgtcatttgaaatggtggtcgataccgccaggctgggctttagtccggcgtctaaaaccatcaaatatagcggcaatggatccacctggtataactggagcgcttcaactacctatagcaacgtctttacccccgaaggccagtacgtttatgtgttcctctcgaaaacctttttccagaacctgatccagcgcggaattagcattaccaataacgacgatttgtttaccttcttctttgataacagtaacaccgcgcagtccgggttttatcagtttacggcgtcgagtatgatcaatattctgccgaaagagtatgggatcagtattgtgtccacggacggcaatgctgcgccgaaagagtcgggcaatatcggtgacccgacgccgatcggctttgaatatcaggtaactgtctcctccgagcgtatggcggacgcggtgacggctcaggtgattggcgaaggcacctctattgatggtgtctcatactgcctgtttatgtcgcaagagggcggctggcaggtgccgatcccggcctttctctcctggacggcatccaccggagaaacccgcaccagccgcaatagctgcatcgatgcggagatcgatatgaccgctgcgcgctggacgcaaacgccgtggaatgcggcaattgatgacggctactatttcaccacccgcctgcagctgctgtttccgatggacgatccgcgctccagacgcactctcgacggcagcgactggatgggaacggtcaacgcgagcggcgaggtcagagtgaccgccaaatggctgggcgtcgagtga

SEQ ID NO: 172079 - DNA, 672 bp, Klebsiella oxytoca
atgaaagccgctgttatgctgctggccgcgtcgccgctggtggcggcaggggcgttttttaatgccgtcgtgtatgagatgccctccgaccgagcctttatctcgcagccgctgtataacgacacgccgcgtaataatatgtactccatcgcggcgtggaaaattgccaaacccggcgcggggaatgaaccggttctgcctaatcagggcgaactgctctacgccccgctgcgcttcaatttaccgccgggaagcagtgaatatttccgtctctattacaaaggccctgaagataatcaggagcgctattatcgcgtggtattcaaagagacgccggtgacgctgatacctttcaggacgacgccgcaaaagatggatgtgctgccggtggtggcgatgagcactattctggtcgtcaggccgcgtcagcagcgcctggagtggcagatagatgaacgccagggggagatttacaatagcggaaatacgttttttcgggtgattgttcaccagggatgcgcggggagtgatgaacgcgccacgcagctgtatctgctgccgggcgaacgctatcgcgacgcggctctggcagggaaaaaaaacagaaaattcgtggtggccaatcagcgctactttccgttggggaaggcgtgccctgattctattcagtga

SEQ ID NO: 172080 - DNA, 144 bp, Klebsiella oxytoca
atgaaaaatactccatggctcgtgcgcttacgtaatacctctattccggagcataagcttcgtcccgcgaaatggctggcgctgattgccctgctgctgctgctggcgcagctgatggtcgaatccctgttgctcactgaatag

SEQ ID NO: 172081 - DNA, 921 bp, Klebsiella oxytoca
atgatcctttgctgcggagaagccctgatcgatatgctgccctgccggagccgtgaaaatgctcccgcctttacgccctgcgtcggcggcgcggcgttcaataccgccatcgccctggggcgccaggggatggcggtcgcgctgttttccggtttatcggacgattttatgggtgacatgctgcgccacacgcttgacgcctccggcgtggattattcgccctcaacccgcgcgccgctaccgaccacgctggcctttgtcaggctggaaggcggacaggcgcgctataccttttacgatgagaatagcgccggcagaatgctgactgaaagcgacctgccgacgctcggtgatgacgtatctgccgtcctgttcggctgcatcagcctgatagccgaaccgtgcggcagcgtttatgaagcgctgatggtaagagaggcgccgcgccgggtgatgttcctcgaccccaatattcgtgaaatcttcatccaggaccggcagaaacacctggcgcgcatgatgcggatgattgctctggcggatatcgtcaagctttccgatgaggacctcgcgtggtttgccgaacccggcgaagaacacgcggtcatacgccgttggcttgctctgggaccaaagcttatcgtggtcacccgcggggctgacggcgccgatgcctggaccgctaatttccatcttcatgttccagggattcgcgtaacggttgccgataccgtcggcgccggggatacggtcaatgccggtattctcgccagcctttcgcaggccggactccttgagaagcctaaattagtgacactgtcacgagaacaggtgcgccgcgcggtcgatctcggtatgcgcgccgccgcggtgacggtctccaggccgggggctaacccgccgtgggaccatgagctctga

SEQ ID NO: 172082 - DNA, 1371 bp, Klebsiella oxytoca
atgacatatcacattacgctgacggacccgatgaacggtacccgggatcgcgaaccgattacgtttactctcccggagaaactgcaggagcccctgtggtgggcaatcaccagcgaggaccagcggatcctttgccagcgcctcactcatgagtcgacgcaaaacagtaccgcctttatcgctacggtaagcttcagcggcacgctccggatgcggcttgagcggccgctaacggcggctgaagtcggtgaagtcgccggtatctaccgcctgcctggccgggagaaagactgttttgtccgcctcaataccggctgcttcgatctggaaatgtgtcggggaaccgcccagggcgtgggttcatccaagtgggggctgcgccattttcgctgtctgcaggacaatgtcgagctgcttccttccgggaataacgccatcggcggtttttacggtccgttctttaccccggaaaatgggctgattaacccgccggaacataccctcgttgatattgaaattgttgaggaaggcccggtctatcatcactatcgcatgcacggcacgatccccgatgggttattagcggagctacgcggtaagcacttcaccatcgactggaagttcagctggaataccccgtggtttcagcggcgctacggggtggatgacttttcgacggtcatcaacgggcgttcggtgaccaacaagatcaccgtcggcgacgagtttgaaagcggtccgggaaaactgctgtttgaccgcttcgcggcctacggcggtacccgctatcgcgcaggcgacccctacgccgaagagctggtcgccatggtggctcataccgttaccacctctgaaaaccagagcccgaaatttgccgaattccgcgaacagctcgccgatatggcctccgctcactgggatctttactggcgaatgttctgccgctgggagaacgtgctggatgaagctgaaatccgcgaaaggcttggcgttgtgcgcgcccgggcgcacgttcgcgccgacctgaatgaacgggaatggcgcctgactgattctcccgtcaacgtttccgccgtgccggatgaaaccgtgttcccgggaccagccagtaaaaccgtcgagtacgattcagcgagcggccgggcgatgatctggtggacctcccgcccctccggcgcgtttcagatagtccagcgccgtcagtccggttgggtgaactggggcagcaacggggaaaacgagtgtccggagctcccggtcggggtcgatatcaagaccgcctgcgggatattcgctgacaactggatgcaggtagccgacggcctggaaacgccgccgcaggtcgcggtgagccgggaggaaaagccatga

SEQ ID NO: 172083 - DNA, 1020 bp, Klebsiella oxytoca
atggacaacaataaacctgtgacggaactgccggtcaaagcgccgtttgattttgcgaaatggtgggatcgggtggggatcttaatcgttctgctggtgctgctgatcctgatgtcgacctttgcgccaaactttaaccgcgtcgataatctgctgaatatcgcccgctcgatttccgtcaacgctattctggcggcgggcatgactttcgtcattttaaccagcggaattgatttgtccgtcgggtctatcgtcgccgtctccggcgtgatctcggtggttgcggcgatggccgggatccctgcgccgctggcgattctggccggcgtgggcgtgggcgcgctctgcggtctgctgaacggcgtgctcaccgcctatctcgctcttgcgccctttatcgtcactctcggcacaatgaccttcctgcgcgggatggcctacaccattaccgaagggcaacctattgtatcgagtagcctgagcttccgcgagctggggaatggctatctcgccggcatccctgttccggtcattattatgctggtggtttatctgctggcgtggttcattcttgagcgcacgcggttcggtcgtcatatctatgccgtcggcggcaacgcccaggccgcgcgcctggccggcgtccgggtaaaacgcgtactggcggcggtttatatgattgccggcgtctgcgcgggtctggcgggcattatcttcgccgcccgggtcatttccgcccagcctacggcgggtacgggatatgaactggacgccattgcggcggtagtgctgggcggcaccagcctcgccggaggacgcgggcgaattatcggcaccctgattggatcgataattctcggcgtgctcagcaccggcctgattctgctgagcgtcccctttttcacccagctattgattaaaggcatcgtcatcattcttgccgtggcgattgacggactgaagcagcatccggaactgtttactttctggcggaaaaaagagatcgcccgtacccgctag

SEQ ID NO: 172084 - DNA, 1239 bp, Klebsiella oxytoca
atgacggtggcggaaaatctgtttctcggccaggaaccgacctctttcgccggtattctcgatcgcaaacggatgctccgggaggcccgggagaagctggaccggattaacgcggacatcgacccgcaggcgccgctcggctcgttgagcattggacgtcagcaaatggtcgagatcgcccgcgccgtcagtgaaaacgcaaaagtactggtgcttgatgagccgaccgccgccctgtcgcgggcggagaccctccagctttaccggctgatcgagcagatgcgtcaggatggggtcgggatggtctacatctcgcaccgcatggaagaggtatggcagctggcaaaccgggtcacggtgttcagggacggcacgtggatcggcacggaaaccctgagcagcgtctcgaccaccgatatcgtacgcatgatggtcggccggcaaatcgtcgatctctatcagcacgaaccgcgtacgcccggcaaagtactgctggaggtcgcggatctggcgggtagcgcaaccggcccggtctcctttgaggtcaaagcgggcgaagtcgtcagcatgtccgggctggttggctctggccgaaccgaagtggcccgcctgttattcggcgccgaccctcgcacccagggaagcgtacgtattaacggcaaggtaagccagccgtcagatcccaccgccgccattgccgacggaatcgggatggtgaccgaggaccgcaaaacccagggcctgtttctgggccattcggttgagcacaacattgatatcagctcgctggagaactttgtcgccagcggcgtggttaaacgcaaaaccatccgcgccgccgtccttgagcagatgcgccggttacggctgcgggaaaatgcggtcgaactgcccgtcagcgccctgtccggcggaaaccagcagaaagcggcgctggcgcgctggctgctgcgcgattcgaggctgcttatcctcgatgaaccgacccgcggcgtggatatcggcgccaaaagggaaatttacgaactgatcgacaaactcgcccgcgccgggaaagccattctggtgatctcctccgatttaccggaggccatcggcatcagcgaccgcgtgctggttatgcgcggcggccgaatcgttcaccagttaccctcatattcagcaacggaagaagaagtgatgctgcacgcaacaggaacctttaccagtcaatccggagaatgccatggacaacaataa

SEQ ID NO: 172085 - DNA, 279 bp, Klebsiella oxytoca
atggccgacatcacttcaccccccttgctcaggctggaagggatttcaaaacgctacggcgcgaccctcgcgctgaacaacgtacgctttgatttattcgccggagaggtccatgccctgatgggggaaaacggcgcgggtaaatccacgctgatgaagatcctctccggaaacgagcagcgcgatagcggcgcgatctatatcaacggcaggagattgatattcgcacgccaagagatgcgcgcaaatatggcatcgccatcatccatcaggagctga

SEQ ID NO: 172086 - DNA, 954 bp, Klebsiella oxytoca
atgaccaaacttcgcaaagcatttctggctgtcgcggttactgcggtaatcaccaccatgacaggatttatccccgccgccagcgccgcgccgcaggagggcaaaaaaatatcccacatcggcttaatggtgcaggacatgtccaaccccttcttctcggcaatggaaaggaacgcaaagcaggccgcggcaaaaatcggcgcaacccttaacgtacaagatgcgcaggtcgatctggcaaaccagaacacgcagattgacgcctttattcagcagaaagtggatctgatcattatttccgccgtcgatgagtccggcatcgagccggccattcagcgggcaaaagccgccggaattatcgttatcgcggtcgatacgcccgccaggggcgctgacgcggcgatcatgaccaatgccatccaggccggcgaaacctcctgcgaatatctgttcagccaaatgggcggcaaaggcaaagtgctgctggtggacggcacgccgattcaaaccattattgaccgcatcaaaggctgtaaaaacgtcgcgcaaaaatatccggatatcaaaatcgtcgggcagcaggcatcgcgcaacgaccgcgcttcaggactgatggtcaccaccgatatgctcaccgccaatccggatgtctccggtattttcggtatgaacgatccttcggcgctcggcgcggtgctggccgttgagcaggccggcaaagccggtgcgattaaagtcaccggcgtagacggcagcccggaagcggttgaagaactcaagcgcagcggctcaccttttatcggcaccgccacgcaaaacccgggcgaaatggtgcgccaggccatctcgcttgctcaggatatggttgacggcaagcctattgcgtccccgaccgtattgatccccagcgtgctggtcacgcgcgacaacgtagatagctatccgggctggtaa

SEQ ID NO: 172087 - DNA, 1032 bp, Klebsiella oxytoca
atgcgtaaagcaacgatgcgggatgtgagcgaagcgacgggattttccatgtttaccgtttcgcgcgcgctaaacggtggcgatggcgtcgctgacgacagccgggagctgattttaaaagtggcgcgagagctcggctacgtacccaaccgcgcggcccaggcgctacgccgttcgagcagagactcggtggcggtgatcaccgcccatgcgtcgaactcttactatctcaacctgatgtccggcattcagcagatgctgcagccttcgcagtggaccgtggtgcttggcgatattgcggtcaacggcatctacgaccgcgcgcaggaagatcggatgattaaccgcctgatcgagtcacggatggccgggatcatttcgacggtgacgctgcagccggaaagcctgactctgctggcgaaatgggacatcccggtcgtcttcgttgattccccgccccgcggcgagcacaactttcccagcgtcacgaccgacaattaccatgccagcctgctggtgggaaaccatctggcgcagcacggctataaaaactggctgctccttatctacccggaccgctggaccacgcgttttgaacgcgagcgcgggatacgcgaggccgccgagcggtccggcgctacgcttgaagttgtcgaaacggaaaacgacgcgcagtcggctgctgacaaactgagccagtacctcgaccaccagaaagcgctgccggatgcccttattgccggtaacaaccctattctgctgggttcgctcaaacagctccagcagcgccagatagccattccagaggatatggccctgattgcctacgacgaattcgactgggcgccgctattaaatccgccgctgacggtgctcaatgaaaatagcgaagagattggcagacagtcggctgaaatgcttatccagttaattaacccggaagggaaaggagaaatcaacacccaacgtaaagttcccgccgagctggttattcgccagtcctgcggctgtaaaaaaacgcataacaattaa

SEQ ID NO: 172088 - DNA, 624 bp, Klebsiella oxytoca
atgaaagtcacatggaacgtcagccctgcgggctaccagctgctaagcaaacgctgtcccgcctgccatgggcagcagaaattcacgccatccggagccttccggatcaattcgcaaaaaaaacagctcgatgtctggagtatctataagtgcgtccgctgcgcatacacctggaacatcagcctgttctctcgtttacccgtcagtaaaatagatccacacctctatgagcgactcatggcaaacgataaatctgctgcagaggactactctcacgatttgcaggttctgcggcgcaatagcgcgttgttagcgggttcgcctgaattcgtcgtacgggaaggctggcgaatcagccttgtccgtgctgctcaggtcagcgtcaacgtctacgtcgagcgcgcttttcaggtcagcttactggcggtgctacgtagacagctcggccttagcggcagcgcgatccgcaaatgtctggcggcgggcgatatcgccggaattacgctgaaagagctacgttcgccgaggatacggccagaaggacacaggctttatatcgtgaaggaacttcttctggcgcgcaggcgaatttcattaaataccggctcagatctcaggagatga

SEQ ID NO: 172089 - DNA, 603 bp, Klebsiella oxytoca
atggatacgcgtaaagaagtgctgtttgtcctcatccaggagtatgccgactgggagttttcgctgctggcacccggcctgcgccgggggtttggcgtatgggagccgcgctacgaagtcaggaccgtagctgcggatgaggggcccgtgaggtcaattggcggggtgcgctgtctgccggattataccttccagacgatacctgatgactacgctgctctggtgctggtggggggaatgaactggtggggagaggaggctcagcgggttgtgcctctggttcagcaagcgcaggcgcggcagatcgtcgtcggcgcaatatgcgatgcttcggcattcctcggcgcacacggttttcttaatgatgttgaccatacctccaacggcctggcatacctgcagagcagggcggggtcagcctatcgcggcgcctcacggtacaaaaacgtgccatcggtccgcgacggtaacctggtcaccgccaacggcgttggctttctggattttacctgcaatatgctgtctgccttaaacgcggcccgccaggaagagatcgaagccatgagggcgacctttacgtcgggaatgtttaccgagggctga

SEQ ID NO: 172090 - DNA, 393 bp, Klebsiella oxytoca
atgttttcctatattatgctcggcactaacgatctgccgcgcgccattcgtttttacgatcctttgatggagatgctggggcagccgcaaagcggccgaagcgatcaaggcgcatcgtgggggacattcagcggaaacagcaccatcgggctgtgcgttggccaaccgtttaatcagcagcaggcgacaaccggcaacggcgttatggtggctctgaacgcacgttcggttgagcatattcagcagctgcatcagctggcgctcagtctgggaggaagcgatgaaggcgctccgggacatcgccctcagtacggtgaaggcttccacagcgcctacgtcagagatccggacggcaataagctggcatttgtttattatgtaaacgccgactga

SEQ ID NO: 172091 - DNA, 573 bp, Klebsiella oxytoca
atgcaacaggtatttcaatggattaacgaacccgcaacatggtcggaagaggacggctcacttagcgtcgtaaccgatgaggaaaccgacttctggcgcgaaacctggtacgggtttgagcgcttctccgggcatatctatgccacggaagccgcgggggatttcacctttcaggtgcgggtgcgcgcagatttcagcaccctgtatgaccaggcggggattatgttaatgcaggacgcccggcactggcttaaggccggtatcgagtacaacgacggcgcgcccgccatcggtagcgtactgacgctgggaacttcagactgggccaccggcatttttccaggcaaccccgcggcgttctggctgcgcctgacccgtcggggcgaagcgctgcgcctgcagtactcaacggatggccaccagtggccgctactgcggctgtgcccttttccgaccggcgccgcgaaagtgggcatcatgtgctgtacgccacagcgcagcggcctgcgggttaatttcgacgaaatatcgctgctgccgcccaacgataaagatttgcacgatttaagctga

SEQ ID NO: 172092 - DNA, 600 bp, Klebsiella oxytoca
atgttacctgagtgtgataaagccatcatcctgctgcatgaaatctacggcattaatgcgcatattcagcgaaccgccgcgacctggcgcagccgcggcttcgatgtctacacgccagcgctttttccccactctgcgccgttcgcctatgagcagcaggagcaagcctggcgtcactttaacgataacgtcggattcgacaccaccgccattgagtcgctgctggccgagctgaaaacaaaatatggcatgctaatcctcatcggctatagcgtgggcgccaccttagcctggctggccgccagaagcggtttctgcaacgccgcgatttgccactacggctcgcggatccgccactacagcgacgttgcgccgccctgcccgacgctggtgattctcgccagcgaggaaccggcgttcgatccccgggtaatgcaagatcagctggagaacgttccctccgtgacctgccggatgttcaatgcgcagcacggcttttgcgacgctgacagtccggcgtgggatccgcgccttacgcagcaggcagacgaagatacgctgcagtttttaacgcttattcagcaaagacaggaggcctga

SEQ ID NO: 172093 - DNA, 813 bp, Klebsiella oxytoca
atgaaacgctataacgatatgttttcgcgactgcaaactcggggagaaggcgcgttcattcccttcgtgatgctcggcgacccgcagccggatctgtcgctgcaaattatcgatgcgctgatcgagggcggagccgatgcgctggaactggggattcccttctccgatccgctggccgacggcccgacaatacaaaatgccgccctgcgcgcgtttgcagccaacgtcacccctgcgcgctgctttgacatgctggccgccattcgcgccaggtatccggcgctgcccatcggtctgctgatgtacgcaaacctggtgtataaccggggaatcgagacgttttatgccacctgcgcccgcgcgggcgtcgattctgtactggtagcagacgtcccgttcgaagagtcggcgccgttccgcgaggccgcgatgcgccatgatattgcgcccgtgtttatctgcccacccaatgcggacgatgagctgctgcgacacattgccgctcacggccgcggttacacctacctgctgtcgcgcgcgggcgtaaccggcgcggaaaaacgcgccgcgctgccgctggaacatctggtctctaagcttggtgactatcaggcgccaccgccgattcaggggtttggtatttcaaccccggaacaggtggcggatgccatgaaagcgggagccgccggggctatttccggctcagcaatagtgaaaatcatcgaacaacaccaggacgatcgggaggcgatgctctgtcagttgaaggctttcgcccgcaacctgaaaacagccaccgtcaggccaacatag

SEQ ID NO: 172094 - DNA, 1194 bp, Klebsiella oxytoca
atgagtcccttacttaacccctactttggcgaattcggcggtacgtacgttccgcagatcctcatccccgcgctacgccagctggaggaggcgtttgttagcgcacgtgaagatgcgcgctttcaggcggaattaacccatctattgaaaaactacgccggtcgcccgacggcgctaacgcgctgccgtaacctgacgcagggtacgcgcactaccctgtatctcaaacgtgaagatctgctgcacggcggcgcgcataagactaatcaggtgctcggccaggcgctgctggcaaaacggatgggcaaaaccgaaattattgccgaaaccggcgccggtcagcacggcgtggcctcggcgctggccagcgcgctgctgggcctgaaatgccgcatctacatgggggcgaaagatattgaacgtcagtcgccaaacgtctttcgtatgcgcctgatgggggccgaagtgatcccggtgcacagcggctcagccaccctgaaagatgcttcgaatgaagcgctgcgcgactggtccgggagctatgagaccgcccactttatgctgggcaccgccgctggcccgcatcctttcccgactatcgtacgcgaatttcagcgcatcatcggcgaagagaccaaagcgcagatcctcgaaaaagaggggcgcctgccggatgcggttatcgcctgcgttggcggaggttccaacgccatcggcatgttcgctgactttatcgacacgccccaggtcggactgattggcgttgagcccgctggcctgggtatcgagacaggggaacacggcgcgccgttgaaacacgggcggaccggcatctatttcggcatgaaaacgccgctgatgcaaaccgatgacggccagatcaaagagtcctgctctgtttccgccggcctcgatttcccggccgtcgggccgcagcatgcctatctgaacagtattggccgcgcggaatacgtttcggtcaccgacgatgaagcgctggcggcatttaaaaccctgagccgttctgaaggcattattccggcacttgagtcatcccacgccctcgcgcatgccttaagaatgatgcgcgacaatccacaacaagagcagctgctggtggtgaacctttccggccgcggcgataaggacatatttaccgtgcacgacattctgcaagcgcgaggagaaatgtga

SEQ ID NO: 172095 - DNA, 909 bp, Klebsiella oxytoca
atgaatgtaaaccgttccgatatggccgacctggtctatttttgcgccatcgctcgtcatcgcagttttagtaaggccgccgtcgagctcggcgtaagcgcctcgacgctgagccatgccctgaaggggtttgaggcgcggctgggcgtgcgtctgctgaaccgtacgaccaaaagcgtaaccctgacggcggcaggcgagagtctggccagcgcggtgagcgagccggtggccgccatcgatggcgcgattgaacagctcaaccagtttcgcgactcgcctgcgggacatattcggctcaacgtcgccgtcgaggcagccacgctgctgctggcgccgatcctgcccgtttttgccgaacgctatcccgatattgagctggatatcgtggccagtaaccgcattgttgatgtcaccgaagcgcgttttgacgccggtatccgctatggcggaaccgtaccggaagatatggtggcgcagcgcctctccgccgatgtgcgctgggtcgtcgccgcgtcgcccgattatcttgcccgcttcggcgagcccctgcaccccaacgatcttcagcaccaccgctgcgtcagcaaccgtctgggaaacaatcggatttataaatgggagtttgagcgcggtgaagagcagctgacgatcaaagtgccgccgctgttaaccgtcgatctggcggagacgggcgtggtggccatccttcaaggattcggcctgatgtacctgccggagccgctgattaagcagcacgtcagcgaggggcgcctgcgtctggtgctcaccgactgggcctcttacgggccgggattctatatctattactccagccgacaccagatccctaccggattgcgcctgctgatcgcactggtccgtgaactgcagccgctcggtttgtag

SEQ ID NO: 172096 - DNA, 597 bp, Klebsiella oxytoca
atgacatattcgccccgcaatttcgccggtctgctgtggtttgtggccatcgccatcgttctgtttagtcataaccgcgtcagccatgccgccgaggttaaaacgctggttatcgtctctcatccttaccctgagcaatcggtgttgacgaaaggtcttcaagccgcagcgcaaagcgtgcccggcgtgaccgtacgcaatcttgagacgctttacggctatgacagccgcaatatcaatgccgatgccgagcgtcgattgatgcgggaatactcgcgcgtcgtgtttatcttcccgacccactggttcaacatcacgccaatgatgaaggcctggctgaacgatacctggggcagcgtggggccgggcgtatggcagggtaaagagatgctgattgttacgaccgccgcgggaggagaatcgacatacggcgaatccgggcgaactggcgtcagcctcgccgacgtcttcacgccgatgaaggccagcgctctgcatgcgggaatgacctggcttcctccgctggtttttcagagcgccagccgcagtcaactgcctgagtaccagcgtcaactggtggaaaggctgaagaattaa

SEQ ID NO: 172097 - DNA, 801 bp, Klebsiella oxytoca
atgaaagcttttattgccgctgcggcaatgtcgttgatgctgggcgcgcctgtccaggcagaagaaaagagaggtgaaaaaatggttccacttagcccaaccgtactgtccgctgaggatgtccagtccgtcgcgcccgcgcttgtccgcttcggcagcgaggtgctgatagacgatctctggcagcgaagtgaactctcgcgtcgcgatcgcagcatcgtgacggtggcgattttgatcgcgcgtaaccagcccgccgagctaaaacagtatgttgatgttgccctggataacgccgtcacgccggtcgaaatttccgagatcatcacgcatctggctttttattccggctggcctaacgcgatggccgctgttgcggtcacgaaagatatctttgccgcccgcggtatccgccgcgagcagctggcttcggcatctcccgagctgctggcgcttaatcaggcggcggaaaatcagcgctcgtcaacggtggagcacaacttcggcgcaatttcgcccgggctggtgaagtttaccgctcaaccgctgtttctcgacctgtggcagcggccggggctgaaaccgcgcgatcgtagtctggtgacggtcagcgcgcttatcgccgccgggcaaagcgcgcaaattggctaccaccttaaccgggcgatggataacggccttaccgcgcaagaggcgggggagattgttgctcatgccgcgttctatgccggctggccaaacgccttttcggcagtagcggtggtgggggaagtcctgcacgctcgcggtctggcagggtga

SEQ ID NO: 172098 - DNA, 429 bp, Klebsiella oxytoca
atgctgaaaacgctcggtgcggtgctatccattttgatcatgatgacgggcgcggcatccgccgccggcagggagaacgcggtgaagattgagtttgtatttaagggcgtcacggtcgtcggcttgctggacgagagcgctgcggctagtgcgtttgtggcgcagctgccaatgacggtgaagcttgaggattatggttctacggaaaagatcgcctggctgccggagaagctgcgcgaagtggatgctggcgaatcaatgactccgcgacgcggcgatatggcctattacgcgccgtggggcaacctggctatttttcgcgaagactttcgccactcgcccggtctgataaagctcgggcgggtggaagagggactggcctcgctcgaccagcccggcgcggcaacggtgaccatcaggcgttactaa

SEQ ID NO: 172099 - DNA, 837 bp, Klebsiella oxytoca
atggcatttgtgaccaccaaagacggcgtcaacatttactttaaggactggggcccgaaagaggcgcagcccatcgtatttcatcacggctggccattaagcgccgatgattgggataaccagatgcttttcttcctggcagaaggcttccgggtgattgcgattgaccgacgcggtcacggtcgttcagatcaggtgagtgacggtcacgatatggatcattatgccgccgatgcctccgcggtggcggagcatctggatctgcataacgccgttcatgtcgggcactctaccggcggcgggcaggtcgcacgctacgtggcgaagtatggacaaccgcaggggcgcgttgccaaagcggtgctgatcagttcggttccgcccttgatggtcaaaacggagagcaatcctggcggtacgccaattgaagtcttcgatggttttcgccaggcgctggctgccaatcgctcgcagttttatctcgacgtggcgtccggcccattttatggctttaaccgcgagggcgcggaggtgtcccagggcactattcagaactggtggcggcagggcatgaccggtagcgcaaaagcgcattatgaggggattaaagccttctctgaaaccgaccagaccgaagatttaaaagccattacgctgccggtgctggtgatgcagggcgatgacgatcaggtggtgccttatcaaaacgcggcgatactgcaggataagctgctgccgaacagccagctgaaaatttatcccggctttccgcatggcatgcatacctcccacgccgatgtgattaacgccgatctgctggcgtttattcgctcgtag

SEQ ID NO: 172100 - DNA, 219 bp, Klebsiella oxytoca
atgtttccagaatacagagagctgatttctcgattgaaaaccacgcacccgcgctttcagtcgctattcgaaaaacataacgcactcgatcacgacatttcccggatagaaggagtcgatggcaaaggatacagtctcgagctcgtacagatgaagaaagaaaaacttatgttgaaggatgaaatgctcaaaatcctccagcatgaaagcctgatgtag

SEQ ID NO: 172101 - DNA, 894 bp, Klebsiella oxytoca
atgaatgttgaagaacccaccgttgcgttgattggtcccggcgcaattggcaccaccatcgccgccgcgctgcacgaggtgggtcgaacgcctctggtatgcggccggcgcgctcacccgcagctatcgctacgtttcgatggcggaacgattgtggttccggggccagtcgtcactgaaccgtcttcggtcgttgcgccgttcgatctgctttttgtggcggtaaaagcaacgcaaattgccgctattgcgccgtggcttaaagcgctatgccatgcgcaaacggtggtttgcgtgctgcaaaatggcgttgaacaacgagcgcttttcgcgcctcatgtcacggaagcgacggtactgccgtcggtcgtctggttccccgcgcagcgcgaaccggaagcatcagtctggctgcgggcgaaaccgcgcctgacgctgcccgatgcgcagggggctgaacgggtacagtatgcgctacgggacacgcgctgcgcagtggatattagcgacgattttctctccgtggcgtggcgtaaactgctgcaaaacgcggttgcgggcctgatggtactggcgggacggcgggcaggcatgtttgcgcgcgaagatatcaccgcgctggcttttgcttatctgcaggaggggctgaaggttgctcgcgccgcaggcgccaggctggacgagagcgtggcgcaggagatcgtcgcgggatttcatcgcgcgcctccggacttaagtacttctatactcaccgaccgtgaggctggtctaccgctggagtgggatattcgtaacggggtcgtgcagcgttacggccgtatttaccacattgctacgccgttaagcgatgtgattgtgccgctgctggccgccgccagcgacggtcccggataa

SEQ ID NO: 172102 - DNA, 249 bp, Klebsiella oxytoca
atgttacgagattttttgaaggtagaaaaagaggatcgactggtggaacagcaggacgccagcagcgataacggcaattcaacggacgtcaccgaatggataattgtgagtaaaaatggcgataaaaaaggccgggtggcgttattcaatcaattttccacccgtcgttcgtattgcgtgaattatcgaattacccagtttgataatagcggcaaagttgtcgtagaccggctggcagaatctctctaa

SEQ ID NO: 172103 - DNA, 972 bp, Klebsiella oxytoca
atggccatcattcgaacgttaaacggggatatttccgctaatcagctgggcgtaacctacagccacgaccatatctactgtattccgccctattgggccgagcgtcaggatgacgacctattgctcgacgatccacaggcttctgagcgtgaattaagcgacttccgccaggcgggaggcaatgccatctacgacgccaccgcgccggattatggtcgtcaggccgctgccgtcgcggccatggcgcagcgccagcagctgcacattattgccaccgcgggttttaacaaagggtttctgtggagtagtcagcgaccgggcacagcgcaaacttttgccgagtggattgagcgttctgacgtcgacgaactggttgaacacgtttgccgcgaggtcaccgagggaatcgaaggcaccgcgcatcgggccggcgtagtgaaatgtggcaccggctataacgccatttcccctctggaatacaaaaccatggaggttatcgttcgcgcccagcagcgtaccggggcgccgatgcacagccatacggaaatggggacgatgggactcgaacaggcgcggatctttaaaaaatggggactggatttgtcccgcttatgttttgcccatatggatcgcaatcctgacccctggctgcaccgtcagatcgccaacaccggggcgtttctctcatttgacggtatcagccgcattaaatatcaccctgagcacattcgcacccaggccatcctggcgctctgccagcgcggttatcaaaagcagattttgatcggcggtgattttgcccgtaaatccatgagcgcgcattacggcaaagggggactggggctgaagttcatcctcagcgactggcggccaagattcatggaagaggcccgggaggcggggtttgacggcgaagcgttgctgcatgatttcttcgtcgaaaacccggcgcgttacctcgcttttgcctga

SEQ ID NO: 172104 - DNA, 741 bp, Klebsiella oxytoca
atgaagctgcaccatttaaatgagcgcgaggccaggcgggcgctacaaaaggcgcggatagccttactgccccttggcgcggtcgaaccgcacggcgaccacctgccgctggataccgataacctgctggccgagcggttttgcgcgcggcttgatgagcagttgggcgagtgcgcgctgagcctgccggttgtctcctatagtcaggtctggtcgctgcgcgggcatgcgggcgcgattgatatcggtaatgaacggctgacgtcgctgctggtggcgctggcggaaaacatggccagctacggtattaccaccacggcggtgatcaacgcgcattacggcaactttgacgcgattaaagccgcttcccgccagcttaaagagcagggcatcacgctgcttagctacagctgggcgggtatggatgaagaggtaaaaaaacgacaaacctcggcggtggcttatccgggatatatgcatgccgacgaggtcgaaacctcgctgatgctggcgctggcgccggagttcgtcaacatggcggaggcgcgcgcgcactatcccgaattcccgcagaattttcgctatcagccgatgcgctggaccgagttttctgcttatgcggtgctgggggaccccaccctggcgagcgaagagaaagggcgcgcgtttgttgcccgggcgctggcgaccaccctggcctccattcgccaccacttaacgcaaggagcccgtgatgattga

SEQ ID NO: 172105 - DNA, 444 bp, Klebsiella oxytoca
atgattgaacgtcagtcgataaccgttgactgcccggccgctaccccggaggaggctattcgcaaggcggggaacgcgctgtgccgcgcgggggcctgcagcccgcaatacgtccaggccatgatcgccagctatcgcgagctgggcccttattttgtcatcgcccctggtctggccctgccgcatgcccgtccggaacagggagcgatcaaagcgcaaattagcgcgatccggctgcgcgaaccgctggcgtttggtcatgcggaaaacgaccctgtgcgggtggttctgggcctttcggctaccagcagcgacgcgcatatccaccttatccagcatatcgtcaccgtgctcagcgatgaaaataatctgcataccctgatgcattcagacgatccggaacaactttatcggctgttggccagcggctcacagcgtttatag

SEQ ID NO: 172106 - DNA, 288 bp, Klebsiella oxytoca
atgaaaattctgacagtctgtggtttaggtatgggctccagcctgattttaaaaatgaacgttgaggcggtattaaagcagcacgggattcaggcctccgtggaacatatggatgtctcatccgccgcgtcggccaacgccgatgtcgtcatcaccaatgccgaactggtggacaacctgaagcaactttcctgcccggtggtggtagtaaacaactacattgataacgcagaaatcaccgcggcgctgacccaggcgcacattctgcgcgcgggagagccaacatga

SEQ ID NO: 172107 - DNA, 1311 bp, Klebsiella oxytoca
atgagcgagtttcttggcgtcctgcgctggatcaccatcaacatatttggtgaggcgtcgattttaattggcctgatcgtgctgctgggactggttttgcagaaaaaatcgctggcagacattgtgtccggcaccctgaaaggcattctgggttttctgatcatcggcgcgggggccgggattatcgtttccgcgctactgatctttcagccgatctggaccgaagttttcggcctcagctcgatgaatctgaccaatattatcggtcaggcgcgctttagcgaacgctacggaagcagcgtgacgatcgccattgccggcggtttcgctatcaatctactgctggccaggctgacgtgctttaaatatatctatttgaccggacacatgatgttctggaccaccatgatatttgccggggtgatggtgaacaccgagcccgctatttctgcgctacagctgacgctcatgctgacggttatcatgggactgtactggaccttgcagcccgcgctggttcagccatgggtacggaaaattaccggcaacgataacgtggcgctggggcatacttccgcctcggtcgcgctgctgggggccattttcggccagatcttcgcccgtaataaaatcagttccgaagatatcaaagttcctaaaaagctcggttttctgcgcgattccaacgtggtgaccgcgttaaccatggcgctgctgttttttatcggcacctttattctgcaaatcaaaggcaccccgaaagcggcggagatccttgcgcaatccggcgacctgagcttctacatctatgcccttaaacaatcgctgatgttcaccggtggcatcgccgtggtgctgctcggggtgcggatgtttattggtgaaatggtgcccgcgtttaacggcatcggctcgcggctggttccgggggccaaacctgcgctggactgcccgattctgttcaactttgcgccaaatgcggtggtgctggggttcgtcggcgcctttgtgggatcgctgctgtggctgaccctgatcggccgctataccggctacgtatttattcccagcatgatcgtcattttcttccatgccggtacggcaggggtcttcggcaatatcaccggcggctataaaggcgcgctgctggcgggatttatcacctcaacggtggtcgcctggggacaatatttctgcgtgaccggctttatcaacaacacgatcccggatacggcgctgtgggcgggcgatagcgatatgtttgtcctcgcaccgttaatccatcttttgacccgcttgctgacgttctga

SEQ ID NO: 172108 - DNA, 741 bp, Klebsiella oxytoca
atgagccaggcactgaaacagtattacagtcagatccgccagaagctggggttgcttgaacagcgcgccgatgagctgaaccgggcggcagaaatgatggcccacagcgttctggcgcagcgcaatatcttcgtctttggcgccagccacgccggtattctggcggaggagatgagctatcgggcaggcggtctggccatcatcaacccgctttttacccctgcgctgatgcttaacgtcaggccgttaacccttaccagcgcggtggaaaatgtggaaaatcttggccgcgtgctggttgaacagtcgccgctgagggccgacgatactctgctgattcactcagtgtcggggcgaaatgcgattacgatcgatgccgcgctggcggcaaaagcctgcggagccagggttatcgccattaccagcctggcgacggcggcacgagtctcttcccgccactccagcggtaaactgctggtagacattgccgatatcacccttgataaccactgcgagtatggcgatgcggcggtgagcctgccggggctggcgcagaaagtggcgccgctctccaccatcatgggggcggccatcgccaacagcctggtactgcgtatttgcgaaattatgctggaaaatgcgcgcacgccgccggttctcgccagcgcaaacatagacggtaatcaggagataaatcaggatatactgagcgcatacaggagccagatacactatctctga

SEQ ID NO: 172109 - DNA, 756 bp, Klebsiella oxytoca
atgtatgagtcggatggactccctctctatttaagaataaaagacgttatcctgcagcggatcctctcttttacctatgacgataaactcccgggcgagctgctgcttgccggggagttcaaggtggcgcgcggcacgattaaacaggcgatagattcgctggccagcatcggtatggtttatcgcgagcagggaaaaggcacgtttatcaaccgcgatgcgttgcaaaaatactacaccgacctgccggacgtactgaccacctttgctgctcccggcgcgatagaagtggaggtgctgtcgctgatttcaaccatggccgaccgccacgtagcggaacagatggggctcgatttgggtagccaactgatgcgtctggagcggttactcgtgcagggtgagcggccggtcggccacgtgctgacctggcttaacggccgaatttataacgacctgagtcacgtggacggcagccgatcgctctataaacagctgcgggaaacattcggctactcgccggctaacgcgaccgaacgctatacgccggtgtgctgcgatatccgcacggcgggattgctgaatattgaacccgggcgtcctctgtttcgcattgagcgcgtcgcgcgcgatcttgatgacgtggtccttgaatacagcgtcacccatactctggacgccagcctgtcgctacagatcgccaccagccagagtagcgtgagtcagcagtggaactgcacgatcgagaaagggcgctga

SEQ ID NO: 172110 - DNA, 1308 bp, Klebsiella oxytoca
atgaaaaacaaagtggttaatcgtcgcctgctgtccagtgttgtcatcaccctctgcagcggcctgctggcccccatcgcgcaggccgcctgccccgggaccgaacttagcgcgtgccctgctccctttgatgcacagcttccggatacccataaaatgctcacctggagccagaccgaccgggtaatcggctttcgtaacgactaccgcaattacgcaggcgatgtgtttcatcacggtcatgccgtaccgttgcaggccgcagcaaaacggttaactcacgccagctatcaggttaatggccacacctggaccctgcaggattatctgcagcgccagaacgtcagcggcatgctggtgctgaaaaatggcaaagttgcctggaaatatctggcggaaggcaataccgacaccaccctctggacctcgcgctcggtgggcaagtccgtggtttccacgctggtgggcgtggcgattaaacagggcaaaattcactcgcttgacgatctcgtcacccagtatgaacccgacctgaaaggcaccgcctgggaaggcgtgacgctgaggcagctgattagccacacctccggggtggcgtggaatgaggactacactaatccgcactctgacttcgcccggcttaccgagtgtgaagccagacccggcgcctatgactgcgtacgtcagctggtgtccggcctgcgtcgggcgcatccggccggagagaactggtcttactcctccggcggcgcctggctactgggtgatgtcctggaacgcgccaccggtatgacgctggcggcgtatctggagaaaagtatctggcaaccctacggtatggcgagcgatggcgtgtggcatgcctatacaaaaggtgagcacgacgtgggcgcgcatggctttaacgccacgctagaagattgggggcgcttcggtgagttcatcctgcataacggcgtgttgccgaacggcgagcagatcttgccggaaaactgggttgccgaatcatcaaactggacccgggcgacaggttcagtatccgcggcacatccaaacggtctctacggctaccagtggtggaacaatgaagtgccggtcaatgccagcaacgttgagcccgctccgcaggcatcccttcaacattcgctgtgggcgctggggatatttggtcagatgattatggtcaatcaggcggaaaacctggtcatcgtgcagtggtcgacctggccgcaggctgaaccctccttcagcgcccaaccgcttgaggcgtcgctgatgtttagcgcgatagcgaaggcgttacgctaa

SEQ ID NO: 172111 - DNA, 879 bp, Klebsiella oxytoca
atgccgaccctgatgtattcttttgcccaactggaagccttcaccgctgtggttgagtgcaaaagcctggcgaaagcggcgcgccagctgggcaaggaccgcacgacgcttcgcgatttgattgagttccttgaagatggtctggggtatgcgctgtttctgcgtcaaggtcgcagcttgcagctgacgccggagggggaacagctgcagcgtcaggcgcacctgctgatgcgccaggtcaaagcctttgaagcctttgccaaagaagtgccgaatagcgccacgcaggatattacgctggcctacgatccctttacccccagaacgttgttacaggcgctgattggcgccatggcccggcgcaacgttcgtctgagcctgattaacgcctcgcgtgacgaggcggaaaggctgctggcgagtggattggccgacctgggtatctgccaggcgcgacatcgcagcgtgggcgacgctatggagtggcgcgccctggggtcaatcgagatggatttttacgcctccgaagcgctttttcccgccgctaaacaaccgctttctctgctggaactttcgctggcgccgcaggtgattatgcacccggatactgacgagcccgtggcccgccgtctgcagatttcagggcgcaccatttttaccaacgaacaggagatgctgcgcgccctgcttgaacagggctgcggctggggatttttgccgacgcacatgaatgcggcgcggtggaaaaacgtcaaaaaattgccgaccgaagtgggtaatcaggggatcggccaaacgatggtgaccatctggaagcccggcaacgacaggcgcacgctggtggctgacgcgctggccttgttgccggaactgtggtga

SEQ ID NO: 172112 - DNA, 1119 bp, Klebsiella oxytoca
atgaaacaggtcggcattattggttggcgtggcatggtaggttctgtattgcttcaacgcatggttgaagaaaacgatttccgtgatatcgctgcacatttttttagtacctccagcgcggggaccgttggcccaactatagatggcgagagttttatccttaaagatgcgaattcagtcagtgaactcgccgatatggatattattatcacctgccagggcggcgattatactaaagccatttatcccgcacttattacgcatggctggcagggttattggatcgatgcggcatcggcgcttcgcatggatgaaaaagcctgtatcattctcgatccggttaaccgtacccatatcgatcgggcaatccaacaagggctaaaactttttgtcggcggtaattgttcgattactctcagcttgatggggctcgccggcttgctcaaggctgacctgatcgaatggatgagcgtgatgacctatcaatctgcatccggcgctggcgctaaacatgtcagagaattaatcgcgcaaagcgcctgggtgagcaatcatttgtcggcagaggaattgaccagctccggctcagtccttcctttagtcaataaagtcagcgaactgattaacagcgcgggcatgcccgtccaacacttcggcgctcccctaatgggaagcatcattccctggattgatgccgatttaggcgacggcaatagccgcgaagagtggaaaggcgaagcagaaaccaacaaaattctgggcttgccccgcggaactattcccgtgaacggtttatgcattcgggttggcgtcattcgctgccatagcgcagcgattaccttaaaattaaagcgtgaagtcagcgaagctgaatttgctgaattagtgggtaatgcccatccctgggttaactatgtccccaataataaaaacgacagcgtcagcaaattgaccccagcctatatcagtggctcgctgcaggtaggcataggccgttataaaaaaatggccctgaataatgaacctgtatattcggtactcaccgttggggatcagcttttatggggagcggcggagcctttgcgtcgtatgttaaatatcttgcttaatcgcgtttaa

SEQ ID NO: 172113 - DNA, 219 bp, Klebsiella oxytoca
atgggtattgtaaaaatttcagacctgctgcacgacgatattcgtgacgccagtaaggcgatgtcgcgttcggtcaacgcccaggcggagtactggatccgtctggggatgatgagcgagctctatcccgaacttaaccatcagcaaatcaagctgatgatgctcaagtccggctctgaccggttgctggaggtgatcaatgctatcaattcccattaa

SEQ ID NO: 172114 - DNA, 780 bp, Klebsiella oxytoca
atgctatcaattcccattaaaaccacgcaggagctcgccagccagcgccatgccggcaaactgctggcctcggtcttcgacatgttggatagctttattcagcccggcgtctccaccatggccatcaacaatcgggtggaggattttatcgtcaacgacctgcattcgcgtccggccagcaaagggcagtacgattttccctatgtgctcaatacttcgatcaatgaagtcgtttgtcacggcatgccaaaggaaagcgagctgctgaaatccggcacgatcgtgaacgtggatattacgctggagaaagaggggctgattgccgattccagcaaaatgtatttgattggcgaggtttcaccgctggcccgtcggctagtgcagaaaacctatgaagctatgtggaagggcattaaggttgtcagaccgggggcgacgctgggcgatatcggccatgcgatccagacttatgttgaaggtaatggctacagcgtggtcagggagtactgcggccacggcgttggcagagagatgcatgaagatccgcaggtgctacattacggcaaacccggcaccggcgccgtgctcaaggaggggatggtgtttaccattgaaccgatggttaatcagggcgatagccgaataaaaaccaggaaagacggctggacggtggtcactcgcgataaaaaactgtctgcccagtgggagcataccgtcgccgtcaccgccgaggggtttgaggtgctgaccctgcgaaaagatgaagtgattccggattag

SEQ ID NO: 172115 - DNA, 1452 bp, Klebsiella oxytoca
atgcgatgtaagctgatctggttacaacgcccttcttgccgcctcaccctccagagcaaaaacacggagagcggcaaatccattattcacacctgccctgcaggtgttttttccacagggagatttaccgtgagatttgcatcagtacctttcaatcaaaatcaggtgggatggccgcttaatgaagaagatctttatcgccagccctcgctgagcggcgacattaaagctgactgggtggttatcggttccggctatgccggggtaagctttgcccgcaggctggccagcatcaacccgcagctgagcatcgtgctcattgacgcagaatgcgccgcgaccagctcctcggcgcggaattccggctttattatcggcctgccgcataatatcggcagctctaccgccgagttgaaaaaggcgcaggactatcgcgctctgctgcaggaggggatccgcctgctcgatgacacggtgaccaaacaccagatcgattgcgaatgggaaaacgtcgggaaataccactgccagatagatccgtccagcgaagccattatgcaggagtacgtggataacctgcagctgatgcaggaaccttacagcctgctgaacggcgaagagctgtatcaaaagctgggaactcgcctttacagcaaagggatttacactcccggctgcattctggtgaatccggcaaaactgatcgcgggcctcgcgcgccatctgccggataatgtcaccgtgtttcaccagaccccggcgctggctcttcaccaggaaaacggcggcgtcagggtgacgaccctgcagggcaccatccgcgccgaccaggcgatgctcgccaccaatgcgctctcccgcgagctctcgccaaccgtgagccgccaggcgtcgatggcgacctacgccagcattactgccccgcttacgcccgatcagcgccagcgtctgccggcgatggagagctggggattaaccccggtcaatgcgatcgccggggccaccctacgctatacccacgattatcgttttcttgtccgccagcatgtcgatccggcattgcgcggcgtgattaccgccggacaaaccgctaacgccgcaagacagcatctggcgctgttccatacggcctatccgcagctgcaggatgttcctctggagcgaacctggtccgggaccatcagcgtcacccgcaacggcgcgccggtctgggggcgtcttgcgccgcggatctggactgcggggggctgtaacggcgccggcgtatcaaaacagaccatcgccgggacgctgcttgccgatctggcgatgggccaggacaacccgctgatcgccgcgatgcagtcgctcggccaggccaactttatgccgccctccccgttcctggatattggggtggcgggcgcgttatggaaagagcgttatatgggacgtaaagagatgcccgtatag

SEQ ID NO: 172116 - DNA, 546 bp, Klebsiella oxytoca
atgaaaattagcaaaattgcatctgctgttgttctcactatgggtgtcgcctctttcgcagctcaggccgatcagggaagcggcaaggtcaccttctggggttcgattattgatgctccatgctctattaaaaatggctacggcgatcagcgtatcgaactgggtcagatttccaatacgcatttggataacggcggcatctctactcctcgtccgttcgacattgaactggaaaactgctccttcgagaaggattcaaacggtgacccgatgtataacaccgtcactgtcaccttcaatggcggtaacgttcctaatgacatgaccatgctggctatcaccggtcaggctgctggcgcaggcgttcgaattcaggattactcaggcacgatggtgactttagataagccgactgccggacgcattcttggcattggcgacaacaccctgagctttagcgcttacctggaaaaaattgcgtcagtgactaatgtcactccgggtgattttgaagccgtgactaactttaccctggcttatcaataa

SEQ ID NO: 172117 - DNA, 534 bp, Klebsiella oxytoca
atggtaaaaattatgcgtttcctgacatcaagtcttttattgggaatatcttcagttgctgtggcatccgagcaaggcatggggctcgtcacaatgaatggtcaaattcaggaatcagcctgctctatccatactgatgatatctggcaggaaataccatttggggtaatttcttataatgaccttgaccaggaaggtaaagcgattattaaacccttcgctgttcgcctggtaaactgttcactggaaagaagtgatggcggtttatggcaaagcgtcaacattacttttagtggggaaacggaagtatttcgtcgcgatatttttaaagtttatggcgacgctcaggggcttggtttacgtattcatagccaggtcggcgatgtggcgcaagacggaattccgatgcctgccgtcatgttacaaaatgataataatgaattgcgttatttattatcgctggtgcgcggcggaaaatcgttgtcggaaggtgactggtacggaattattcgctttatggtgacttaccagtaa

SEQ ID NO: 172118 - DNA, 2502 bp, Klebsiella oxytoca
atgaaaaaaaacagaccaccagcttattacctgcggcgtctgggcgtttacattgctattgccatttttggttctacatcacccgttgtggcggtagagtttaatgtggatattctggactcagaggaccgtgagaatatcgatttatcccgcttttctcgggctggatatattatgcccgggacctacacgctgagcatgcgccttaacgaacatgggatttccgatcaggatatcactttcgttgaaagaactcgcgacgatcaactggttgttgaagcctgcctgacgcctgagcaagtcgacttactcgggctgcgtgaagatgcgctcaaaatgattcagtggcttgatggcagtcgttgtgccgatttcactgcgcttgaaggtattgtcttgcgtggcgatctgtccgaatcctccttgcaaatttccgttcctcaggcgtggctggagtatcaggatgcgtcctggttacccatttcccgctgggaagacggtattcccggtctgctgtttgattacaacctcaacacgaacgtcacgtttccgcggcgcggcaatcaaagccagagtgccagcgttagcgggaccaccggggttaaccttggtccgtggcgcttaaggggggattaccagggaagctattacaacaccactggacgcccaaatagcaccacccgtaattttgactggagccggttttacgcctatcgcgcgctgccgggcatcatgtcaaagctaaccgtcggtgaggattatctcacttccgatctcttcgattcgtggcgctacacggggctatcgctggtcagcgatgaaagccagctgccaccaaaactgcgcggctatgccccggaagtttcaggtattgcgcggacgaacgcaaaggttacggtcacccagcagggacgagtgatctatgaaagtaccgttgctgcggggccgttccgtattcaggaactgagcagcgccctgaccggcaggctggatgtgcgggttgaagaacaggatggatcgattcagacattttccgtggatacggctcaggttccctatctgacgcgtcccggccagcttcgctacaaaatgaccacgggtcgcccaagggattatcgccatagtactcagggaccttattttgctaccggtgagctctcctggggcctgacgaatgcctggtcggtgtacggcggcggtattttctcgcaggactacaacagcgtggcctttggggcaggcagggatatgagtgtctatggcacattgtccgctgacgttacccatgccagcgcccgcttcccgggggataaaaaccgtcacggacgatcctggcgactcagctactccaaacgttttgatgaactcagtagtgaagtcacgtttgcaggctaccgcttctctgagcgcgattatctcaccatgggtgagtatttagatattcgctaccgggaaggttatatcggtaatagtaaagagctgtataccatccaggcgaccaagaattttgaggatctacgcctctccacgagtattaactggtcgcatcagacttactggaaccgaccggcgaccgatcgctacagcgtgtctctcaataaatattttgatctcggcgactggcgacatctttcgttatcgctcaacgcggcgcgcagcgaatttaacggacgtaaggatgacaccgcctatatctcgctcaccatgccgtttggttcaggcacggttggctataacggaagcattaatcgcgaccgctatacgcaaaacgccagctggagcgatcgtctggaaaataatgattattaccgcattaatgccggtaacagcatgggcggcgggcaaggaacgcgtagtcagatgagcggctattactcgcaccttggcagtatggccgatgtcaccaccaattttaactgggcacaaagccaatatacctcttttggtatctctgccagcggcggaatgaccgctacggctgaaggtgtggcgctgcactccggtggggtgcagggcggtacccggatgatgatcagcactgacggggtgagcggagtacctgtgggctatcagggctacagcaacgcctttggtattgccgtgatccctggcgtgccgaactatttccgcaccagtgccgaaattgatgttaatcgcttaccagacgacgtggagacttctggctcgcctattgctgagctggcgcttaccgaaggtgccattgggttccgccgtttcgatgtgttaaagggcgcgaaagtggtcgccatcctcagccaggaagatggccgtcatccaccgtttggcgcgacggttcataacgctaaagagcgagagctgggaatggtcagcgatggcggattagcctggctgaccggcgttaacccggatgaacatttaaccgtgcactggggcggttctgcccggtgtgaagtcgtactgcctcgagtcatccctgcacagcagctattactgccatgcaaaccgatatctcgcggctga

SEQ ID NO: 172119 - DNA, 735 bp, Klebsiella oxytoca
atgaaagtaaacaaaacggtgatggctattctgctgggaacgctgacgtctggactgctcaatggtgcagaagcggcgattgccctggacagaacgcgggcgatttttcccggttcggagaagagtatttccctgaacattactaacgacagcgcatcaatgccgtacctggcccagggatggatcgaggatgagcaggggaaaaaaataagcggtccgttggtcgtggtacccccgctacagcggcttgaggcaaagagtaaaagcgttatgcgcatcaatgcaatgccggatgcgtcgttattgcctcaggataaagagagccttttttattttaacgtgcgcgaagttccgccgaaaagcgatcggcctaacgtgatgcagctagcgctgcacaccaaaataaagttgttctatcggccaaaagccatcctgccggagaagtatagccgttgggataaccagctggtgctgcagaaggtaaacggcggatatcgcgtggagaatccgacgccttattacatgacggtgattggcattacgccagcgccgaacatggccgtagcgaaggggttccagtcggtaatggtcgcgccaaaatcaacggcaatggtgaatagctcgcactttacggcgcctcacgtcaccacgattaacgactttggcggtaaacccactttgccgtttagctgcaacggtaacgtctgccgggcggcagccagacccgcatcttga

SEQ ID NO: 172120 - DNA, 594 bp, Klebsiella oxytoca
atgaaacatggattcggtcgtaccaccttgattctgtggctgttaacagccggagtcgtttctgtggctagtgccgcaaattgggataccgacggcctcaacggcggtattcgcgccacgggcacgctggttgcgtctccgtgtgtattgttgcctgaatcggcggagcaagagatcgatttgggcagtaccgttgcctggggactggatcgtcccggttcggtcaccatgccagtcgccatatatatcaaattagatcgttgccccggagagtatcagtttatgcgtgaccgtcagttaatgcggggttcgctactgctaaacgggcagtccgccgtaagaatgacgatttatggagaagtcgaacctacggatagccggttcttccgggtgcaaggcggcgtgaaaggggtagcgctgcgattgagcgaccagcggggcgagcttctgcgccctggtatgtctggtcggccgcagattctgactcccgggcgcaacgatctggtttttcaggcgcagctgtggcgtctccctgcgtcgctgatggccaacgaatggcgcagcgtagtgaatgtcggcctggagtacgaataa

SEQ ID NO: 172121 - DNA, 525 bp, Klebsiella oxytoca
atgaaaagtcacatagcgcgagcgctaagtctggtgggctttcccatgctgctgctggtcagtattccggccacgcatgctgatacggacgtcttcttcaccggtaacctggtggccgatccgtgtgaactgcacgttgattcagaagatcagattgtggatttccgcaacataccgtcaaagacgtttattaaatatcacctgagtgaacgcgagcgtttctccatcatgctcatcaactgtgacctgtcgctgggaagcacagtagaggtcactttcatgggcgcggaggatgtcgatcagcccggacttttcgcggttaccggcacagccgctgggatcgccatcgccattgaagatgcggatggtaccccggtgttacctaacaccaaaatgcggccgaccgctttgactgcgggtgacaccaatttaaattttcaggcttttgtctccgcgccggttcatagccgggtgcgtgaaggcgattttgaatgcgtgacaacatttttgctggagtacgactag

SEQ ID NO: 172122 - DNA, 753 bp, Klebsiella oxytoca
atgaagaaaacactcgtttttgccacggttgcagtgttatcggcgagttgtttgttacccgcagaggcggcgttaacggttagccgttcacgagtgatcgttaatgaaggtgacaaaagcgtcagcatgagcgtgacgaatcgtaatactcaggaaccctatctggcgcagacctggatagaggatgaagcagaaactaaagtgacgagcccattaatggttctgccgccggtgcagcgtatcgaagccggagccaaaagcgcggtgcgcgttcaggtgctaccggatgtcagcaagctgccgaaagacagggagagcgtgttctggttcaacttacgcgaaattccaccgcgcagcgataagccaaatgtcttaacgctggcgctgcagacccggctgaaaattttctggcgtccggcttctataaaggtcgatgcgaaatccgaatcctttcccggcattcagaacgtgacgctggccaaaaatggcaacaactatacgctgaataacccgacgccgtaccacctgacgtttgtcgaaggccgcagcgccgtgaaggggaagggcaaggaaggctttgaaccggtaatggtggcgccaaaggcccaggcgacgctgaacgtaggcgcatctgacctgggcgcaacgccagttctggtttttgttaatgattacggtagcttacgtttgctgccattccagtgtaccggttccgtctgtaaggcgctgccggttatcacgcctgaaagctga

SEQ ID NO: 172123 - DNA, 507 bp, Klebsiella oxytoca
gtgaaaattgggaaattagggcgccttgcggctttatgctgcctgattgcctcatcaccatatagcctggcatctgacggtgggacaactacgttgactatcaccggcaacattgtcgaaccagattgtgtgattaataacaatcagcagatcgtggtggattttggtgaagtgctgacgacgcgtattgacggttcgaactatgaaacgccgattgtctatacgttgagctgcgcaaatttaattcgtaacacgctaaaaatcaatatcaaaggcaccggagcgtcatttgacagccagctgtatatgaccgatgtgaccggcctcggtatacaggtctatggcgctggtaaagccgttatcgtccccaattctgggacgctgaattttacctatgctgccaatagcccaccggcgctctatgcggtaccggtgaagcagaccagcgcgacgctgccaaacggggcgtttaatggttcggcgaccatggtgtttagttatcaatga

SEQ ID NO: 172124 - DNA, 516 bp, Klebsiella oxytoca
atgcgtcagctaataacagccgcacttttactggaaatcctgttggttggcgtcagcccggcgatggcggccaacgaggcagacatcatttttaaaggaacgctggttaatccgccgccgtgctcgatcgacaacgataaaaccattcatgtaccgtttggcgatcgtctgtcgatcaaaaaggtcagtgatggcgtttatcgtaaggatgtaccgtacaacctggtctgtgacagcaccgctggtaaagactggaaactgatgcttagcgtacggggaactctggcgacatttgatacgaccgatcgcgcgacggttgcgacatcgatgggcaatattggcaatcttggcgtgaagatcctacgtgacggccaaccttttcagtttgattcgccgatagaaatcagtctttcggcgataccaaaaatcgaagcattgttggtgcaaaggccgaatattgagttggctgaagggccgttcgaggcgacggtgaccttgaaggcggaatatttgtaa

SEQ ID NO: 172125 - DNA, 960 bp, Klebsiella oxytoca
atggaaaagagaaagttaaaaagattaatactggcggcggggatcatcctcggcaatgctctgctatggtctgaatctgcttcggcggcggattgtaatgcctttggcaatcaggggggaggatgcccgacggtacaatcgctccaggcaaacggtggttcggtatcggttaactgggctagtgatttaagtgcgcagactttcgcctcaatagagggcacccgggctgctacctgggggctatatatgatttatggctggtcgacatcgatgaacggtcactggttcggcgggggaaccatgactcctattttaactgtcagcaataccgatcctgtgcgtacagtttctggcggaactacaacggattactgtactgataatccgttttattgtacgcatcagacaatggccgctcgattctttcagaaatatggtttctccggtaccgcaagcgtggcgttgccctcttcgtaccctgctcacgcaccgccatgcctgatttttggggcaataaacccgagcaccggtgatttctacactgtttttgctcctggattagcggaaccttgtcagccaggattcccggggactgtggacccacagcccgatccggaatggtgtggcatgagcaccagcgcgttgacttttgcttttggtgatatggcgccagcctcagtctcggggcagtcgatgacgaaaagcgcggtgatggcctgtagcgatgccggtgtgacttataatttatatctgagtaatgtctctaccgccggaagaaatagtcttgatttaggtcgaggcatcaccgctacggtgagtgctaataatcaggcactacaaaccaatagggtatcaacgggtacaacaaatacgttaaatattacggtgacgctcagtggaacgcctactagtacgggatcaattagtggtgccgggatattggctgtaaattatttataa

SEQ ID NO: 172126 - DNA, 255 bp, Klebsiella oxytoca
atggtgcagtgcgaaaaagagctaagtgcgttgggttcgattaatcaactcaggtattccgaattaaagactcgctttgagcgagttatgcatggcgcgtcaggatataccaccgttcgcaacgctgtaaatccagaaacgcgtaatgccattgatgctttgtataagttccaggcggtaaaactatgttcagagatccgtggggaaatgcttaatagtctggcagacaaaccaacaggagataaggtcgaatga

SEQ ID NO: 172127 - DNA, 1281 bp, Klebsiella oxytoca
atgagtcatcgggcagggaaagcgacagtcttcattcttggtatcgcgatggttccttgcgctcagactgatgttttgaattatgcccgggactggacacagcgtgagggagaaaataaatccctcgcgcaaccgcagacacagggagagaaacgtcctgtatcgcatccaaagccagaaatgcagcgggttaggcctgctaaagataagcctaatcccagactatccgctccggttaaagccaaaacggttccggctaacaacagggtggttgaagagaaagttaaaaatactcctgtagttcagccgaaagaccgtaaaaaagacgtaatcggggcgagggaaatagaaacagagagtttggttaaattccccgatgaacgtactttaggtggggggttgaaatcgttgatacaacatatttacttcacgccatcagagaaggaaataaaagaattgtacctggcgcagaaggataaagttaaacgcattagcgaaaagctagcgcgcaatgaaagtgagattgctggattgaggagcgctgagaaagagcgcctttctctgattaagcgagttgctcaactggaagaaagaaacgcacagtggcaggtgttaactcagaaaatgcaaaaaaacctgaaggatgctaaatatcctccgctgcctacaagtgaacctgaattggaggattttgcggccggcatggcaatgggtattgacattattacgctgcttgaacaacgaagtgagcaaggcgtaaaggttgaccggaccgtatttctggctggaataacggaaacattacgcggtgagcgccgcctgtctcaggcggccttcgaacaacacctaaacagggctaatcagcgtgttgctaacgctattcaaaaaaaccttaaggataaggaggcgcgcgatagcgaatggttgcagaactttattaagcaggatggtacgctggtcgccgataaggaagcctggttcagggttctccatagcggtgaagcgttattaccggataatgagtcggaagatgaattaactatttcatttacacgtcgcttcactgacggaacattgattgcggactccgatatttcaggtctgatactacaagaaaaattaaccaatctgccgacttggttgcaggtcgttgttgaaaacacgcgcttgaatggcgaagctgaattagcagtcaaagtcaatgaatatggtgatccaagtgaatatggttcctatgtagagcactggtatattcgcgtacaagaacaacagccaatgtaa

SEQ ID NO: 172128 - DNA, 975 bp, Klebsiella oxytoca
atggtatcttttgtcgaaaaaacatatttacctgtgcatattgcaactacggataattatttttctatgggggttatattccttttgaaagaactttttgaagaggagtaccacggcaaaatcatcatttcaaaggttaacgaacctatggcggccgatctgatagtacaaatacattcaccgggagagaaagtattcgactgggtgggatgtgacgattttcgtatgaaaaatgagtataaatttatgatgttgagtaaaaaatggttgagcgtataccctcacagtgagcactatgatcgtaatattgtttgtccggtcgtcagcgccgttatcactatgagaaactcagttgccactatccgtaggaagttatttaatttatttttcgccgatttaatgtgcggccctccggatttacgtaaaccaaattgcgccaattgcccagggccctaccagctggcatggcgagaaaaattgatgctgggttatttaagtcaggggttagggcattacgccatatcacaaaaaatgggttgtacaattaaagcactcagcagctatcgtcgttcaattatgcgtaagcttaatataaataaatatagtgacttcgcactgtggctggggtccagatccgtctctgaaaagtattctgatattgttaatcaatacgaacagaaacttaatgaggaaggggttatatggcaaaccaaaaaaattgctaacccagtcgaaggtaacgacgataaacaccgcgtattgcaaagcatgaaacgtctgatgatgcgccgtttgcatataagcgagtctgagggcgatgtctggctaacgacgcgtgagattgcaaacgaaatggatattagcatttatagtatgcgctatttattatgccaaatggagatggcgggggccgtagtaagcatcaaaaccgggaaggggcgaagtcatactctacgctggaaactagcaagttag

SEQ ID NO: 172129 - DNA, 801 bp, Klebsiella oxytoca
atgctaagtacgttacccgatttacacagaagttttgcagagcaactcaagcttaagtttcagtctgactcgcggattcactcccttctcgctggcggctcgattattcatggcggatttgatcaatactccgatctcgattttatcgttgtcgtagaccctggctattatgacgaagtcatggcgcagcgtagggagctcgccggaacattaggccatctgttacatgctttcaccggggaacatgtcggagaaccccgcctgcttatatgcctgtatggacctgaactcctccatgtcgatctaaaatttgtcaccctggaaatgctcactcaacgcgttgaggagccagcagtattatttactcgtgataacacggctctggagcgacaacgggtaaaatccagcgctcactggcccaacatgacgccggagtggtttgagtcgcgagcctggatctggcttcactatgcagtggttaagctgggaagaggcgaactgttcgaagcgattggtatgctggcattctttcgagagcaggttctgggacctatgctgtatcgacgggcaaatctaccgcaacgtggggttcgccgcattgaattccacagcattgatcctgacggcctgctgacctccacgctggcaacgcacgatcgtgactccgtcagcgttgccatcagaatggctgttgatgcttatatcaatctgcgagctgatgctctgcctgaaaatatcgcagacgacgcgacacgttgggcggtccttgccatgctgaaaaaggtttctgaccagggttaa

SEQ ID NO: 172130 - DNA, 672 bp, Klebsiella oxytoca
atggaaaacatacagcagaatttagacgtcttcattccgatgatggaagggatagcaaatcagttcggtgacaattgtgaagtggtcctgcacgaccactcccaggggctggaaagcagtattatcgcgattattaatggccatgtcaccggccggaaagtgggcgatcccagcagcaacctggggctggaagtgctgcggggaacggatgtcaacggcgacaggcataactacgttacgcgcacccgtgagggtaaaacgctacgctccacctccatttatatacgtaacagcaacaagcaggttataggcgcactttgtatcaacctcgacattagcgatattttacaggcggaaaaaacgctcagtaaactggccggtcattcggatagtagcgccgctaaaaaagaggacgttaatgaggtatttgttaaagacgtcaatgaactacttgattacctgattgccgagtgtatgggaattattgatgtccccgtcgccaatatgtctaagcaggataaactcaacgcgattaaatttttcgatgacaagggcgtttttcttattaaaaagtccggagaaaaaatctgcgaatttctgaacatttcgaaatataccctctatgcctacctgggagaggtcagaggggaaaacccaacaagtgacggctag

SEQ ID NO: 172131 - DNA, 1080 bp, Klebsiella oxytoca
atgttaaccacaccttatgttgcgctggatatggatattatgcagaggaatattatcgccatgacctccggactggctcgccataatattcaacactggccgcatattaaaacccataaatctgtacgcctggctcagctcgagcaggcgctgggggcgagtggaattacctgcgctaagctatctgaagcggaagtgatggctgcgggcggaattacctcaattctgctggcctatccgctgattggtgatgacaaatgtgagcgctatgctgaactggcgcgcaagattaccatgcgaaccattgtcgacagcctggctggcgcacaggggctctcacgcgctgcgctgaggcatggcctgacgtttgacatcgatattgccattgatttcggtgcccaccgcgaaggagtacagccggatcaattgctgacgttcgcccgtgaggtggcggcgcttccggggttaagggttcgcggggtatttacctatgccgggactatttatcaataccacaatgagcaggatatccgccgcgcggcgcgcgaagaagccgctctgctgatgaccagtcgggatcttcttaatgcgcatggttttcatattgacgttttatccggcggctcaacgctctcttctttttatgccgatgagctcagcggaataaccgaatcccgcgccggaaattttatttttggcgatatgaacgcgattaacggcgggatttacaccgccgccgactgcgcgttgaccatttgtgcgacggttgtcagtatcccgctgccgggctacgccacgctggatgccggtacaaaatcgctgacctccgatctttccgcgacgcccggttcttacggattgattcaggaacatccggacgtcgcgctggttaagcttaatgaagaacacggctatctgcgctatgacccggaaaaagtatcgctcgctattggcgatcggctgcatattattcccaaccactgctgcgtggtcgcaaatcttgtcgatgaaatatatgccttccgtaacggaatattgagcgaaacgataactatcgacgcccgcggcaaaagttattaa

SEQ ID NO: 172132 - DNA, 1161 bp, Klebsiella oxytoca
atgaccgatattgaattaactgccgatgaacggcaggagttgactacgctcctgtgcagcctgatacagcacccgtcggaaaacccgccgggcaatgaaaaagcggtcgcgctgttcattgctgatgtattacgcggcgaaggcattgacgttgaagtacaggaggcggtagcagagcggccgaacgtgattgcccgactcaaagggcagcggccaggcaagcggctgatcctcaacggacactctgacgtggtgccatgcggcgcagggtggtcggtggaaccctttgccgccgtcattgatggtgaccgtattattggccgcggggcggcagatatgaaatccggcgttgcggcaatgatgtacgcggcgatcctgattcagcgacggcagtacgcgttcaacggtgaaattgttttactgttcaacgttgatgaagagcgcatcaacctggggatggaacattttgtggcgcagggcgtcgaggcagattacgccgttatcggcgagccgacctcgctggagatctgcgtggcgcataaaggggtgagccgaacccgcttgaccacgcacggcaccgccggtcatgcggcaaagacgcgcaatccggacagcgccatcgacaaaatggcgcggctcctgccgggggtgctggcagagtgtcagcgggtgaagcaaaagcatcacgatttactgggcaacgcctctatgctggtgaccaccattaccggcggcagcgcgccgaatattgtcccgcaatcgtgcgttattgaaatcgaccgcagggtgctgccggaagaaagacgtaatgaaattaacgaaagcctgcaaagatcgcttagcgactcaggactaaaaccgcagcacgactacgacctcgaaaactatctgtatattccggcctcgtctattgcagagacgcatccgctggtggaagccgcttttcagacggtagaagcgctcaccggcgcggccaaaaaaacgattttcgacgccacctgtgaagcgccgttcttctccgtaggctgccagatcccgaccatcattctcggccccggtgatttagctcaggcgcacgtcaaagatgaatatgtcaaaatcgaagagctgcatctggccgcgcaaatatataccgcactggcattatctttactcaaataa

SEQ ID NO: 172133 - DNA, 462 bp, Klebsiella oxytoca
atgaatattgaacagcgattaaccgaattgggtatagtgctcagcgcgcctgtaccgcctaaattttcttatgtgcccataaaacagacgggaaatttattgtactcgtcaggtaatgattgtcgggtcaacggggaattactttatcaaggaaccctcggcagggaactcacgatagagcaggggcaggctgccgcgcgccagtgcatcatcaatattctctcatccctgaaaagctacctgggcgatctcaatcgcgtggctggctgcgttaaaatgctcggtttcgtgcagagtgcagacgttttcaaagaccagccgttggtgatgaatagcgcttcggatttactgatcgcaatatttggtgaagcgggtaaacatgcgcgttcagcaattggtaccaacacgctgccttttaatacgcccgttgaaattgaacttatttttgaaattaaagattaa

SEQ ID NO: 172134 - DNA, 1290 bp, Klebsiella oxytoca
atgtccagtcaagcaagctctcgcctgaagcgtttgcaaatcatggcattattgtttttgctcgtggcgggtattattaacttcctcgacagaacctcactttcgattgccaataccactatccgtgaagagatggggttgacggcaacagaaatgggattgttgctctcggtattctcctttggctatgcgctgtgccagctgccgattggcatggtgatggaacggttcggcgttaaaaaggtgtatggcttcggtatcttcctgtggtccgcagctcagaccgcgctggggtttgtcggctccttcagccagatgattgtcgcccgtatcgttctcggcataggggagtcgccgcacctgcctaccggcgtaaaagtcgttaatgactggtataacatccgtcagcgcggtgtgccgatggggattgtgaatatgtcatcaactctggcgcaggcgctggcgccgccgctgctgatcgccatgatgctggctttcggctggcgcatgatgttcatcatcatcggggtgagcggtattattctttctatcctctggtttatgttctatcgcaaccgggaagatgccggcctgtcggcagaagacatcgcgcacctggaagaggagacgcctccttccagcaaggaaaaggtgaccctgaaggactgggccggtctgtttaagcaaaaatcgatgtggggaatgatcatcggtttcaacggcgtcggctacatggtttggttattcctcacctggctgccttcttatctcgaaatgtcccgcggcctgagcctggaaaaaaccggttgggtagcggctattccgttcctgtttggcgctgccggtatgctggttaacggcgccgtagccgactgggtgatgaagcgcggcgcggataaaatgaagagccgtaaatggatgatctgccttggcctgctttgcgctgccggctttacgctccccgccgcttatactgacagtacgtttatggcggtcgcctgcattagtatggcgctcttctccattcactttgccggtacctcggcatggggactgatcctggtgtcggtaccgtcacggctgataacctcggtgagtggcattcagaacttcggcggttttatcggagggtcgtttgcgccaattattaccggaatgattctggataataccggttcatttaccctggcgctggtggcctcttcggtcatcgcttttatggcttcgctggtttacttctttatggtgaataaaccgattgtggacccggcggcagcgtcctgttcatga

SEQ ID NO: 172135 - DNA, 1053 bp, Klebsiella oxytoca
atgaatgaaacaccgcagttttccgttattcgtcataatcatacgcagcttgaaattcatttttccaaagcattagataacgccacgctctactggacgcgagaccgcgatattcacaccgccgagcgtaacttgattaccgatcgtatctcaggtccggtatattttgatgaccctttgcaggcgcggcagcgtatctattttatcgtggaacatgcgcaaaattcatggttgtttggcgaaagaaccctgccgatatccggtataaataatttcagggatatcggaggatatcgcggtgcaggcggcaaaagggttaaatggggcctgctctatcgctccaaccatctgtataatttgacgccgcaggctcaggcctacctggaaggtctggaggtaaaaaccattatcgattaccgcagcgccaacgaaatcgcgaaaagccccaacggctttatcggggaaaataagaccttccacctggatgccacggcgcaaaccgcagagctggcggcccagtttgccgccgaacccagcaatgaggatcgcgcgctgatcgagagcgttatacgcgatataccggcggaactgattaacggtcagggaggccaggtcattgagcagtacaggcattttgtactcagcgacaagtcaaaaaaagcctttaagtcgatgattaacgtcctgcttgacccgggcaatgcgccgaatattcagcattgtcgtgggggcaaagatcgcaccggctatggcgctttattgatactctccatgcttggcgtttctgaacaggatattatcgccgactacatgctgaccggcgcaaaccgcctggcgcgaaataatgtgaagatgaccgcctatcgacaaattaccgataatcaggatgtactcgattacttacttaccctgatcgatacccgggaggcatttatcgttgaaacactgaacaccatgaaggcactctccggcagcgttaatgcttatattaaaaatgagcttggctttaccgacgctgactttattaaaatgcaggaaaactatttacagtag

SEQ ID NO: 172136 - DNA, 852 bp, Klebsiella oxytoca
atgagcgatattgcctcttatcgggtggccgaaaccacaacccaggacaaaaaactgactaagcaggatctaaaccgtattttctggaatatccagtcaatgtccttttcctataactatgagaagttacaaaccatcggctttgcgcactgcatgatcccggtgcttgagcgactctacgctgatgccgataaagcaacgcgcattaaagccatgaagcgccaccttgagttttacaactcacaggtgaataccggcgcgctgatccttggcgtcaccgccgcgctggaggaaaaaacctcggaagaagaaaaagaagccgtggtgtcggtaaaagccgggctgatgggcccctttgccggtctcggggatagcttactcaaatttacctggctgccaatctgcggcagtatcggggcggcctttgcgcttcagggcaatattattggccctcttctgatgttcatcctgtttaatatcgttaacgtcggctcaaaatatttctttatccactatggctataacaagggcgtagacttaatcgagcagtcgaaaaactcgaacattatccagcgtatctccaacatcgccaacgtggtcggcgtgatggtgctggggtcgttaatagcgacaaccgtgaaaatatcaactccgctggttattgcggttggcgagcagtcgataaaagtgcaggagatgttcgataaagttattcctaacttgctgaccctgctatttgcgctgggtatctttttcctcgtcaaaaaatttaagggcaaacataccgtcgcgctcatcatcggcatgatgtgcatcggcgtcatttgttcgatgttgggaattttaaattaa

SEQ ID NO: 172137 - DNA, 795 bp, Klebsiella oxytoca
atgttaattgaagcttttctggtcgccatctgggcagggatctgctcactggacgacgtcgggccgcagatgctgcgtcgcccgcttctgacgggaaccgttgctggaattattatgggcgatacggttcaggggctggcgatcgccgccacgctggagctgatgtggatggggatcggcaacgtcggggcctattccgcgcccgacattattgccggatcaatcatcggcgtcgctctgggcatttcctccaaaggcggtatcgctgcgggcatcgccctcgccgtcccggtgtcgatactctgccaacagcttcttatcatctggcgctctttcgccagtttcctgaacgtatgggcggagaagtccattcaggagggtgactatggtaagctgctgaaagtccattatttctctacgccgctgtggtttctgatccgcgccgtcccctgcttcctggccgtctattttggcggggacctggtgggtcggattctggccgccatcccggaaagtattctgaccggtatgggcgttgccgccaaaatgatcccggccatcggcgtctgtatcctcctcttaatgctgctgaaaggccggatgtggttcttcttcctgcttggcttcatgctcaccacctatctgaagctgccgatcattcccattacctttatcgctctggcttttgccgtgctctatgacatggcctacagcaatggtcagaaggccgagagttcacctgcggaaaaagagcagcagtccactaccgacactgaagaaggatatgacttatga

SEQ ID NO: 172138 - DNA, 471 bp, Klebsiella oxytoca
atgccgattaatctcgcaagaattgatgaccgtctgattcacggccaggttattaccacgtgggtaaaaaaccacgatatcgaacaagtgctcatcatcaacgataaagtcgctggcgacaaaatccagcaatcggttttaaccatgtccgcgccgcccgaattaaaggtacaggtattcggcgtgcagaaatttatcgaaatcctgcaaaaaacggaaattaaaagacgcaccatgctgctgttcactaacagtattgatgtaaacacgctcgttgaaaacggggtgaaaatcgacaaactcaacgtcggcggcatgcgaatgcaggaaggcagaaagagtctttcccgcgccgtcgcggtaacgccggaagaagaacaagcctttaaatcgctaatagccaggaatataccggtggaaatacagatggtgcccaaagatccggtagttgatctgcaaacgttaatttaa

SEQ ID NO: 172139 - DNA, 432 bp, Klebsiella oxytoca
atgcaaactgaaattcctgtcattctggtcagccacggtccttttgcccagggggcgctttcctgtgcggaaatgcttatcggtgaacagcgcaacgtgtcggtgatttcgctgcagcctgaggccaatatcagcgatgtgcgcgccacgctgctcgagacctatctctcggtcaataagggaaacggcgtggtgatactggtcgatatgatgggcggttcgccatgcaacctggcgagcgagctctttttgacctatccggacatcctgctgttctgcgggttcaatatcccgacgctgctggaagtgctcagcaatcgtgatttaccgcgcgatgagattgcaacaattattgaagacgttttcccgggtagctgttttaacgtcggaaaaacgttacacgctgaatacacacaatcgaccgatctgtag

SEQ ID NO: 172140 - DNA, 894 bp, Klebsiella oxytoca
atgatggcgaacaattatcgtctcacttttaaaggtggccaggtgcttgatctaaagctaagagaagtgaataacaatctgtccgccaaagagcgtcttgtcgccgactatattctggcgaataagccgctgctaaaaagcatgagcattcagaccctggccaaagcgaatgatgtcagcaccacaaccatcctgcgtctctgccacaaactcggctatcagggtttcagcgatcttaaaattgatctgatcacctcttctggtcatccccagcacgacaaggttttacaggaggatatcaatcttgatgactctgtagagagcgtcaatcataaaatccagctgattgaaaaatcctccattgatgagacccatgccatcgtgaatatcgaacagctagagctggcgatagcgctgatcaggaagagtaataagatcgtgatttacggtgccggcagcagcggactcgtcggtaaagagctggagtatcagctcatcaaaataaagaaagacgtgagctgtcacgcggattacagtattcagtacagcatcgtcaatacgctggatgagcatgacctggtgattattctctcccattccggcgaaaacctggaaagcgttaagctgctgaccatggctcagcagctgggcgttccgtcaattgctatcaccaaaatggggcaaagccgcatctctgctctcgctaccgttctgttacacaccatcaccagcgaaagcgtatctcgcctgatccctatccgttcaaaaatgtcgcagctctcggttatcaatatgctggtgacgaatctctttattcagcaatacgacgatcgcctactgaaacaaacccaaaaccgcgcccagcgtttctacaatcagaatcacaaatcctga

SEQ ID NO: 172141 - DNA, 582 bp, Klebsiella oxytoca
atgaaatatcaggacgaattacagagattattattcagcgacccgctcagaatggaggcgctttatgccgttcaggcgctcgaactcaacgatggctggatcggtgccggcctggtcagagatgcggtttgggatcatctgcacggatacggtcaaaggccggtttggggtgatgtggatgttgtctggttcgatccgaaaagctgcagtgctgcccacgataacgcgctggtagcggggctttgccaacggtcgcccgcctttaactggtcggtgaagaatcaggccagaatgcaccagcgtaacggtaatcaaccttatcattcaacggagaatgcgcttagctactggcctgagacggcgacggccatcgcggtcagaatagggcgctctggccttattgaggtcattgcgccttacggactcgacgatctgtttgaacgtcgcctgcggccaacgccggaatttgagggcgataagctgaatattttccgccagcgcgtggcggaaaaacgctggctggaacgctatcctgttctgcagcttatgctcccgaccggaggcggtcaaacccagcggtga

SEQ ID NO: 172142 - DNA, 2022 bp, Klebsiella oxytoca
atgaaaatgacacggttttaccctctgattgtgggagggtttctgctcccgggcatggctcatgcccagactgcacagcaagacgaaaccacgctggtggtcaccgccagtaaacagtcttcccgctcggcatcagccaataacgtctcttctaccgttatcagcgcgacggagttaagcgacgcaggcgttaccgccagcgacaaactcccccgagtgttgcccggactcaatattgaaaatagcggcaatatgcttttttcaacgatctcgcttcgcggcatctcttctgcccaggacttctataaccctgccgtcaccctgtatgtcgacggggttccccagctatctactaacaccatccaggcgctaaccgatgtgcaaagcgtggagctgctgcggggtccccagggaaccttgtatggcaaaagcgctcagggcgggattatcaacatcgtcacgcagcagccggacagcaccccgcgcggctatattgaaggcggcgtcagcagccgcgacagctatcgtagcaagttcaacctgagcggccctcttcaggatggtctgctctatggcagcgtaacgctgttacgccaggttgatgacggcgagatgattaaccctgcgacgggaagcgatgatttaggcggcacccgcgccagcatagggaatgtgaaactgcgtctggcgccggacgaccagccctgggaaatgggatttgccgcctcgcgcgaatgtactcgcgcgacacaggatgcctatgtggcatggaatgatattaagagccgtaaactgtcgatcgacccggggtcgccggacccatatatgcggcgctgcaatgacagccagacgctcagcgggaaatacagcaccgaggactgggttttcaatctgatcggcgcctggcagcagcagaattattcacgcacttttccttccggctcgttgatcgtcaatatgccccaacgctggaatcaggatgtgcaggagctacgcgccgcgactctcggcgagacgcggaccgtggatatggtgttcggattgtaccggcagaatacccgggagaagctaaattcagcctacgatatgccgaccatgccctatttaagcagcaccggctacaccaccgccgaaacgctggccgcctacagcgatctgacctggcatttaaccgatcgttttgacatcggcggcggcgcgcgtttctcacatgataaagccagcacgcagtatcacggcagtatgctcggtaacccctttggcgatcgtggtaaaagcagtgatgaccacgtgctcggacagctctccgcaggctatatgctgaccgacgactggcgggtgtatacccgcgtagcgcagggatataaaccttccggatataatatcgtgcctaccgcaggccttgatgccaggccgttcagcgcggaaaaatccatcaactacgaaattggcacccgctacgagaccgccgacgtcacgctgcaagccgcgacgttttatacccacaccaaagatatgcagctctactctggtccggtcgggatgcagaccttaagcaacgcggggagagccgacgccaccggcgttgagcttgaggcaaaatggcggtttgcgcccggctggtcatgggacatcaatggcaacatgatccgttccgaattcaccaatgacagtgagctgtatcacggcaaccgggtgccgtttgttccgcgttacggcgcggggagcagcgtgaacggcatgattgatacccgttatggggcgctgatgccccgactggcggtgaatctggtaggaccgcattatttcgatggcgataaccagctgcggcaagggacttacgccaccctcgacagcagcctgggctggcaggcgactgaacggatgaatatttccgtctatgtcgataatctgttcgatcgccgttaccgtacctacggctatatgaacggcagcagcgctgtcgcgcaggtcaatatgggccgcaccgtggggatcaatacgcgcattgatttcttctga

SEQ ID NO: 172143 - DNA, 1578 bp, Klebsiella oxytoca
atgcacgcttcttttaacactctgattgaacagtatcccttacctattgccgcacagctgcgctgctgggcggcgcgttattccacgcaaacagcgctcgttgatgacgggggtgcgctaacctacagcgagcttgatgtccgggtcgaccagcttgccgcagggttagactcgctggggttgcgttcagggcagcatgtgattgtgcagcttccaaacggcaacgccttcgtgatcctgttgttcgccttgttaagactcggcgcgatccccgttctggcgatgccctcccagcgggagctggatatcgacgcgctgatcgcgctggcgcaacccgtcgcttatattattcacggggaaaaccatgcagggctggcccgccagatgatgcataaacacgcctgcttgcgtcatgttctgaccatcgaacaatgcgcagatgacgagtttacgccgctgttctcgctgcgcggcgagcttcaggcgtggcggcagcccgaggtttccgccaccgcgctgctgctgctttcaggcggcaccaccgggacgccaaagcttattccgcgacggcacgccgactatagttataacttcagcgcctctgccgaactgtgcggcatcaacgcccaaagcgtatatctcgccgtccttcccgtggcgcataattttccgctggcctgtcccggtattctgggaacgcttgcctgcggcgggaaggtggtgctgaccaacagcgccagctgcgatgaggtgatgccattaatcgccgaatgccgcgcgacgcacgtcgcgctggtgccggccctggcgcagctctgggcgcaggccagagaatgggaagagagcgatctctcttcgctgcgcgtcattcaggtgggcggcgcccgcctcgatccgacgctggcagagcagatcatcgccacctttaactgcaccctgcagcaggtattcggcatggcggaggggctgctttgctttacccgtctcaacgatccgctggtcagcgttctccatagccaggggcgcccgctatctcccctggatgaaattcgcgtcgttgacgaagaagagaacgacgttgcgcctggcgaaaccggacagttattaacgcgcggcccttacacgatttcgggctattatcgcgctcccgagcacaatgcccgggcctttaccgcgcaaggattttaccgtacgggcgataatgtcaggcgcgatgaggcgggaaacctgtacgttgagggacgcataaaagagcagatcaaccgcgccggagagaaaattgccgcggcggaagtggaagcggcgctgatgcgtctggaggcggtaaaggattgcgccgtggttgccgcgccggacacgctgcttggcgagcgaatttgcgcgtttatcatcgcgcagcagacgccatttgactatcaacagttgcgtcaccagctaacccagctggggctcagcgcgtggaaaattccggaccaaattgagtttctgacccactggccgctcaccgccgtcggcaaggtagataaaaaacgcctgacggcgctcgccaccgagcgttgtcgccagacgtcacaataa

SEQ ID NO: 172144 - DNA, 804 bp, Klebsiella oxytoca
atgatacaatctgccatgtgtactccgttatggcccgcccgcagcgccagtacggcgcatctggtgatgtgccccttcgcgggcggcagcagtagcgcgtttcgctgctggcgagagcagcctatggcggacatcgcgctttccctggtaacctggccgggacgcgatcgcctgcgccatctgacgccgctcaacagcattatgccgctggcggtacggctggcgaacgaactgcaacagagcgtatctcctgacgcgccgctgctgctcgccgggcacagtatgggcgcgcaggtggcgtttgaaacctgtcgccttctggagcaacgaggacatgcgccgcatggcctgattatttcgggctgccatgctcctcacctccattccgaacgccgactcagccatcgcgatgatgccgactttatcgctgagctgatagatattggcggatgttcgcctgagctgcgggaaaacgaggaattaatatcgctgtttcttcccctcctgcgcgccgatttttacgccaccgagcattatcactacgattcgcccgatcgcgcctcgccgctgcgcacgcctgcgctgctcatatgcggcagccgcgatcgcgaagcctcccggcagcaggtcgacgcctggcgtcagtggctgacccacgttaccgggccggttacaatcgacggcgatcacttctatcccattcaacaatcccgcgccttctttacgcagattgtccgccattttcccgacgcattttcgacgctgaccgctgtgcaaaaacagtccagtacttctgaaaggtga

SEQ ID NO: 172145 - DNA, 1098 bp, Klebsiella oxytoca
atgatgccgtccaccttcgacaaacaacgcgtactgattgtgggcgccaaattcggcgaaatgtacctcaacgcctttatgcagccccaggaggggctcgaactggttggcctgctggctcagggaagcccgcgcgcaaaagagctggcccaggcgtttggtatcccgctgtatacctcgctcgaacagatcaaggagatgccggatatcgcctgtatcgtcgtgcgctcgaccgtcgccggcgggagcggaacgcagcttgcccggcactttttaactcacggcgcgcacgttattcaggagcatcccctccacccggatgatgtccgttcattacaagcgctggcgcaggaacaggggcgttgctattgggtcaatacgttttatccgcacgcgcttgccggtcgcgtgtggctcagggacgcggagcagttacgtcgctgtctggatcaggggccgtcgattgtccatgccaccaccagccggcagttgctctactccactctcgatttattgctgctggctctgggcgtggatgccgccagcgtggcgtgcgaagtggtcggcagcttcagtgactttcactgtctgagactctactggccggagggagaggcttgcctgctgcttcagcgctatctcgatcctgacgatccggatatgcacagcctgattatgcaccgtctgctgctgggatggccggaaggacatctttcgctggaggcgagctacggccccgtcatctggtcatccagcctgtttgtcgccgaacatcaggagaatgctcacagcctctaccgcaggccggagatcctgcgcgacccgccgggtcagacgtgcagcccggcgcccctgagctggcgtgattgctgtgaaaccgccgggcctgagggcgtcggaagattactccatcagctgcgcagccatctggcgggcgaaaatgcgcctgccgcctgccacggcgctcatcagctggcggtgtcgtacctatggcagcagattttacgcgcgaccggcaatgccgagatccgccacctgaagccgccgcgtcatgaacggttaacggctttctaccgccacgatgaggagtcccgatga

SEQ ID NO: 172146 - DNA, 9477 bp, Klebsiella oxytoca
atggataacttgcgcttctcttctgcgccgacagcagattccattgatgcatcgatcgctgaacgctacccggactgcgaacctgtcgcggtgatcggctacgcctgccattttcctgaagcgcccgatggcgaaacgttctggcacaacttgctggaaggccgtgaatgcagcaggcgctttacccgcgaggcgctgctggccgccggtctggatgccgcggtgattgacgatcctcattacgtcaatatcgggacggttttagacaacgccgactgcttcgacgccgccctgtttggctactcgcggcaagaagccgaatctatcgatccgcagcagcggctgtttttgcaggcggtctggcatgcgctggagcatgccggctatgcccccggcgccgtcccccacaagaccggcgttttcgcctcttcccggatgagcacctatcccggccgcgaagccctgaacgtcacggaagtcgcgcaggtcaagggtctgcagtcgctgatgggtaatgataaggactatattgccacccgcgccgcgtataagctcaatctgcacggaccggcgctatcggtacagaccgcctgctccagttcgctggttgcggtgcatctggcctgcgaaagcctgcgcgcgggggaatccgatatggcggtggccggcggcgtggcgctctctttcccccagcaggcgggctaccgctaccagcccgggatgattttctctcccgatggccactgtcgcccttttgacgcctcggcagaaggcacctgggccggcaacggtctcggctgcgtggtactgcgccgcctgagagatgcgctgctgtcagaggatccgattattgccgtgatcctctccagcgcggtcaacaacgacggtagccgaaaagtgggttataccgcgccgtcggtggcaggacagcaagcggtcatcgaagaggcgttaatgctggcggcgatcgatgacagacagattggctacattgaaacccacggtaccggcacgccgctgggagacgcgattgaaattgaagcgctgcgcaacgtttatgcgccccgcccgccgcatcagcgctgcgcgctcggttcggtaaaaagcaatgttggccatctggatacggcggccgggattgccgggctgctgaaaaccgtcctcgcggtcaaccgcggacaaattccgccgatgctaaattttgccacgccaaacccggcgctcaagctcgacgaaagcccgttcaccgtgccggtgacggcccaggcgtggcaggacgaaatacgctacgcgggcgtctcctcctttggcattggcggcacaaactgccacatgatcgtcgcctcgctgcccgatgagctcaaattaccgttgcctggtgcggatgacggtagcaggagcaccgcgctgctgctcagcgccgccagcgacaccgcgttgcggcagctggctacggactatgctcgggcgctgagggaaaacgcggatgccagtaatctggccttcacggctttgcgcgcccgccgtctcgatctcccctttcgtctggcgacggcattaaatgatgataccgccgctgcccttagcgcctgggctggagaacaggccggggcgccggtttatagcggccacggcgtcagcggtaagcaggtgtggctgtttaccgggcagggctcgcactggcggaccatgggccacgccatgtgccagcgttcgaaggtgtttgccgacacgcttgaacgctgtttttccgcctgtcgtgaaatgctcacgccctccctgcgcgacgcgatgtttaatcccgactcggcgcagctggaggagatgacctgggcgcagccagccatcgttgcctttgaaatcgccatggcggcgcactggcgcgccgagggattgcagccggattacgccatcggtcactcggtgggcgaatttgccgccgccgtggtctgcggacactatacgattgaacaggttatgccgctggtttgccgccgcggggcgctgatgcagctgtgcgcaaacggcgcgatggtggcggtgttcgcgcaagaagaggcgctgatgccgctggcccgccagtttgagctggatctggcggccaacaacggcacccggcatacggtcttttccgggccggaagcccgtattgcggaattttgcgccgcgctttcgcagcgtgatatcagctatcgtcgcctgagcgtttccggcgcggcgcactccgccttactggagccgatactcgatcgttttcaggacgcctgcgccgggctgcacgcagagcccgggcagctacagcttatttccaccctcaccgccggggccatagatgcgtcgacgctcaatcaggcggattactggcgccgccatatgcgccagccggtgcgctttatccagagtattcaggcggcgcacaagctcggcgcccgcgtttttgtagagatgggacccgatgcccagctgattgcctccggacagcgcgaataccgggataacgcttactggatagccagcgcccgccgtaaccaggaggcgagcgctgtcctgaatcaggcgctgctccagctgtacgccgccggcgtcaccctgccgtgggcagacttactggcgggcaatgggcaacgtatctctgcgccacgctatccgttcgcgaccgagcgttactggaaagagcacgtttccaacgtctgcgagcctgacgacgtcgcgctgtccgccggcgctgaggtggcgagtcgcgccgcggcagcgctcgatcttccccggctggaagcgcttaaacgctgcgccacgcggctacacgccatctatgtcgatcggctggtacaacgctgtgcggacgatgccattgccagcggcgtcgacgccatgaccattatgcgccgaggccgtctgctgccgcgctaccagcagctgcttcaacgcctgctgaataactgcgtggccgacggcgactaccgctacgctgacgggcgttatttccgcgcccgcccgattgaacatgagcagagggaagctctgctggcggagcttgctggctattgtgaaggttttcaggctattcccgagaccatcgcccgcgccggcgagcggctgtatgaaatgatgagcggcgaggaagagccggtggcgatcatcttcccgcagggcgcctccgacggcgtggaggtcctctatcaggaattcagctttggccgctatttcaaccaaatcgccgccggtatcttacgcggtctcgtccagacgcgtcagccccagcgccctttacgaatcctggaagtaggcggcggtacaggcggcaccaccgcgtggctgctgccggaactcaacggcgttccggcgctggagtaccacttcaccgatatctccgccctgtttacccgccgcgcccagcagaaattcgccgactatggctttgtgcgctaccacgaactggatctcgaaaaagaggcgcagtcccaggggttccaggcaaactcatacgatctgatcgtggcggcgaacgtgatccacgccactcgccatattggccgcacgctcgataatctgcgccctctgctcaaaccgggcggacgcctgctgatgcgcgaaatcacccagccaatgcgtctgtttgatttcgtttttggcccgctggtgcttccgctccaggatatcgacgcccgcgaaggcgagctcttcctcaccccccaacagtggcggcagcagtgtcgccgcgccggattcagcaaagtggcgtggctaccgcaggagggtagcccgaccgccggtatgagcgaacatatcattctcgccacgctgcccggtcatgggatatcctcgtcatcagcatccgcgctggggcagatgttgccggataatgctgatgatctcgccgactggtccgattgcgcgggtcagccggaacggtttaacgcccgctggcaggaggcctggcggcggctctcagcgcggcacggcgacgattcccccgtgggagcaccccaggtcagccccccgcagtggctgggggaggtgcgcttaagctggcgaaacgccgccttttcccgcggcgagatgcgcgtggaagcccgtcatcctgatggcgagtggctgccgctggctcccgccgcgcctgttcctgcgccgcagacgcattatcaatggcgctggacgcccttcagcgccgccagcgatggccgcccactggcatttcgcttcagcgccggtacgcttgcgcacgaaaatgagctggcgcaatgcggtatccttcacgatccgcaggccgcttcggtgctcatgattgtcgaggagagcgaacagacgctggcgttagcgaaacaagtgaaggaggccctgaccaccggcgccggaggattgattgcgatcactcaccgcgcgtggcaggttgaggataatgaggcgctcgccgcgtctcatcacgctctgtgggctttgcttcgcgtcgcggccaatgaacagccggaacgcttgattgccgccatcgatctggccgaaaacacgccatgggaaacgctgcgtcagggattgaccgccgtctccctttctcagcgctggctcgccgcaaggggcaacgccctctggctcccctccctggcgccgaatccagggcgcgccgccgatcttccggcaaatgtcttcgctggcgatacccgctggcatctggtgaccggcgcgtttggcggattgggccgccttgccgttaactggctcaaagaaaaaggggcgcaacgtattgccctgctggcaccgcgcgcggatgcctcctggccgggcgacatcgagggcgtgcaaatccgcgtctgccgttgtgatgttggcaacgcccgacagctgaccagggttctcgataagctggcgggcgatggcggcattgccggggcgatccacgctgcaggcgtattggctgatgggccgctgcaggagctggacaatcgccaactggccgcggttttcgcggtgaaagcgcaggcggcagaccagttgcggcaaagcctgagcgaccacaacgcacgctatcttattctttactcctccgcagccgccgccctcggcgcgccgggtcagagcgcccatgcgctggcctgcggctatctggacgggctggcgcggcaacatacttctgatgatactccgaagacgataaccattgcctggggcgcctggggggaaagcggtcgggcggccacgccggaaatgctggcgacgctggccagccgcggcatgggcgcgttaagcaatgccgaaggctgctggcatctggaacaggcggtgatgcgcggtgccccatggcggctggcgatgcgtgttttcagcgacaacatgcctccgctacaacaggccctgttccatagcgggtccgcagaaaaagccgcagcgccggtcagccctcctgcggatgacaacgtctttatcggcaacctgagcgatgaaacggcggtaatgacatggctgaaaaaacgcatcgcggttcagttacggctaagcgatccggcatcgctgcaggcaaatcaggatctattgccgctgggcatggattcgctgctcttccttgagctcagtagcgatattcagcactacctgggcgtgcgcatcaatgcggaacgggcgtggcaggatctgtcgccgcgcgggctcacgcagcttatctgttctataccagagaagacgcctgccgcttcgcagccggaagcgttacggcacgacgccgatgagcgttatgcccccttccctctgacgccgattcagcacgcctactggctgggaagaacccatcttattggttatggtggcgttgcctgtcacgtgctgtttgagtgggataaacgccacgatgaactcgacctctccctactggagaaagcatggaaccagcttattgcccgtcacgatatgctgcgaatggtggtagatgccgacggccaacagcgcgttctggcgacaaccccgacgtatcgcatcccgcgcgacgatctgcgcgcgctctccccgcaggagcagcgcctggcgctggaaaaacggcggctggaactgagctatcgcgttttacccgccgaccagtggcctctttttgaactggtggtcagcgaaatcgacgattgtcgctatcgcctgcacatgaacctcgatcttctgcagttcgatgtgcagagttttaaagttatgatggacgatctggcgcaggcctggcgcggagagacgctggcgccgctcgatatcacctttcgcgattatgtgatggctgaacaggcgcgccggcagacggcggcatggcacgatgcctgggagtactggcaggaaaaactaccgcaattacccctggcgccggaactgccggtggtgaagacgccgccggaaactccacacttcaccacgttcacctcaacgatcggcaagcctgcgtggcaggccgttaagcagcgctggcagcagcaagggctcaccccttctgccgcgctgctcacgctgtttgccgccaccctcgagcgctggagccgcaccgctgaattcaccctgaacctgactttctttaatcgccagccggttcatccgcaaatcaaccagttgattggtgattttacctccgtcacgctggtcgattttaacttcaccgcgccggcgacgctgcaagagcagatgcaaggaacccagcagcgcctgtggcagaacatggcgcacagcgaaatgaacggcgtcgaggtgatccgcgagctggggcgcctgcgcggatcgcagcatcaaccgctgatgccggtggtgtttaccagcatgctgggaatgacgctggaaggcatggctatcgatcgggcgatgagtcgtctgttcggtgaaccctgctatgtgttcacgcaaacgccgcaggtctggctggatcatcaggtcatggagagcgatggcgagttgacgtttagctggtactgcatggataacgtgctggagccgggcacagcgcaagccatgtttacagactattgcgccatcctgcaggctgctattgccagccctgaaagcctgcagacgatggcctgcggtattgccgaacagaacccgcgccgccgctggccgctcaacgcgcagacggactacgatttgcgggatattgagcaggcgacgctggactatcccggtatccagcgggccagagcggaactaagcgaaaatggcgcgttaacgctggatatcgtcatggccgaggggccgtcgccctccgcgctcgccccggctgaacgcgatctcgcctcgctggcgctgccgttgcctgagcaggcgcaacttgatgaactggacgcgacctggcgctggctggaggcgcgtgcgctacgagggatcgccgacacgctgactcgccatggtttattcacctcgccggagagcgcccatcgctttagcgaaattgtacaggcgctggccgcgcagggggcccggcgacggctgctgcgccagtggctacagtgtctgacggaaagagaatggctggcccgcgagggggatagctggcgcagccgcatggcgttcagcgagatccccgggccgcaggatgcctgcccgccaacccaatggagtcaggcgctggcgcagtatctggacacctctatttcccgccacgacgaccttttctccgggcagtgttcgccgctggaactgctgttcaatgagccgttgcgcgtaaccgacgcgctgtatcgcgaaaaccccgccagcgcctgtctgaatcgctataccgcacagattgccgccctgtgcggcgcagaacgcatcctcgaggtgggcgccggaaccgcagccaccgcggagccggtgctgaaggccacgcaaagcacgcgacgttcataccatttcaccgatgtctccacgcagttcctcaacgatgcccggagccgtttccacgatcaatcgcgggtttcttacgccttattcgacattaaccagccgctggatttcgccgcccatccggcagaaggatacgacctgattattgccgtcaatgtgcttcacgacgccagtcatatcgttcagacgttgcgccgattaaagctgctgctgaaaaccggcggacgtttgctgatcgtcgaggcgacggagcgaaacagcgtattccagctggcgagcgtcggctttatcgagggattgagcggataccgtgatttccgccgccgggatgagaaacccatgctcgcccgttcggcgtggcaggaagtgcttgcgcaggccgggtttgtcaacgagctggcgtggccgacgcaggaatcctcgcctctgcgccagcatctgctggtcgcgcgttcgcctggcgtgaatcgaccggataaagcagccgtaagccgctatctgcagcagcgttttggctccggtctgcccgcattacggattcgccaacaagaagcattacttgcgccgctgcgtaccccgtccgttgcgcagaatgcgccagccgaatcgaccccagtcgccgggggagatccgacgctggaaaaacaggtcgctgaactctggcaatcgctgctttctcgccccgtggccaggcatcacgacttttttgcgctgggcggcgatagtctgatggcgacaaggatggtcgcgcagctgaaccgcagaggaattgccagcgccagccttcaggatctgttcacccattcaacgctcagcgacttctgcgcccatctgcaggcctgttcgtcggcagaggacaatcctgtgctcatttgccacggcgcgggcgatgaaacgttgtttgttttccacgcttccgacggcggtatcagcgcctggctgccgcttgcccgggcgctggacaggcgcgtattcggcctgcaggcaaaatcgccgcagcgttttgccacgcttgatcggatgatcgatgagtatgtcgcatccatccgtcgccagcagccacacggcccctatgtgctggcgggatggtcgtacggcgcttttcttgcagctggcgccgcgcagcgtctgtacgccaaaggcgagcaggtacggctggcgttaatcgatcccgtgtgtcgacaggattttcgttgcgccaaccggacggccctgctgcggctgttagccgaaggggatacgccgctggcgctgccggaacattttgaccggctgacgcccgcccgccagcttgccgtcttcatcgaccttgccagaacggcgggaatggtgccgcaaaacctgacgcggcaagcggcagaaacgtggatcgacaacatcgcgcatctgctgcgtttactggccgggcatacgccgggcgaagccgttgcgcttccctgcctcatcctgcatgccgtaatgagacccgcgcgctggacgccagcggagaccgaatggcgggcctggatggaccgcgccgaccgctatgcgattaaagccagtcactggcaaatcatgctggagcccccccacgttcaggcttgcgcgcagcatatccagcgctggcttggcgcaacctcaacgcaaccggagaacaccttatga

SEQ ID NO: 172147 - DNA, 6108 bp, Klebsiella oxytoca
atgatttctggcgcaccatctcaggaaccgcggttaccggacaacggcaacgcggctgattatcaacaattacgcgagcggctcacgcaggagctaaatttaacgccgcagcagctacatgaagcgtgcaatttgatccaggcgggcctggattcaatcagattgatgagatggttagactggtttcgtaaaaggggctaccgcgtgaccctgcgcgaactgtatgccgcccccacgctgggcgggtggcgccagctgatgcgcagccgttcgccggagaaaccggcggaggaaacggcatccggtgaaagcgtctggccgaccatgaccgagggtacccccttccctctgacgccggtccagcatgcctacctgacggggcgaatgcctggacagcctctcggcggcgtgggctgccatctgtatcaggagtttgccgggaattctctgacggcggaaaagctggaacaggccatcgcgatcctgatgcagcgccacccgatgctgcatatcgcctttcgcaccgacggacagcaggtctggttaaagcaaccttactggaacggcgtgacggttcatgatttgcgccagaacgacgccgccagccgccaggtctatctggacgccctgcgccagcgcctgagccaccgccttttacgcgtggagatcggcgaaacgtttgattttcagctgacgctgttgcccgataatcgccactgcctccatgtcaatattgacctgctgattatggatgcctccagctttacgctcttcttcgatgagcttaatgctctgctggcgggcgaatcgctgccggctatcgacccccgctatgatttccgctcctatttgctgcaccagcagcaggtgcatcaaccgctgcgagacgaagcccgagcgtactggctggcgaaagcgcctgcgcttcctcctgcgccgctcttgccgctggcctgcgaccccgccgcgctacgtgaagtccgtaatacccgacgccgcatgattgtcccggccaaacagtggcatgcgttcagccaacgggccggtgagtacggcgtcaccccgacaatggcgctggcaacctgtttttccgccgtcctggctcgctggagcggcctgacgcggctgctgctcaacgtaacgttattcgaccgccaaccgctgcacccggcggttagcgctatgcttgccgacttcaccaatattctgctgctggataccgcctgcgacggcgataccgtcagcggcctcgcgcagaagaatcagctgacctttaccgaagactgggagcatcgtcactggtccggcgtcgaactcctccgggagctcaaacgccagcagcgctatccccacggcgccccggtggtatttaccagcaatctgggacactctctttacagcagccgcgcggaaccgcctttgggcgagccggactggggcatctcgcagacgccgcaggtgtggatagatcatctggccttcgaacatcaaggcgaggtctggctgcaatgggacagcaatgacgccctgttccctccggcattagtagcgacgttgttcgcggcctactgccagctgattaaccagctctgcgaagatgacagcgcatggcaaaaaccgttcccggataccctgcccgccaggcagcgcgcgattcgccagcgggtcaacgcgaccgacgcgcccattcccgcaggactgctgcatgaaggcattttccgcatcgccctccagcagccggaggcgctggcggtcacagatgctcattatcagtggaactaccgtgaactgacggactttgcccgccgttgcgccggcaggttaatcgcgtgcggggtgcagccgggcgacaatgtggcgatcggcatgtcaaaaggcgcgggacagctggttgcggtgctggccgtactgctggccggggcggtctacgttccggtttcgctggaccagcccgccgcgcggcgcaagaaaatctatgctgacgccagcgttcggctggtgctcatttgccagcacgacgccagcgcgtggtcagacgatattcccctgcttgcctggcagcaggccattgaggatgaaccgatcggcaacccggtggttcgcgcaccgacacaaccggcctacattctctacacctccggttctaccggcacaccgaaaggcgtggtcatttctcaccggggagcgctcaacacctgttgcgatatcaataaccgctatcaggtaggtccaggcgacagggtgctggcgctgtccggcctgcattttgatttatcggtatatgacatttttggcgtcctgagcgccggcggcgcgctggttatggtgatggaggagcaacggcgcgatccccgcgcgtggtgtgaactgatccaacgccatcaggtcacgctctggaacagcgtcccggcgctattcgatatgctgctgacctggtgcgagggttttgccgacgctgcgccggcaaatctgcgcgcggtaatgctttccggcgactggatcggtctcgatcttcctgcccgctttcgggcctatcggccgcaagggcagtttatcgccatgggcggcgccaccgaggcgtctatctggtctaacgtctgcgaggtcagagaggttcctgagcactggcgcgccatcccctacggttttccgctgtctaaccagcgctaccgggtagtcgatgagcggggccgggactgccccgactgggtgcccggcgaattgtggattggtggcctcggggtcgctgaaggctatttcaacgatcccctacgcagcgagcagcagtttttgacgcaatcgggcgagcgctggtatcgcaccggcgatctcggctgctactggccagacggtaccttagagttcctcggccgccgcgataagcaggtcaaggtcgggggatatcgcatcgagctgggcgaaattgagagcgcgctcggccaggtggcgggcgtgaaacaagccaccgttcaggcgatcggggagaaagagaagaccctggcggcctgggttgttccccagggggaggctttttgcgttccccatcatcgcgatccgttgctgccgcaggaatggcgtaccctggcaggaacgctgccctgctgcgcctgcccgccagaaatctccgccgctcaggtcgctgattttctgcagtatcgtctgttaaaactgcatccgggccacgcctctgacgtcgatccgctctccctgatcgattcgctcgctatccagccgcgctggcaggccgtggtggaacgctggttagcctttcttgcggctcaacagcggctgcagcccgccgccgagggttatcaggtctgcgcggcagaagcgccggaaaagcgccatccttcgttcagcgggcatgacctcaccttaatgcagattcttcgcggcgcgcgccacgaactgtcattactgaacgatgcgcggtggtcgccggaaagtctggctttcgaccatccggccagcgccttgtatatcgaggagctggcgacaatgtgccaacagctttcccgacgtttacagcgcccggtacgcctgctggaggtgggggtccgcaccgcccgcgccgcagagtgcctgttgtcccgcctcaacgctggcgaggttgagtatgtcgggcttgaacatagccaggagctgctgctgagcgccagacagcggcttgccccatggcctgatgcccgtctggccctctggaatgcagagacgctggcggcgcacgcgcattcggcggacattgtctggctgaataatgccctgcatcgtctgctgccagaagatcccggactccttacgaccttacaacggctcgccgtccccggagcgctgctctacgtcatggagtttcgccagttgacgccgtctgccctgctcagcacgcttctgttaaccgctggacaaccggaggctttactgcataacagcgcagcgtgggcaacaatattcagcgccgccgacttcagctgtcagcatggcgatgaaatcggcggattacaacgcttcctcgtccagtgcccggccagccagatgcgccgggacccgcgtaaactacaggccgcccttgccgaacgcttgcccgggtggatggtgccgcaacggatccatttccttgacgctttcccgctgaccgcgaacggaaaaattgactatcaggcgctgacccgtcgccatacccctgaggcggaaacatcggccgaagcggatttacctcagggcgatacggaaacatgcgtggccgccatctggcagcagctgttgtcgatcggcgccgtcacccgggagaccgactttttccagcaaggcggcgacagcctgctggccacccgtctgaccggacagctccatcaggcgggttataccgcgcaattaagcgatctgtttaatcatccccgactggcggattttgccgctaccctgcgtaaaaccgacctcccggtcgaacagccattcacccactatcctgaagatcgctaccagccgttcgcgcttaccgacgtgcagcaggcctacctggtcggacggcagccggggtttgccctgggcggcgtaggctcccacttcttcgttgaatttgaggttgccgatctggatatccgccggctggagagggtctggaatcgtttaatcgtccgccacgatatgctgcgcgccgttgttcacgatggacagctgcaggttctcgaacagactcccccctggatcatacccgcgcacgtttgcccaacgccagacgaggcgctgcggctacgtgaaaaactggcgcatcaggtactcaaccccgaaatctggccggtattcgatctccaggtcggatacgtcgacgggatgcccgcccgactctggctgtgcctggataacctgttgcttgacgggctaagcatgcagatcctgctggcggagctggaacacggctatcgctatccgcaacagctgccgccgccgctccccgtcactttcagggattatctgcagcaacccgcgctgcgggcgccagacccagactccctggcctggtggcagactcagctggacgatatccctccggcgccggcgctgccgctgcgctgcttgcctcaggacgttgcgacaccgcgctttgcgcgcctgaacggggccatgaacagcgcgcgctggcgccgattgaaacagcgggcggctgaagcccatcttaccccgtcggccttactcttatcggtatggtcaacggtgctctcggcatggagcgcgcggcctgacttcacgcttaacctgacgcttttcgaccgccgtccggtgcatccgcaaatcaaccagattctgggcgacttcacctcgctgatgctgctgagctggcggcctggcgacaactggctgcacagcgcgcagcgactgcagcagcgcctgagccagagcctcaattatcgcgatgtatccgccatccgcgtgatgcgtcagctggcgcaacggcaaaatctgcccgccgtaaccatgccggttgtcttcaccagcgcgctcggcttcgcgcaggataatttcctcgcccggcgcaatttactcaaaccggtctggggtatctcgcagacgccgcaggtctggctcgatcaccaggtttatgagtccgaaggtgaattgcgctttaactgggattttgtcgccgccctgtttcctgccgaacaggtggagcgacagtttgcccagtatggcgaattgctcaatcggatggccgaggaagagagctgctggcagctgccgctcgccgcgctggttccccccgttaaactcgcggaacaaagccccgcgccagctccgcgcggctgccctgagcgcccggtgtccggcgtggcggcggacgagagcactgtccgtctgatttgcgacgcctttcgcgaggtggtgggcgaatcgattatgcccgcggataacttttttgaggcgggcgccacgtcgctaaatctggtgcagctgcacattttgttacaacgtcacgaattttccatgctgacgctgcttgatctctttacccactcctctccagccgctctggccgaataccttaccggcgtcgcgatggaggagaaagccacacgctctcgcccggttcgccgacgccagcggcggatttag

SEQ ID NO: 172148 - DNA, 960 bp, Klebsiella oxytoca
atgacggagtcaccacaaacgcaatctgcaatctcaattcatcagttggtggtcgggaaacccgctaacgacggtactatcccggcccagtgcgaactgctgcgctgttcgttgcaggaagggatggatattttgctctggagaggccattttgcgcagcctgagacgttacagcttcacgatgatctgggcaggattaacttctcgtgcatcctcgagggcacctcgcgttttgccatccaggggctcagacgccacaccgagtgggagctggcccgcaatcgccattacattacccacacgccagattgccgcggcagcgccgcctacggcggccgattcgagagcatcaccctctccttcagccctgaaaccctcgcgctgtgggtaccggatatcagtacagtcattaaaaataagatcgactcccactgctgttgccagcagcagcgctgcaatgcggaaacccatttaacggcccaggctttgcgtcatgcgctaatgcggatgcacggcggattcagccatgaacaaaagccttcgaccctctggctacagggacagagtctggtgatgctaagcctggtcctggatgagcaccgcgaagacgccagctgcttctcctgccacttcaacccggtggagcgccagaaactgctgcgggcaaaggatctgctgctggccgatttgacgcaggcgccgggcgttgctgagctggcgagagagtccggtttgagcgtgctgaaaattaagcgtggcttccgcgttctgtttaacaacagcgtctatggcctgtttcaggctgaacgcatgcaggaggcacgaagaaggctggccaatggcaatacctccgttatgacggtagccgccgatctgggctacgccaacgccagccacttctctgccgctttccagaaacagtttggcgtcaccccttccagctttaaacgcgtcatctaa

SEQ ID NO: 172149 - DNA, 1803 bp, Klebsiella oxytoca
atgtcatctcaatcatccaatactgaatctctgtcccggtttccgctctggcaggtgataaccccggttcgccggaaggtcattctggcgatggcgctggcgggtctggcggccatcaccagccttgcggcgctgctttttctggcatggagcctgcgcgatcttcgcgtctcgcccgacgttattccactctggtcgttgggggggctatttggctgcgtggcgctgacttttgtcctgcgcctgcaggcatttaacacctcgcatcatgcggcgtttcatctggagaatattctgcgcagcagattagcgcagaaagccgtgcagcttgccccgggcgcgttacagcaaatgggcagcggtgcgatggcgaaggtgatgctggatgatgtgaagtcgttacacattttcgttgctgacagcacgccgctgtacgctcgcgcgatagtcatgcccctggcgaccgccgctatcctgttctggctggactggcgactggccattgccacgctgggtgtgctggcattgggttcactgatacttactctcgcccgccagcgctcgggagagatggctcagcgttatcatcaggcgcgcgagcaggtcagcgccgcggtgattgagttcgtgcaggccatgccggtggtcagaacgtttgatagcggcagcaccagctttttgcgctatcagcatgcccttgaggagtgggtcgatgtgctcaaaatctggtatcgcaaagccggcttttccgcgcgtttttcattctcgatcctcaatccgctgccgaccttattcgttctgatctggtgcggatacggcctgatgcaggcgggcagcctcgattttatcgcctgggtggccgttttactgttgggcagcgggatggcggaagcggtgatgcccatgatgatgctcaataacctggtcgcgcaaacgcgtttaagcattcagcgtatttatcaggttctcgcgatgccggaactctcccgtccgcttgtcgatcggcagccgaacgatgcgagtattacctttgagcaggtgagttttcactatccacaagcgcgcgcaggcgcggcgctgcaggaggtgagctttcatgtacctgccggaaaaatagtggcgctggtcgggccgagcggcgccgggaaaagcaccgtggcgcgactcttgctgcgttatgccgatcccgataaaggccatattcgcatcggcggcgtggatctgcgcgatatgcagacggacaccttgatgcagcaaatctcgtttgtattccaggacaacttcctttttgccgacaccatcgccaataacattcgtctgggcgcgccggatacgccgctggaagcggtgatatcggcggccagagtggcgcaggcccatgaatttatcagcgcgttgccggaggggtacagcacccgcgtcggggagcgcggcgtctttctctccggcggtcagcggcagcgcatcaccatcgcccgggcgctgttgcaggatcgccccattcttgtgctcgatgaggcgacggcgtttgccgatccggaaaacgaagcggcgctgatcaaagcccttgcggcggccatgcgcggccggacggtcatcatggtcgcgcatcgactctccatggtgactcacgccgatatgatactgctgttttccgacgggcggctccgtgaacgcgggagtcatcggcaactgttagcccagggcggcttgtatcagcagctgtggctgcgctatcagcaggcgcagcaatggatgccggggagaacacaaccagaggaggcggaaaatgaaagccattaa

SEQ ID NO: 172150 - DNA, 1803 bp, Klebsiella oxytoca
atgaaagccattaatcccgcggataacctggcctggcgcgtcatctggcgccagcttatctccagcgttggcagtcaggcagggatgctgcggcgcagtatgattgcgctgctgctggcggcattggtgcaggggattgcctttgcctgcctctatccgatcgttgatgcgctattacgtggtgaagcatcgccgcttctcacctgggctttggctttcagcgctgcggcgttcgcggcgctggcgctacgctggtatgggctgggctttgaataccgtggtcatctggcgcaggccacccatgaactgcgcctgcgcctgggcgaacagctacgccgcgtgccgctggaaagactccagcgcggcagagcgggcgaaacgaacgccttgttgctgggcagcgtggatgaaaatctcaactatgtgattgcgatagccaatattttgcttttaaccatcgtcactccgctgaccgcatcgctggcaacgttgtggatcgactggcggctggggctggtgatgttgctgatctttcccatgctggtgccgttttattactggcgccggccggcgatgcgccgacaaatgcagaccctgggcgaagcgcaccagcggctgagcggggatatcgttgaatttgcgcaagggatgatggttttgcgtacctgcggcagcgatggcgaaaaaagccgggcgttgctggcgcattttaatgcgctggaaagcttgcagagccgcacgcatcgccagagcgccggcgcgacgatgctgatcgccggcgtcgtggagctgggcctgcaggtggtcgtgttagccggggtggtctgggtagtaacggggactctgaacctcgcctttctgatagccgccgccgcgatgattatgcgtttttcggaaccaatggcgatgtttatcagctacacctcggtgctggaactgatcgccagcgccctgcagcgtattgagcagtttatggcgatcccgctgcttcccgtcgcagaacgcgtcgagatgccggagcgttacgatatccgctttgacaccatttgctaccgctatgatgacagcggcgatcccgcgctcaacaacctctctttgacctttccggccgccagcatgagcgcgctggtgggcgcctcaggcgccggtaaaaccacggtcagcaaactgttaatgcgctatgccgatccgcagcagggagagatttctatcggtggcgtcgatattcgtcatctgacggcggaacagctcaatagcctgatttccgtcgtgtttcaggatgtctggctgtttgatgacacgctgctggcgaatctccttattgcccgcccgcaggccacgcagcaggaggtggaagaggccgcccgcgcggcgcagtgtcttgaattcatttcccgtcttccgcaaggctggctgacgccaatgggcgagatgggcgggcagctctcgggcggcgagcgccagcgaatttccattgccagggccttattgaaagatgcgccgatcgtcattctcgatgagccgaccgccgcgctggatattgatagcgaactggcggtacagaaagctattgatcatctggttcacaaccggacggtaattatcatcgcccatcgcctgtcaaccatcgccggggccggaaacatcctggtgatggaagagggagaagtggttgaacagggcacgcatgcgcagcttctctcccgtcagggacgttaccaggcgctgtggcaggcgcaaatggccgcgcgcgtctggcgtgatgcagaggttgacgcatctgaggagcgactgcatgagtga

SEQ ID NO: 172151 - DNA, 1284 bp, Klebsiella oxytoca
atgagtgatgttcagtcgcaggtgaaaccgttaacgaccggacgggtgatttttgccattgccgggatctatgtgacgcagagcctggtatcggcgctctctatgcagtccctgcctgcgctggtgcgcgccgccggcggctcgctggcccttgccggcgcgacaacgctgtttatgttgccctgggcgctgaagtttatctgggcgccgtggattgagcgctggcgcctgccgcccgatcgcccggagcgtcgttcccgcctgttaatcctccggggtcaggttgggttggcggcgatcctgacggttgccgctgcgaccggcgcggtcgggcgaacagggggatttcccgacacgcaaatcgccgcgttgtttgcgctgtttttactcgcgggtacggttgccgccaccatcgatattgccagcgacggcttttgtgtcgatcagctcagtcgcgcaggttacggctggggaaacagcgtccaggtcggcggcagctatctgggaatgatgtgcggcggcggcgtcttcctgatgctagcggcggcattcgactggccggtggccatgctgatcatggcggcgctgatcctggtcttatccgttcccctgtggcgcattgccgaacccatgcgcatcacgtctgtaccgcatgttccggcgttgggttatgcgcttaaaaggcgacaggcgcggctgggtttactgttggtgctgatgctgaataccgggatgcggttcgtgttgcctcttctggcgccgctgctgctggatcaggggttgagcatgtcggcgctcggcgcgctattcagcgctggcaatatcgcggctggtatcgcaggaacgctggcgggcggggtgctgatgaaatacacctcccccggcagagcgctgcttgcggcttatggcctccagggcgtcgtgctgatggcaatagtaacgacgttgctgctggcgccgggacatttgcggctgccgttactccaggggctgatcatcctgcaatccatttcgctggcctgcgccctggtctgtctttacgccacgctgatgacgctttcatcgcctctgcaggctggcgtcgattttacgctctttcaatgtactgatgccgccatcgccattctggctggcgtggttggcggcgtaattgcgcagcattttggctatgcggcctgctttatgtttggcggcgcattcacgctgctggcagcgtggattgcttctacccggctgcattcgacaaacgcaattgaaggatccgggaataacacagagaggtaa

SEQ ID NO: 172152 - DNA, 1311 bp, Klebsiella oxytoca
atgaaaatcagtgaatttttacatctggcgctcccagaggaacggcggctgccgacgatttgtggcgtcttacgccagttcgccgatgaagagtgctatgtctatgagcggcaaccgtgttggtatatcggcaaaggatgccaggcacggttgatcattaatgctgacggcacgcgggcgacctttatcaatgcggacggagagcagcaatgggcggtggattccattaccgactgcgcgcgtcgttttatggcccatcctcaggtgaaagggcgtcgggtatatggccaggtcgggtttaactttgcggcgcatacccgtgggatagcctatcacgctggcgagtggccattgctgacgttaaccgttccccgtgaggaactgatttttgaacagggaaatgtcaccgtttctgccgacaccgccagcgaatgccgacgtctgtgcgagtgggtaaaagcagccggtacggcgacgccgtgtaacaccgtgactgtggataccgccaacaacggtgaagcctatcaggagcaggtggcgcgcgtggtttcggcgatccgccgcggtgaatatgtcaaagcgattgtctcgcgggctattgccttgccatcgcgtattgatatgccctccacgctattatgcgggcggcaggccaatacgcccacccgttcgtttatgtttcgccagcaggggcgagaagcgctggggtttagcccggagctggtgatgtcggtcagcggaagcaaagtcgtcactgaaccccttgcgggtacccgcgatcgcatgggggatccgcagcagaataaggagaaagagaccgagctgctgcatgacggtaaagaggtgctggagcacatcctgtcggtgaaggaggcgatcgctgaactggcggtggtctgccagccgggcagcgtggtggttgaagatttgatgtcggttcgccagcgcggtagtgttcagcatctgggatcttgcgtcagcggtcagcttgcggaaagtaaggatgcctgggatgcatttaccgtgctgtttccgtcgattaccgcctcgggtatccccaagaatgcggccctgagcgcgattatgcaaattgagaagacgccgcgggagctctattccggggcggtgctgctgctggaggacacgcgctttgatgcggcgttagtcctgcgatccgtatttcaggacagccagcgctgctggatacaggcgggggcggggatcattgcgcaatcgacgccggaacgcgaactgacggaaacccgggaaaaattagcgagtattgcgccctatttaagggtgtctgcctaa

SEQ ID NO: 172153 - DNA, 1392 bp, Klebsiella oxytoca
atgttatcattattaaaaaaagggccgtcggcgaataaagttcctgatgagaaaattcaggcaacttatggtcgataccgcatgcaggcgctgctaagcgtatttctgggatatctggcgtactatattgtgcgcaataacttcacattatccacgccctatctgaaagagcagttagaccttagcgccacgcagatcggtttgctcagcagctgtatgctgatagcgtacggtatcagtaaaggcgtgatgagcagccttgcggataaagccagcccgaaagtgtttatggcctgcggtctcgtactgtgcgcaatcgtcaacgtcgggttaggattcagtaccgcattctggatcttcgctgcgctggttgtcctgaacggcctgtttcaggggatgggggtcggcccctcttttattaccatcgctaactggttcccgcgtcgggagcgtggccgcgtaggggctttctggaatatttcccataacgtcggcggcgggattgtcgccccgatcgtcggcgccgcatttgcgattctcggtaccgagcactggcagagcgccagctacattgtgccggcctgcgtggcggtggtattcgccatcagcgtactggtgctgggtaaaggttcgccgcgcgaggaaggcctgccttcgctggaagagatgatgccggaagaaaaagtggtgctgaagaccaaacatactcagcaagcgccggagaacatgagcgctttccagatcttctgcacctacgtcctgcgcaataaaaacgcctggtatgtctccttcgtcgatgtctttgtctacatggtgcgtttcggcatgatcagctggctgcctatctatctgctgacggtgaaacatttttctaaagagcagatgagcgtcgccttcctgttttttgagtgggcagcgattccttctaccctactggccgggtggctttccgacaagctgttcaaagggcgccggatgccgttagccatgatctgcatggcgctaatcttcatctgtctgatcggctactggaaaagcgaatctctgctgatggtcacggtattcgcggcgattgtgggctgcctgatttacgtcccgcagtttctggcctcggtccaaaccatggagatcgtccccagctttgccgttggttcagccgtgggtctgcgcggatttatgagctatatctttggcgcctcgttaggcaccagcctgtttggcgtgatggtcgataaaatgggctggcacggcgggttctatctgctgatgggcgggatcgtctgctgcatcctgttctgctacctctctcatcgcggcgcgctggagcttgagcaacagcgtaaaatcaccgagcaggaagaggcccggctggcgctggctgacgcacagtaa

SEQ ID NO: 172154 - DNA, 1254 bp, Klebsiella oxytoca
atgtctcttcgtcggggcgggatagtgagcaaaatgctcgcgctgatgctgctgaccgcctggctgagaccctgtgcggcgcaaagcaatgagctggtgatggcgacgacattttctcccagcgccaccgtgtggattatcgatcgctggcagacggagccggggtcagtgatgatcaggacgctcaaccgcaccagcgcctcgctggaacagctgcttgatacggcaaatgccgaaaatgtcgatctgatcctgacctcgtcgccgatgctgctgcagcatcttcaggagcatcaaaaactggcgccgttcagcggtgcgccggcagtcagccaacatctggtgccggaatctatccgctccacctccgtggccgtggcgatttccgggttcggtttgctgattaatcgctcggcgctgatgacacggcatctgcctgcgccagcggactgggatgacctgaccgatccccgctatcagggggcgctgctgatgagcagtccgtcgcgttcggataccaaccatctgatggtggagtcgctgctgcagcaaaagggctggattaagggatgggaaacgctgttgacgagtgccggaaacctcgtgaccatttcatcccgcagctttggggtggcggataagattaaaagcggcctgggcgtggccggtccggtgattgataactacgccaatctgctgctgaacgatccgcacctggcttttacctatttcccgcagtcggcggtttcgccgacctatgtcgcggtgcttaaaaacagtcagcacgccagcgaggcgcggcggtttattcgctatctgttaagcccggagggccaggcgatcctcgccgatgctaataccgggaaatacccggtaacgccgctggcggcaggcaatccgcgggcggcgcagcaggcggtgctgatgaatcaaccgccattgaactatcggctgatcctcaaacgccagcgtctggttcaacggatgttcgatacggcgatcagctttcgtcttgcccagctaaaagatgcctggcgagcgctgcacagcgcggaggcccgtctcaagcgtccgctgcccgagatacgcgcgttgctgacccgtgtgccggtcgatccggcgagcagcgaggatgaagcctggctggctcagttcgacaataagagcttcgcggaacagcagatgatggagtggcagctctggtttctcaacaatcagcggcaggcgattaataaactggaagaactgaaatga

SEQ ID NO: 172155 - DNA, 2010 bp, Klebsiella oxytoca
atgatgggcaggtccatgctgcaacgtctgcggcaaatcagtatcagtagcagcctacgcggggcttttctgatgggggcgctgctgacgctgattgtcagcagcgtcagcctctattcatggcatgagcaaagttcgcagatccgctattcgctggatgagtattttccgcgcatccattcggcttttctgattgaagggaatctcaacctggtggtcgatcagctcaatgaatttctgctggcgccgaataccacggtacggctgcagctgcgcaaccagattatccagcatctggataaaatagagcggctcagccaggggttgtcgccggcagaacgccagcagctggcggtgatattgcaggacagccgcgcgctgctggcggaactggatcgcgtgctctacaacatgtttctggttcgcgaaaaggtgggagagctttcggcgcggatcgactggctgcacgatgatttcaccaccgagctgaattcgctggtgcaggattttacctggcaacagggaacgctgctcgatcagattgaagcccgacagggggatgcggcacagtacctgaaacgctcccgggaagtacagaatgaacaacagcaggtctataccctggctcgtattgaaaatcagatcgttgacgacctgcgcgacaggctcaatgaactgaaatccggtaatgatgacggcatgctggtggagacgcatatccgctatcttgaaaacctgaagaaaacgtcggatgaaaatattcgtgcgctggatgactggccgagcaccattaccctgcgacaaacgatcgatgagctgctggaaattggcatggtgaaaaataagatgccggacaccatgcgcgactacgttactgcgcaaaaagcgctcgtggaagccagccgggccagagaagcgacgctgggacgcttcagaacgctgctggaagcccagcttggcagcagtcaccagcagatgcagatgtttaatcagcgtatggggcagattgtccgggtcagcggcgggctaatcctggtggcgacgctgctggcgctgctgctggcgtgggggttgaatcattattttattcgctcgcggctggtgaaacgctttaccgcgctgaatcaggcggtggtgcagattggtctgggccagaccgaggcgaccattccggtttacgggcgcgacgagctgggacgtattgccggtttgcttcgccataccctgggtcagcttaatgcgcaaaaacagcagcttgaacaggagataggcgagcggaaagcgattgaggccgatctgcgtgccactcaggacgagctgatccagactgctaaactggcggtggtggggcagacgatgaccaccctggcgcatgagatcaatcagccgttgaatgcgctgtcgatgtatctttttaccgcaggaagggcaatcgagcagggacagacggagcaggcgcggacgacgttaagcaaagcggaagggctgatcaaccgcattgacgcgattatccgctccctgcgccagtttacccgccgcgcagaactggaaacagcgctgcacccggtcgatttgcgccagacatttaccgtggcgtgggaattgctggcgatgcgacataaacctcagcaggggacgctgctgataccggatgacaccgtctggatcctgggagacgaagtgcgtgttcatcaggtgctggtgaacgtgctgtcaaatgcccttgatgcttgcccgcacgcagcgcaaatcaccgtgagctggcaaatccagggcgaaaggctgtgcgtgttgattgccgataacggccccggctggcctgcggccttactcccttcgctgttaaagccgttcactaccagcaaagccgtgggactgggaatagggctttcgatatgtgtttcgctgatgacgcaaatggaaggggcgttgcgcctggcgtcgacgtttacgcgcagtgcctgcgtggtgctggaattcaatttgacggatgtaaaagatgttgagtaa

SEQ ID NO: 172156 - DNA, 1251 bp, Klebsiella oxytoca
atgttgagtaataactgttcgattctgctgattgatgatgatgccgatgtgctggatgcctatacgcagctgcttgagcaagcggggtatcacgtcagtgcctgtaataatccttttgatgcgcgggagcaggtgccgaaggactggcccggcattgttttaagcgatgtctgcatgcccggctgctccggaatcgatttaatgacgttgtttcatcaggatgacgatctgctgccgattctgcttatcaccggtcacggcgatgtgccgatggcggtggaggcggtgaaaaaaggggcctgggatttcctgcaaaaaccgatcgatccgggcaagctgctcacgctggtggatgccgcgctgcgtcagaggcaatcggtgatcgcccgtcgccagtattgtcagcaaaaattacaggttgagcttattggccgtagccaatggacggatcgatatcgccagcgccttcagcagctggcagagacggatattgcggtatggctttacggcgagccgggaaccggccgcatgaccggcgcgcgttacctgcaccagttagggcgtcacgccgacggtccgtttatctcctgcgaactaaatacggctaacgcccacacgctgaatgaactgatcgcgcaagcccagggcgggacgctggtcttaagtcacctggagcatctgactcacgggcaacagcatcatctggtacagctgcagagtcatgagaaacggccttttcgcctgattggtatcggtaatgcttcgctggtggagctggccgccagcagccagatagtggcggaactctattactgcttcgcgatgacgcaaattggctgccagcctctgtcaaagcgacctgatgatatcgagccgctgtttcatcactatttgcaaaaaacctgtcaacggctgaatcatcccgtcccggaggtggatgccggtctgttgaaggggatgatgcggcgagtgtggccaaataacgttcgcgaactggcgaacgccgccgagctgtttgcggtgggggtattaccgctcgcggaaacggtgaatccgcagatgcttgtcggcgaaccgacgccgctggatcggcgggttgaggacgtcgagcggcagattatcactgaagcgctgaatatccaccagggacgtatcaatgaggtggcggagtatctgcttataccgcgtaaaaaactctacctcagaatgaagaagtatggcctgagtaaagagcattacaaaggggtgtag

SEQ ID NO: 172157 - DNA, 1284 bp, Klebsiella oxytoca
atggaaaccgttcaaaataccctcgtcgctcgcgagagcagcggctggagaaagagtgataccgtctggatgctgggtctgtacggtactgcgattggcgcaggggtgctttttttgccaattaacgccggggtcggcggtttaattccgttaatcatcatggctattcttgcatttccgatgacgttttttgcccaccgtggtttaactcgttttgttctgtcgggcaaaaacccgggggaagatattaccgaagttgtggaagagcatttcggtacgggcgccggtaagctcatcacgctgctgtacttcttcgctatttatccgattctgctggtctacagcgtggctattactaacacggtcgatagctttattactcaccagcttggtctggtgtctccgccgcgcgccattttgtcgctgattctcattgtcggcatgatgggaatcgtccgctttggcgaaaaaatgattgttaaagccatgagcgtgctggtgtttccattcgtctttgcgctgatggtgctggcgctgtatttgataccgcaatggaacggcgcggtactggatacgctgtcgctgagcagcgcctccgcaacggggaacggtctgtggatgaccctgtggctggcaatcccggtcatggtgttctcctttaaccattcgccaattatctcctcctttgcggtggcaaagcgggaagaatatggtcaggacgctgagcgcaagtgctcgcgtatcctgggcttcgcccacatcatgatggtgctgaccgtgatgttcttcgtgttcagctgcgtactaagcctctcaccggaaaacctggcggaagcgaaggctcagaatatctccattctttcctacctggcgaaccacttcaacgcgccggtgattgcctggatggcgccgattatcgccatgatcgcgattaccaaatccttccttggccactacctcggggcgcgtgaaggtttcaacggcatggtgattaaatctctgcgcggaaaaggtaaatccatcgaaatcaacaagctgaacaagattaccgcgctgtttatgctggtgacgacctggcttgtcgctaccctgaacccaagcatcctgggcatgattgagaccctgggcggtccggttatcgcgatgattttgttcctgatgccaatgtatgccattaacaaagtcccggccatgcgcaagtacagcggtcatatcagcaatgcgtttgtggttgtcatggggttaattgccatctccgccattttcttctctctgtttagctaa

SEQ ID NO: 172158 - DNA, 1368 bp, Klebsiella oxytoca
atgattagcgttttcgatattttcaaaatcagcatcgggccgtccagctcacataccgtcgggccgatgaaagcgggaaaacattttgttgataccctgcaggaaaagggcctgctgcaaaaagtgaatcgtctggtagtggatgtgtatggttcactttcattaacgggtaaaggtcaccacaccgatatcgccatcattctcggactatcgggatatttaccggataccgtggatatcgacgccatccccggtattattcgtgatgtgaacaccatgcatcgtctctttatagaagaaggccagcgagaaattcagttcccggtggcggaatgcatgcgttttcataatgaatttctgccgctgcatgaaaacggcatgagcattacggcgttttgcgacggcaaaattgcccatttccagacctattattccatcggcggcggttttatcgtgacggaggaaaactttggtaagaatcaggatgccgaagtcgatattccgttcccgttctattccgcacgtaatctgctggcgcactgtcatgacaactgcctgtcgatttctgccgtgatgatgaaaaatgagatcgctcgccacggcagagagagcgtggagcaaaatatggcgaaaatctgggagaccatgagaaacgccattaaccggggtatgaatacggaaggcatcttgccggggccgctgaaagtaccgcgccgtgcttctgcgctgcaccgcgtgctggcgccccagagccagtcgattacgccactgagcgccatggattgggtcaatatgttcgcgatggcggtgggagaggagaacgcggcgggcgggcgagtggttaccgcgccgactaacggcgcctgcggcattgttccggcggtactggcctattacgatcgttttatcaaagaggtgacgccggaaatctatatgcgctattacctgacggcgggcgccattggcattctgtacaagatgaatgcctcgatttccggagcagaagttggttgccagggagaagtgggcgtggcctgctcaatggcctctgccggtctggccgaactgctgggcggcagtccggagaaggtgtgcattgccgcggagatcggcatggagcataacctcggcctgacctgcgatccggtggccgggcaggtccaggtcccctgtatcgagcgtaacgcgattgcggcagtgaaggcgattaactcggccagcatggcgatgtaccggaccagcgatccaaaagtctcactggataaagtcatcgaaacgatgtttgagacaggcaaagacatgaatgccaaataccgtgaaaccgcccggggcggtctggcaataaaagtcgcggtatgtgaatcctga

SEQ ID NO: 172159 - DNA, 441 bp, Klebsiella oxytoca
atgcgtttcagtaccatgcccgacagtgaaattatttctgaactgtgccgaagaattaaagaaacgcgtatacagctgggattgtcacagattgagctggccgaacgcgcccaggtaggtgcggcaaccattaagcgcgttgaattgggtgagtcggtgaccctcagtacgcttattggcattttgcgcggtctggatcgtctgcatcagctggagtcgattttattcgattcgcacatgcgcacctttaaggcgcagctcaatgccgagaccccttcccgtatccgtatccgtaaaaaaacgcctcaggcaaaagagaaattgcccactgctacgccgcctggcgaggctaatgccaccattaacgagtggtacacctcatcggcttcgaacagcgtggtatggtctttcacaccgccggacgcggagaaaaaaagctaa

SEQ ID NO: 172160 - DNA, 162 bp, Klebsiella oxytoca
gtgccgcgactccttcagggcatcctggcgctgattattatcaaaaatgtcattttttttgttttgttagattcaaatgttcttgtcgattgtatcgaattccttattgctcaaagtattgagttttttaacccgaggcaaaataaggtcttaatggtttaa

SEQ ID NO: 172161 - DNA, 171 bp, Klebsiella oxytoca
atgtttaaactgtcaatttttgcgtttttactatctatgtttaccgtttccgctattgcagatgatgatattgcagcactgattgttgatcccggtccgggtgtgtgtaatttaattaatgccggcattgacgttccaggcataatcgacattagtgtttgtaaaaaataa

SEQ ID NO: 172162 - DNA, 1053 bp, Klebsiella oxytoca
atgaaaatcacgcgtaatcaagatattgatcgtatgaggggactcacagtctttctgatgctggttgttaatagcccagtagacttgaggataacgaactctgcgttaatccactcagaatgggcggggttatcgttggcggataccgtgtttcctacgtttctttttattgtgggtatttctctgacgctgtcaaatcgtcttaaaaaaatcacgctgcgaggcctgtttataaggtcaacggttctagtcctgacaggaatatttctgaaagcaattgtctttgttttgtacgatcaggagcatttcaaaatcatgggggtgctgcaacgcatcggtatttgctatggagtgacaggcttaatttatcactttatcagcaataaaaagctaactgctctatgcctggcgctcatacttgcgtggtcagccattttaatggtatggggagattataatcaatacgcaaatatttctgatgtcgtagatgatttactgcttggcgcgcatgctaattattataatactgacactggcagatctggggactcagaaggcgtattgagcacgctcggcgcccttatcaccactttgtcaggcgttatcttcggagagcaaataaataaaatcagtgacgcccgggggttctgctatggaatggtttgtataataacgggtttttttctggcttactatttttcgataccgattgttaagaagctctggacaccatcatttctcttaatttgtgtcggcattgcaatttggctttatctattagtgaaaagaatggccgtaatagatctcaccttgctcgagtacccgggaaaacattccctggctatttatgtgatttcagtcatcgcttttgatgttctgctttactgtcatgtctggcattctttatttgttgcagtctacacctggctaatcccgcgcagtattcctctccagggagcaacgttgtttttttctgtgctgttttcatctgttatatgctttacaccgtatctgatacaaaaaacgatgtttttcgttaaaagagcgatctaa

SEQ ID NO: 172163 - DNA, 273 bp, Klebsiella oxytoca
atgaaaaaggtattagctgcattagcgttatccgcgtttgcatttggcgcctcagcctctcagttgattacgaaacaagaagttgaccattttaaactgacccatgtaggcagtatctctgtaggaccttccggcggtcaattctcttctccctctgacttgcacgatcagctttcaaaattagctgatgaaaaaggtggcaagttctatgtgattaccgcggctcgtgagcatggtccaaactttgaagcaactgctgaagtttataaataa

SEQ ID NO: 172164 - DNA, 1371 bp, Klebsiella oxytoca
atgaatcagacaaacatcgttgatataaaggcgtggattgatgcccggccgatatcacgctttcagtggcatgtcctgctcctttgctttcttatcattatgcttgatggttatgatgccgcagtcatgggctttattgcccctgcgttaattgaggactggagcatcagccgcgctcagctaggcccgatactgggtgctgccatgttcggcgtcgccatcggtgctttggtcgcagggccattgtcggatcgttatggtcgcaagcggattctgctctggtcagttgcttttttcgccctttttagtctggctgctgcggcggcgcagagtccgctgcaaatggcgctaatgcgctttctcaccgggttaggtttaggggctgtcatgccaaactgcgtaacgctcgttgcggagtacatgcctgaacggcgtaagggcttaatgataaccctgatgtacagcggatttaatgtcggctctggtctgggtggatttattgccgctggtctgctttcgcattacagctggcattcggcgctgattttcggcggtgtgctaccgctggttctgctgcccattatgctcgtcctgctgcccgagtcggctatgagcatggttgcccgccgggtgccaacagaaaaaattgccaacgtgctgaatcgcatgggtggaaacttcaatgaaaataacatcttcactctgaataccccgctgatatcgcgcagcagtaaggtgattcaactgtttcgtcacggatacgccaggggcacagttgcgttgtggctgacctattttatgggactgtttgttatttacctgcttaacggctggctacccactatcctgcgttccggggggctctcactgcagcaggctgcgatcattaccggtctattccagcttggcggtccgcttggcggcattatcgtcggctatatgatggatcgcaccgccgcaaaaaaagttattgcccttacctacttccttggctgcctgtgtctgctaacgcaaggagtgatggatttcggctccgtgacgctggcggtactgattttcctcagcggaatgtgtattaatggagcgcaaaatggccttcaggcctattctcccgcctattaccaaacggaaattcgcgccacgggcgtaagctggatgcacggcatcggccgcacgggagcgattctgagctccacgctcggcggcgtcatcatgctggccgttcctggtcactcgtctattttcctggtactcgctttgccggcatgtctggcgggcatcgctattttgttgcaccgtatgaaccgaaaagagcctcgtgcaacagaggcagaactgagtgcactgtcgcaaaccctgcataaccgataa

SEQ ID NO: 172165 - DNA, 1263 bp, Klebsiella oxytoca
atggcccgcatacttggcggtattgccgtctcacacacgccgacaattggcttcgcggtcgatcaccacaaacagcaggatccggcgtggtcccctattttccaaagcttcgagccgcttcagcgctggcttgatgagaaaaagcccgacgcgctggtctacatctttaacgatcatgtgaccgcctttttctttgatcactattccgcgtttaccctcggaatcgacaaagagtatggcgtcgcagacgaaggcggcggcccgcgcgatctgccgccggtaaaaggcgatgcggcactctcgcggcacattggtgcgagcctgatggccgacgagtttgatatgtcgttctttatgaataaaaaactggatcacgggttgttttcacccctgtcggcgcttctgccctggcagcagaatgagggctggccaacgcgggtgatcccgctgcagatcggcgtgctacagttcccggtccccagcgcaaaacgttgctataagcttggccaggctttacgccgagccatcgaaagctaccctgaagatatcgacgtggcaatcgtagcgacgggcgggctgtcgcatcaggtacacggagaacgcagtggattcaacaataccgactgggacgcgcagtttgtcgacatgctggttaacgacccggaaaaactcaccgaaatgaccatcagtgaatatgcgacgttgggcggtatggaaggttcagaggttattatgtggctggtgatgcgcggcgccctttcagccaatgttactgagacctggcgtgattactacctgccctcaatgaccggcattgcaacgcttattctggaaaataacgcccgcacgccgcctgtggacaccctgtcccgccaccgccagcatatggcgcagcagctggctggcgttgaaaacctgccgggaacgtatccctttacgcatgagcgcagcctgaacggcctgcggctgaacaacttcctgcataagctgacgcagcccgcctggcgcgagcgcttcctgagctcgccgcagacactgtatgaggaggccgggctgagccaggaggaacaacgtctgctgaccgaacgcgactggcgcggtttaatccagtatggcgcaagctttttcctgctggagaaaatgggcgcggtagtcggcgtatcgaacctgcatatttacgccgccatgcgcggtcaagcgctggaggagtttcagaaaacgcgcaaccagcaggtcacctattctgtcgccggcacccgttag

SEQ ID NO: 172166 - DNA, 1266 bp, Klebsiella oxytoca
atgttgttatttggttcattgagcgacgccgggcagatcatgcagagaaaaatacgaagcaattcgataaatattatgcagctacgctttttctgtcaggtagcattaaggggtagtgtctcccgtgctgccgatgatttatttcgtacgcagtccgccattacgcgcgcaatacgcgatctggaagcctcactgaacgttattcttttcgagcgtcactacagcggtatggtgcttacggagtacggtaaatgtatattaccccgcgccaggcgggcggtagaggatttgcaggccgtgccagccctgatgcgaaaattgaaggtgcgcgccagcgcgtctaccgcgctgccggatgccggctggctatttcatacccgtcggctggaaatttttattcaactgtatcatgtcaatcatacccagaccgtcgctacccaactgggggtgacgcaaccggcaattagcgcagcgcttaaaattctggagaaaggggccgacgcggcgctgtttcgccgtaccccggaaggggttcgtccgacagctgcggcagacgtgctttatccccacatcagccggtcgctgaacgaactggataatatctggagcgatctcgccgcccggcgcggcgtgcttgagggaagcgtgcgtataggtgcgctgccgctcagccgcacgcagctgctacccggcgcgatcgccagtttcctcgcgcgccatccaaacatcacaataatgactaacgagagcccgtatgaatctctggtgtcggacatgcgcgcgggcaatattgattttattattggtgccctgcgtcaggatgaggatctccccgaactgacaaacgaagcgctcttcgaagaagatatgctgatcctggcgcgcaatgaccatccgctgctgcacgatcccgatcccaggagcaagctggcgcaggcacagtgggtgctacctcgctcgaacgcgccagcgcggcatctgctggacaatgcctttctcatatcagggctgcctttaccacagccctgtgttgaaaccggcgatgcggcgatggttcgtggcctgctgcttcactccgatatgctggcggcggtatctacaagccaaatgcgctatgaaatcgagaacgggctgctcaccgttttgcctgttcgcctgcccgatacgacacgccgtatcgggctgaccttccgcgaagggagcataccgtcacccgctacgcaagctctgttaacttttattcataaccacgtggcgaaaggctaa

SEQ ID NO: 172167 - DNA, 741 bp, Klebsiella oxytoca
atgtcccaaccgattcgtgaaaaaagtgcccttgtcgttagcgcccactccgctgatttcgtctggcgcgcaggtggcgcgatagccctgcacgtcgagcagggctatcaggtgcatattgtctgcttgtcgttcggcgagcgcggggaatccgctaaactatggcgcaaaggcaatatgaccgaagaaacggtaaaacatcatcgtcgggaagaagcgcaggctgccgccgacattctgggagccagcgtggagttttttgatattggcgactatccgctgcgtgccgacaaagaaacgctgttccgcctggcggatgtttatcgtcgcgtacagccacactttgtcctgacccactccatgcaggatccttataactacgatcacccgatggcgtcgaacctggcgcaggaagcccgcattatcgcccaggccgaaggataccgtcctggtgaacctgtcgtgcaggcgccgccagtctattgctttgagccgcatcagcctgaacagtgcagctggaagccggacctcctgctggatatcactcgcgtctgggagaaaaagtatcaggcgatccagtgcatgcagggccaggaacacctgtgggaatactatacccgcgtggcgctccagcggggcgtgcaggctaaacgcaatatcggcatcaccgccgcgcgtgacatcgtgcatgccgaaggtttccagagcatcttccctcgcgtgacggagaacctcgcatga

SEQ ID NO: 172168 - DNA, 714 bp, Klebsiella oxytoca
atgaatctgcttaaccgtaaaggcattgtcgttcgctcccttccccgccacgacgatgccgccctgcgtcagttcaccgcggcgggggtagccacgcttcacgaagcttacgaccgtcagggacttatggccccgcacatcaggcccatacaacagggcatatgccgtgccggaaatgcggtcacagtgctggtcacgcccggcgataactggatgttccacgttgccgtcgagcagtgccgtccgggcgatatcctcgtggtggcccccacctcactctgcggggatggcttttttggcgacctgctggccacgtcgctacaatcgcgcggcgtcgtgggactggtgggtgatatcggcatccgtgattcgcataccctccgcgagatgggctttgccgtctggtccaggcaggtttacgcccagggcacggtgaaagagacgttgggctcggttaacgtcccgattatctgtgcaggccagttggtgacgccaggggatgtgattgtcgccgacgacgatggcgtggtggtcatcccgcacgcgcttggccgcgaggtgctagcaaaagccgaaacccgaatggcgaacgaagaagcgaaacgagagcggatgaggagcggggaactggggctggatatctacgcgatgcgcccgcgtctcgctgaaaaaggactgcgttattacgacagcgcggaagatgcggagaattaa

SEQ ID NO: 172169 - DNA, 1083 bp, Klebsiella oxytoca
atggcacagcgcagaattccctgcttactgatgcgcggcggtacctctaaggccgcctgcttcctggcagacgatttaccggtgcagcccgcaagtcgggacgcggtgctgctggcggcgatgggttcaccggatgcgcgtcaaatcgacggcattggcggagccgatccgctgaccagcaaggtggcaattattcgccgctcggcgcggccagatgccgacgtcgattatctttttgcccaggtcaacgtcgagcgtgccgtagtcgattacggtcagaactgcggcaacattctggcggccgtcgggccgtttgccattgagcgcggcctggttgactgtgtcccccccctgacccgggtgcgcatctatatggagaacaccggccagcttgctgttgcagaagtaccctgtagcaatgaaggggtggagtatgcgggagacacccgcattgacggcgtgcccggtacggccagcaaaattgtgctcaatttcctcgatgtggcgggctcaagctgcggcgcgctgctccccaccgggcagccgcgcgatcgcttcgacggcgttgatgtgacctgtatcgataacggtatgccagtggtccttgtccgcgccagcgatctgggccgcacgggttatgagacccgcgaacagctcgacgccgacgatgagctgaagcagcggctggagtctattcggctgcaggccggaccgcgcatgaatctgggcgacgtgtcgcagcgcacggttcccaaaatgacgctgattgccagaccgcgcgccggaggagccatcagcagtcgaacctttattccgcaccgctgccatgcttcgattggcgtttttggcgcggtgagcgtcgccagcgcctgtcttattccaggctcggtggcgcaagagctggcgagtcttgagcgtgcgccagagctgagcgttgagcatccaaccggtgaattcagcgtagcgctccggctcagtgataacgaccagctggcaggctgcggcctgctgcgcacggcgcgactgctgttcgccggcgacgtttgcattccggccgacgtgtggccgcgtgaggagcagtga

SEQ ID NO: 172170 - DNA, 885 bp, Klebsiella oxytoca
atgacgacaattacgtttataggctatggtgaagcaggaggcattcttgcggatgcgctggcaaaagagaacccggtcaccgtctgggattgcaagctgaatggtcccgagcgcgatgcaatgatgacgaaggcgaacagaggaggcgtgcgggcagcaagctccctggccgacgcgctgacgggtgctgaactcatattttccaccgttaccgcaggatccgcgctggatgtggcttcacaagctgccccgctgatgacggatacgcagtattttcttgaccttaactctgtcgccccgcagaccaagcggcaggctgccgaacgctttaagcccggcgcttatgtcgatgtagcggtgatggcaccagtcccccccggggcgctcagaacgcctctgctgacggggggaccacaggcaaaagcaatcgcagaattactgactgcgctcggatgtcatgcccgctacggcggggacgaggtaggcagcgtatcggctatcaagatgtgccgcagcgtgatgatcaaagggctggaggcgctgaccgccgaatgcctgttcgccgcccgtcagtacggcgttgaggaggcggtgctggcatcgctccacgccagcttcccctcattgggctggaatgacgccttccccgactacctcataagccgcgttgccgagcatggcatccggcgcagcgaagagatggaagaagtagtcaaaacccttcgcgatgtggcgggagaaggtgtgatgagtcaggcaacggcgaaagcccagcgccacctgccagatcgtttggcggcgcaaggcattacctatgcgcagctcgagccgttcgactggaaagcgctggcagcgttgcttaaaggccaggttcaaacgtattaa

SEQ ID NO: 172171 - DNA, 2076 bp, Klebsiella oxytoca
atgtcaaaggaaaatgcttttatcatacggccaggccacggccagcagttgggggctaatttcgacgggaagggggtgaacttcgcactgttttcagcgcatgctgaacgcgttgagctgtgcttattcgatccttccggtaaaaccgaaatagcccggcttgaactgcctgaatatacagatgagatctggcacggctatgtacccgatctgcagcccggcgcattgtacggttatcgggtttacggaccttacgatccggaaaacggtcatcgctttaatcccaataaattgcttatcgatccctacgcgcgggagctggaaggcgatgttgagtggaacgatgcgcatttcggctacgagttgggccatgaggagagcgacctgagctttgatagtcgcgatagcgcgccatatacgccaaaatgtaaggttatcgacccggatgccttcgactggcagggggaaaaccgtcccaatgtaccctggccgaagacggttatctacgaaacccatgtcaaaggttttacccggcttaatccggcgcttcctcaggagctgcgcggcacatttgaggggcttgggcatcaggcttccgtcgattatattaaaagtctgggcattacttccgtcgaactgctccccgtacactggtttcccgatgaccagcatctgctcgatcgggggctgaaaaacttctggggttacaatacgctaggcttctttgctcccgcttcccgctattatggccctgaaggtatagcgggctttcgcaacatggtgcgcgcttttcatgatgccggcatcgaagtgatccttgacgtggtgtataaccacaccgcggaaggcaatgagctgggcccgacgctctcatttaaaggtatcgataatttctcttattaccggacgatgccggatcagcatcgttattacattaatgataccgggaccgggaatacggtgaatacatcgcatccccgggtgctgcagatggttatggattcgctacggtactgggcgcaatcgatgcacgttgacggctttcgtttcgacctcgggactattcttggacgcgagccagaaggcttcgatccgcgaggcggttttttcgatgcggtaacccaggatccggttttatcgaagcttaaactgattggtgagccgtgggatattggcccaggcggctatcaggtcggcggtttcccgcctggctggggcgagtggaacgacaaatatcgtgatacggtgcgggaatactggaagggagataacgtctccaacgactttgccgcccgcttactgggctcgggcgatctgtacgatttacgcggtcgtcgtccgtggtccagcgtcaattttattaccgcccatgacggctttacgttgaacgatctggtttcatataacgagaagcataatgaagccaacggtgaggacaataacgacgggcacaacgataaccgttcctgcaactatggcgaagaaggcccgacggaaaatcaggatattattgccgtccgtgaacgccagaagcgtaattttctggcaacgttatttttctcccacggtacgccgatgctgctggccggcgatgagtttggtcgttcgcagcagggcaataataacggctactgccaggacagcgagatttcatggttcaactgggaagcgcagtctgagcgggatcgtgcattacgagacttcacccagcatctgattgcactgcgcgcggagcaaccgcttttacgtcgtgaaagctggcgcgacgggctggaaatacgctggtttaacgccggcggcggtttgcagcaatcagagcaatgggatgagggttcgaccttaggccttgccatcagtcgacccgatctcgagaaggaggagggcatctggcatgacgtgctgatgctgttcaatccctttgaaggcgatgttccgttccagatcccgcagtttggcgaaggcggctgggttctcgaattgtcgaccgcagaggaaaaaacagacggcgcgattattaccgagacgattgattttgttctggccgggcgcagtattgcgctattcagacggccttag

SEQ ID NO: 172172 - DNA, 2541 bp, Klebsiella oxytoca
atgatcccttccgcaacctatcgtattcaattccgtaatggtatgaccttcgatcgcgcggcggcgctggccccgtatctgaaagcgctgggtattagccatctttacgcgtcgccgatatttacggcgaccaccggctccacccatggctatgatattaccgatccaaacgaaatcgacccggctattggcgggcgcgaagggtttgaccggctggtaaaggcgctgcggagcgcacaaattggcctgattctggatattgtccccaaccatatggcgacctctctggagaatcgctggtggcgggacgtcattgaacagggtaagcacagcgcctgggccaattatttcgatattgactggacgcgtcccgttacgctgccgtttctgggggatacctttgaggcagagctggagagcggggcgcttgagcttaagcgcgatcctgaaacggggaaaccggcgttcgtctattacgaccaggcctggccgctgaatcctgaaagtctggcaacaggtgagcaactactaacttcgccggatcgcgacgcgattgtggcgctgcacgaggcgcaaagctggcggctgatgtcgtggcgggaagcgcccagacagctctcctggcggcgctttttcgaaattacgggcctgattggcgtcagggtcgaagaacaggcggtattcgacgatacccaccgtcttattcttgaactggtacatgccggtatcgtcgatggtctgcgcatcgatcatatcgatgggcttgccgacccattagggtatttgcagcgtctgcgccaggccgccgggccagaatgctacattacggtggaaaaaattcttgcgaaaggcgagcagcttcccgctgtttggcccgtctccggcaccaccggatatgagtttatcgcttcgctggctgaagtgctggtggatgacaataatctcgaccagctgcagcaggtgcatgacgaagcgctcggcggcgcggtagatcgtcaccaggcgctgcgtgaggcgaaagggctgatggcggatcgcaactttgagggcgaatttaccactttgttgaggctggccatcgaactggcgcagcgtaatagcatggaggttgaaagcgaagcgctgcgccacgcattacgtgaactgctgctggcctttccggtatatcgcacctacggtaccgctgaggggatgagcgccgaggatattacgctattaaaccgggtcgtcgatcgggttaacgctcgggaaaaccgccccgatcccagggcccttgaggtcattatcgctatcctgaccggcaatttacaaacaagtagcctcgatgccgcctcgcttttcaggacccgttttcaacagctgacagggccgttaatggctaaatcggtcgaggatacgctgttcttccgccataacctcgatctggcgctgaatgaagtcggcgcggatcccacgccgcgcgctttctcgctttctcgtttccatcaggagatgcgtattcgccttgctcgccagcccgacgcgctgctgggcacttcgacgcacgacactaaacgcggggaggatgcgcgcgcccgtctgtataccttaacggaagctccgcagctgtgggcgaccaatcttgcgcgctggcgtcagatgaatcaaaccctggtgcgttttttgaacgacggtacggcgccgaacgcggcagatacgtggatgatctatcaggcgctcgccggcgtgtggcctgcaacgttgctgcctgacgatagcgcagggctgaaagccctcgaagaacgttttctcgcttttatggaaaaagcgctgcgcgaggctaagcaaagaaccgactggatcgacagcaatgaaagctatgaaagcgtcgtactgaactacgttcaacagctgttttctgctgataacgcgctgtttctcaatgatttttacacctccctgcagccttttgtccgtgccggtctggtgaacagccttagccagacggtcatcaaactgactgcgcctggggtaccggatatttatcaggggagcgaggcgctgaactttagcctcgtcgatccggataaccgccgtgaacctgacttcgccgccctggcacaacatcttgatagcggaagcgcggaactgtttcatcatgaaagcgcatggcgagacggacggttgaagcaattcgtcaccgcttcgtttctcagattaaggcagcagcattccgcgctctttcattatggtgactgggtaccattaaaagtcgcgggtgaaagagcagataattttatcgcctacgcgcgtatcaaagacgaggaagccctcatcgtggtggttcctcggctggtgtttgacgtggcggcgcacgggttggtcgagtcatcggcgcaactgtggggcgagacggcagtatcgctcccggaagatctggccggaaggcgctattgcgatgcattaaccggtgaaagccgtctggtagaagagacgctcgatctggcgtcagcaaccgggtggttattgacacttattagtgaaaaggaacgtggggaataa

SEQ ID NO: 172173 - DNA, 1788 bp, Klebsiella oxytoca
atggaatccatatcgtttaaaaagcattggggggcggaattcatttccgcggatattgtccgctttcgcgtctgggccgaaggtcaaaagtcgatgacgcttagcctgagacaccgggatattgcgatggaagccgtgggaaatggctggttccagatcgatgtccctggcgttaagcacggggatgaatatcagcttcgtttagccgacggccgcctcattcccgacccggccacccgcgcgcagcgcgatgatgtcaatggcccctcagtagtgatcgatccccgacgctatcaaccggttaaccgtgactggaaagggcgtccctgggaagaaaccgtgatatatgaacttcatccgggcacctttacgccagaaggcacctttgtcgccgctatcgaaaagctcccctggctggcagagttggggatcacccagatagaggttatgccggtgtctcagtttggtggttcgcgcggctggggctacgacggggtactactttatgccccgcattcagcttatggtaccccggaggattttcacgccttcatcgatgccgctcacgggttagggctttcggtggttctcgatatcgtgctgaaccattttggtccggaaggcaactatctctctttgctgtcgccgggcttttttcatcaggaccgaatgaccccctggggtaatgccatcgcctatgaaaacgaggccgtacgtcagtatattaccgacgcgccgctattctggcttaccgagtatcaacttgatgggctgcgctttgatgctattgaccagattgaagatcgctccgcccggcacgtgctgatagaaatagccgagaatatccgcgcggctatacccgaccgccatattcacctgacgacggaagatagccgtaacgtgattttcctccacccgcgcgatgaaaacgggcacacaccgctgtttaccgctgaatggaatgatgacttccataatgccgcgcacgttttcgcgaccggtgaaacccatgcgtattatcaggattttgcgcatcagccggcaaagaatgtcgctcgggcgctggcggaaggatttgtctatcagggggagatctctccacaaaccgggcaacctcgcggcgtctcctgcgccgttcagccaccgcagttctttgtcgactttattcagaatcacgatcaaaccgggaaccgagcccatggcgaaaggcttatctccctggccggcgctgagaaaacgcgcgtgctgcttgccgcattgcttctctctccccacattcccttactgtttatgggcgaagagtatggtgaaacccatccttttctattttttaccgattttcagggtgctctcgccaaagcggtaagagaagggcgggcaaaagagtttgccggacacgcagggcatgatgcctccgttccggatccgaacgatcctcaaacctttatccgctctaagctcgactggcagaaggcggcaagcgaggaggggaaatcctggctgcgctttacccgcaaccttatcttactgcgccatcgctatatcgtcccgctgctcgcggcagggggcgtcgtggaaggcaggatcctgcacgcggcggcgcatgcgctggcggtgagctggcgcttccccgacgggacgctctccgtggcgctgaatatcggcgcggaccccgtgacggtgccggagataccgggagaggtcatttttagctggccggagcggcaggaagcgttaacgccaaacagcattgttgtccgttttgcacatggagaagcttcatcatga

SEQ ID NO: 172174 - DNA, 528 bp, Klebsiella oxytoca
atgcagattcgtaaaggattaaattctgaccttgctcgcctcgaatattgtgatttttccttcacggtcagccaggttgccagaggccctttcatcaataatgatctgaaaattgagacacttccctgcgcttataataaaacctatgagctggatatccagacgctggaaaaccactgtattaatccggatgcaatattcctgattgccgaaaccgaagcgggacaggtggccggtttcatcaccgcatctctgagctggaacaggtttatttccgtcgattatattgccattgaaagctcacatcgcagagccggcgcggccaacaagctcatggccgccgcccatatctgggcccgcagtatgaacgctgcgggattaaagcttgagacgcagaacgttaacgtgcccgcctgcctcttctatcgaaattatggttttactctcggaggatacgatcgatatctctacaacgctttagcggaaaaagatgaaattgcgctgttctggtattacatgttgaactaa

SEQ ID NO: 172175 - DNA, 885 bp, Klebsiella oxytoca
atgacaacaggaaataattcatcgctacattatcctcttccgccgtttgttgagcagccgcagcaggctccggggctggcatctgaaatgaagccccttcccgaccatggtgagaccagctatatcggctccgggaagctcgcgggaaaaaaagcgcttattaccggcggtgattcaggtattggccgcgctgtcgctatcgcctatgcgcgtgaaggcgcggatgtcgccatcggctacctgccggaagaagagtcggacgcggctgccgttatcgcgctgattcaggccgagggacgaaaagccgtcgccattcccggcgatattcgggttgaatctttttgcgacaccctggttgaaaaagcggtagccgagctgggcgggctggatattctggtgaacaatgccggcagacagcagtattgcgaatccattgaacagctgagcaccgctgcgtttgatgccacctttaaaaccaacgtctatgcgccgttctggataaccaaagccgccctccgtcacctgtctgcgggggcggttatcatcaatacctcttccgtgcaggcgtttaaacccagcgagattctgctggattacgcccagaccaaagcctgcaacgtggcgtttactaaatccctggcgcagcagcttggcccgcgcggtattcgcgttaacgccgttgcccctggcccttactggacaccgttgcagtcgagcggcggccagccgcaggagaaggtgcaaaaatttggtgaggatacgccgcttggccgaccgggacagccggttgagattgcgccgctttacgtccttctggcttccggcgcctgctcctacgcttcgggtcaggtctggtgctcagatggcggtaccggcgtagcctaa

SEQ ID NO: 172176 - DNA, 297 bp, Klebsiella oxytoca
atggcgctacttgcgttggggatggcgactcttgcaattcgcctgtggcgggtatttgctgataatgatggtcacctttcttttacgctagcgctggcaggtgaaaagagagccgctaccgcggctcttttgctgaccaggcacgtatccggaggagttgcgcgctggcgctcaacctgggctaccgaactgcagacggcctggacccgcccgagtccctgtcgcccggctaagcgtaacgctagccgggaacaggccgcgccagctcttttaggctacgccggtaccgccatctga

SEQ ID NO: 172177 - DNA, 162 bp, Klebsiella oxytoca
atgggtttctggcgaattgtcttaacgattattctacccccgctgggagtattgctgggaaaagggtttggctgggcgtttattctcaatattattttgacgatcctcggctacattccagggctcattcacgctttttgggtacagaccaaaaacagctaa

SEQ ID NO: 172178 - DNA, 546 bp, Klebsiella oxytoca
atgaaaaagactcaattcattatcgcgtgttctttaattatggcttcaggctctgccctggcaatgggctttaccgctgagcaggggaaaaactttaccaatcttaatatggaaatcggtaagagttcttccggcctgtatgcggaaagtaactggattaaaaatactcaggacggaagtcagcttggcggcgtcggcgttggctacaatcttgcgctgggtccgctcacggcgaatattggcacaaaagccgtatatctcgggccgaagaaaggggacaacggcgtcgccttcccgattggcggcggcatcgatctggcgctgactgacagtatccatctgtacggcgaaggatattccgcgccggaagggttaactaacagcgttaaaaattacgtcgaagcgaatggcggaattagctggacgccgttgacgccgctgactatcaaggctggctatcgtcacgcgagcgttgatggaaaagatggccgcccgggacataccatcattgatggcgcttacgtaggcgctggcgtgactttctga

SEQ ID NO: 172179 - DNA, 441 bp, Klebsiella oxytoca
atgcttaaaatgtttaccgcgctggctattctggcgacgtcagcaaacgctatggcacaggacgatattacgctgaacagcctcgccaaaaaggagcccgccgcgtttaatcagatgctcaaaggacatcacctgcccggttgggtcagttcaggcggcacgaccacgcccgcgcgtacggtaaagcttggcgaggatgtttatcaggtgctcagcgtctgcaaacctcacgattgcgctgcggagaggctcgcggtgctgtggtcggaaaaatccagacaaatgtccggagttttttccaccgttgacgacaagacatcccaggaaaagctgacctggcttaacgttagcgatccattatccatcgatgggaaaacggtactctttgcagccctgagcggcagtctggaaaaccatccagaggctttcaactacccctga

SEQ ID NO: 172180 - DNA, 600 bp, Klebsiella oxytoca
ttgttcgaatctcacctgaatatttttatccgcgcggttttcgttgaaaatatggcgctcaattttttccttggcatgtgtacttttctcgctatttccaaaaagatcgatgtcgcatttcggctcgggatcaccgtgacggcgctgctagccattgcgacgccgattaacaacctgatttatcatcacctactgaaagaaaatgctctgattgaaggcgtggatctcagttttctcgatttcatcacgtttatcggcgtccttgcggcgctggtgcagatcctggagatggtgatcgacaaatatttccatgcgttaaaccatgctctagggccgtttctgccgctgttgaccatccactgcgccatttttggcgcgaccatatttatggtgcagcgtgaatacagcttccttgagtcgctgacttatggcaccggatgcggtattggctggacgctggcgattgtggcgctggctggcattcgcgaaaagctgaaatatgccaatatgccgaaagggttacgcggattaggcagcgtgttcattaccgccggactcatgtcgctgggctttatgtcgttcgccggtatttccctgtaa

SEQ ID NO: 172181 - DNA, 1521 bp, Klebsiella oxytoca
atgaactactcatcgtcacgccatcgtctgtggataatcctatttctcatggcattaatcagccttggcaccggtctttgctactggcagatgcaaaaaaaggtggataaggatatccagtcacggctgcagcaggcgatagccagccttgatgtgaccgtttcccacgccgaacaggccgccgacctggcggaaccttttatgggaaaaaactgcaatgagaacgtcctgacggagctgcgcacgctggtggcgaccattcccgacgtgcgctcggtaaatttagggcgggataacgagatctactgcacttcggtttttggcggacgcaaatttcagtttgatagtactcaatatacccaagggtcgttgcagttattccaggggaacgatattacgccgtctcatccgttaatggtgtatagcgaacaggacgaccgggggaataccacgctgataggtattgacggctattatttatacaatattttatccgttctggatggcgatgctcatctgtatcttcaggttggtaatcgggtaatgaaccgcaaaggggaagtcaccacgacgccgaagatcaaaattcccgtgcgtctgacctctgagcaatttaattattcggtcattgccgatcgcggctttgcctccggcgcagtcgcatttatccgctatgaacagcataccctcatcgccattcttctcgcttccttgctgctcgcctttttgttcagaaactatctccgctatcggcagacgattgagtaccagctgaggaaggcgatcgagctgaagcagctcaaaccgtatattcagccgataattaacgatgaggacggcgccattatcggcggcgaggtgctggtacgctgggaacatcccaaacagggatttattgcgccggataaatttatctccgttgcggaacagaccggtttgattaaagacgtgacggcgatttgctttgcggaagtaagccgacagctccgtcgccagcagtccctgctccctaaaggactctttatttgctttaacaccagctcggttaactttcaggatgacgaaatagtccaactctgccagacgtttatccaggagctgaaagaggcggaagttcggctcgtccttgagataaccgagcgggagtcgattgaaaatacgctgcaaacctcggaggtgacggataagctgcggcgcatcgggattcagttttcgttggatgatttcggtaccggttacgcaaactacagctacatccagcagtttaatcctgagattataaaaatcgataaggtgtttaccttcaatatcgtcaccaataatgcttccgcgctggtggtcaagaatatggtgaatctggcgaagaagtttaactgtcagattatcgccgaaggcgtggaggataaggagcagctgacaatgctcaggaatatgggcatcgctatttaccagggctactacttctcacaaccggtgccggttggcgagtttatcaaaatgctgccacgttcatttcgctag

SEQ ID NO: 172182 - DNA, 1338 bp, Klebsiella oxytoca
atgctggcaaatatgacgattcactcccgtaatagcatcctgaaaaaagtaaaagcatccgccgtagctatcgctgcagcgctgctgctgtcgcactgcggcagtaaaccgcccgtttctcttgtcacgccgctgccgcccgcaacaaagcagccgacgttacccaaaagccacgagccggtgcgcggcgtctggctgacaaccgtctcgcgcctcgactggccgccgctggaatccgtgaacggcggcattaccgccgatcgccgcatcgccctgcagcagcaggcgctgattgccaagctggataatttaaaaagcctcggtatcaataccgtttttttccaggtgaaacctgatggcaccgcgctctggccgtcgaagatcctgccgtggtccgatatgctgaccggtaaaatcggcgaggacccgggctacgatccgttaaagtttatgctggatgaagcccataagcgcggcatgcgcgttcatgcatggttcaacccctatcgcgtctcggtcaatactcgccccaaaaccgtcaccgagcttaacagtaccctttcgcagtttcccgccagcgtctatgtcctgcatccggagtggatccgtacctccggagaccgtttcgttctcgacccggggatcccggaagtgcgcgactggatcaccagcatcgtggcagaggtcgtagagcgctatccggtagacggcgtccagttcgatgattacttctataccgaaacgccggggtcgaagctgaacgacaatcggacgttccagcagtatggccagggctttgctgccaaagcggactggcggcggcacaatacccagctgctgattgagcaggtttcccgcactatcaagcagctgaaccccgccgtagaatttggcgtcagcccggcgggcgtctggcgcaatcgctctcacgatccgtccgggtccgatacccgcggcgcggcggcctacgatgagtcttacgcggatacccgcctgtgggttcagcagggatggctggactatatcgcgccgcaaatttactggcccttcgcccgcgacgccgcgcgctacgatgtgctggcaaagtggtgggctgaggtggtgaagcctacccacacccggctttatatcggcgtggcgctgtacaaagttggcgaaccgtcaaagagcgagcctgactggatgattagcggcggcgtgccggagctgaaaaagcagcttgatctgaatgaatccatgccgcaaattcagggcactattctgttcagagagaattaccttaatcagccgcagacccagcaggccgttaactacctcaaaggccgctggggaggttga

SEQ ID NO: 172183 - DNA, 453 bp, Klebsiella oxytoca
atgttgaaaaaatcgctcatcgccttttccctgttttgcgccctgtcgcccgctgtttttgcgggcaacagtgaaagcgaacagctgaataagaagaacgtcattgatttttataacaaagcgttaaatgacaaggactttgccgccgccaggccctatctcggagaccgctacatacagcataacccgatggcgaaagacggcgttgaaggctttcagcagtttatcgccttcctgaagagtaaatatcccgactcgcgcagcgttatcaagcaggcctttgtcgacggcgatcatgtgatcctccacgtggaggtaaccggtcgcgagccgggagtgacgcgggcgattatcgatatcttccgcgttgatgaacagcataaaatcgttgagcactgggacgtgacccagaacgttccgcagaaaaccgccagcggcaacggcatgttctga

SEQ ID NO: 172184 - DNA, 423 bp, Klebsiella oxytoca
atgttcaacgaaggaagatgggcaaagctcttttgtttcattggattatcatttctttcctgcgtagcgaaggccgcattgctgagtctggctacgcaggatcagcagattcaggcggcatgttcacgtgtagatgaaccggctcaggccaggctatgtcacgccctgctcgttagccagcaggcggagcagcgccaacgctatctgcattttttactgcagcagaatattttcagcattcagacctatgactttctgtggggtgaataccagcgtacgactgcatgttctgaaatcagccgcttttttctgtcgagggcgctggatgcggcgctaccggctccacccacgccggcacttcccccatcccccgggctaagcgaaccgccggccgtgtttgcgctacaagaatccctcaactga

SEQ ID NO: 172185 - DNA, 3108 bp, Klebsiella oxytoca
atgctggctcgcttttttgtgtttcgcccggtttttgccgccgtcatcgctatctgtattatggcgaccggcgctttcgccctgctgaccctgcccgtcgaacaatatccggatattgctcctcccggcgtcaacgtcaccgccaactaccccggcgcctcggctgaaaccgttgaagacagcgtgacccaggtgctggagcagcagattaaaggcatcgacggcctgctctatttttcctccagcagcagttcagcaggccaggcgcgtattagtctcagtttcgatcaacgcattgatcccgatatggcgcaggtgcaggtacaaaatgccgttaatcaggccattacgcgtttgcctcaagaggtgcagcagcaaggccttacggtaaccaagtcacagggtgacagcctgatggtggtggccctgtacgatcaaacgcgaacgctaaccagccttgatatcagcgactttctcgttagctccctgcaggagccgctgagccgggtggaaggcgtgggggaaacgaccgttttcggcgcccagtacgcaatgcgcatctggctcaatccgctgcagctgaacggctacggtttgatgccctccgacgtgcaggccgccgtcgaggcgcagaattctcaggtcaccagcggcgaaattggttcactgcctacgctggaggggcagtatctgaacgcgacggtcaccgcgcagtcccgccttgagcatcccgaacagtttgaaaacattattctgcgcaccaacagcgacggctcggtggtctatctgcgcgatgtcgcccgggtggagatcggcgcggaaaactatcaaaaccaaaccacgctcaacggtttcccctcagccggaatctcaattcagctggcctccggggccaacgcgctggagacggcggagaagatccggacagaagtcgaacgcctgacgccccgctttccgcagggcgttgtcgccgcttatccgcgcgacagcacgccgttcgtgacggtctctatcgaaagcgtagtgcgcacgctgattgaggcgattctttttgtggtggcggtcatgtatctctttctccagagctggcgggcaacgctgatcccgaccctcacggtgccggtcgtcctgctcggtaccttcggcatccttagcctgctgggctacagcatcaatacgctcaccctcttcgcgatggttctggcaatcggtctgctggttgatgacgctatcgtggtggtggagaacgttgaacgcctgatggtggaagaggatcttaccccgcttgaagccacgctgcgctcgatgaatgagataaccggcgcgctgattggcatcgcgctggtactctcggcggtttttatcccgatggcgtttttcggcggctcggtggggattatctaccggcagttcagcgtgaccatcgtttcggcgatggtgctttccgcgctggtcgcactgaccctgacgccgacgctgtgcgcccatctgctcaaacccggccatcttaaaaaagggccgttcttctccggtttcaaccgcggcgtcgccgccactcagaatcgttacctggcgattctccggcggatagcggtccgccccttccgctttgtattgctggccctggcgctgacgtttttgatgctctggcagtatcagaaactggctggcggctttctgccggaagaggatcagggcgcggtgatggttcagtttacgcttccctccggctcgccgatgtcgatgaccgaagaggtcggcgcggaaattagccgctatttcatgagcgaggaagagaataacctcaacgtcatctttatggttaccggcagaaataacgccggcagcgggcagaacgtcggcatggccttcgccgaactcaagcactgggatgcgcgtcccggagaacagaacagcgctcaggcgatcattgcccgggcgaaccagtactttgttaaaacctcccggctggccagcatcagcgtgatgtcgccacccactgtgcgcgggctcgggcagtcgagcggctttgaactctggctacaggatagcgcgcaaaacggcagcccgtcgctcatcgaggcgcaaaacaccctgctcgctgccgccagacaacagccagagctggatgcggtgcgcattaacagcctggaggagaaggcgcagctgcaggtcgatgttgacagacagaaagcgcaggcccaggggttagatcaggccgcgataaacagcactctctctgcggcctggggcggcgtgtacattaacgactttatcgatcgcgggcgcgtcaagcgcgtgtacatgcagggagacgcagcctggcgttcgacgccggaaaacttatccgcctggtttgtccgcggcgacagcaacaacatggcctccttcgacagcttctcatcctggcgctggaccaccgggccgcagatgcttcagcgttttaacggactgtcagccgtgcagttccagggcaatgcggcatcgggcgtcagctccggttcggcgatggcggaaatggccgaactggtgggcacgctgagtgggtttgatctgcaatggagcggtttgtcctggcaggagcaggcctcttcagtgcaaacgctatgggtatatctggcctcgctggcctttatgtttttgtgtctggccgccttgtatgaaagctggtcgattccggtcgccgtactgctgatcgtgccgttggggattctgggggccgtgagcgcgtcgctgctcgccggatatgaaaacgatatctacttccaggtcggtatgctgacgaccatggggctttccgccaaaaatgcgattctgatcgttgaatttgcgctggcgcagtttcagcaaggaaaaaccttatccgacgcggcgctggagggcgctcgtctgcgcttacgccccatcattatgacctcacttgcatttgttgtcggcgttatccctctggtactctctaccggtgccggcgcttccagccaacgagagattggcaccgcggtgatcggcggtatgctcaccgggacgctgctgaccttgctcttcgttccactctttttcctgctggtacagcaaggaatgatgcgccttaaagggcgcaaacggtaa

SEQ ID NO: 172186 - DNA, 618 bp, Klebsiella oxytoca
atgggaaatcaacgcgggcggccaatgaaagcccgcccacgcattttacaaaccgcccgcgagctgtttctcaggcacgggcttgatgtgtcgctggatacgattgccgccgaagcgggaacctcgcggccgacgctctacagtcatttccccggcggtaaagacgcgctgctgctggagacatttgcgtttctcaatgacaccatgcagccgcctctgcgccagcttttgcaggagcgtcagcaggattttcccgcgctgctgcgcgggtttgcgaaagtggtgcaagcgcacttttatgcgccggagaatattcactttcaacgcctgctgatccaggtgctggtgcaaaagcccgaactctacgtcacgctcgaacagcgcccctcagggcgcgttttgcaggcactgagcgagatactggcgcagaaaaaaaacgaaggtttgctgaccatcagcgatccggagctcgaagcaacggcgtttctcggcgcgattatgggctatccgctgccgggggccttaattgcgcaaaaagcggtggagccggagaagctggaacagctcgcggagtgcgcgattaccgtctttctcaaggcctggggctacgggccataa

SEQ ID NO: 172187 - DNA, 561 bp, Klebsiella oxytoca
atgaaaaacggcatcgcgacgccatcgcggctgatttccgctctcgacgcctgccggacgaagctgaaggcgtttattcgcgcccggatcccgcaacgggatgaggcggacgatatcctgcaggaagtgacttatcagctgatccgcgtcgagcaaccggtggagaatattgccgcctggctgttccgggccgcgcgaaacgagatgaccgacagggcgagaaaaaagcgtgagctgccgctggcaggcgatttcagcgaggaagaagagggtgcctttccggaggatgagctggccgagacgctatttggcgttgcgcaaacgccggaggaggcgtatctgaaaacgctgctctgggaggcggtaaaccaggcgctcgcggaactgccgcccgcccagcgcgaagcattcgagaaaaccgaactgcagggctacagctatcgggagctggccgaagagaccggcgcaagcgagcaggcgctgctgtcgcgtaagcataaagcggtactttacctgcgaacccgcctgcgcgcgctgtatgacgatctgctcgccgattag

SEQ ID NO: 172188 - DNA, 426 bp, Klebsiella oxytoca
atgagagatttcgacaggcgcgagcagcgccatcagcaccgttttggtgaccacagaatggcaaaaccgcttctcatcggcgcggcgttaatcatcgttctcgggctgctggtcatgtcgctatggaatgcgctactgcccgctatccttggggtaaagagcatcggcttctggcaggcgttaggtcttctggcgctgtcgcggatcctgtttggcggtctcggttttcgcccgggaatgttcggtatgggacacgcgcggcgtcgaatgcatgaacgctggatgaagatgagtcccgagcagcgcgatgagtttgtacagcgctttggtcatcgcgggcatcgtggccactgcggctggcgcgatcgtcgtagcgaaaatgcgccgcagcaggagcctgcggtgaaaaatacggatcccgagtga

SEQ ID NO: 172189 - DNA, 540 bp, Klebsiella oxytoca
gtgctgaccggtacgccttattttgaaaaagggaccaccgcagccgacattcttccgccggcaggcggcaaagcgccgagcggcggcgatccgaaaattccgtatattttctatatttatctttcagctgccgacagcaacccgcagctcaatcccgccgactatttccaggacaaagcgctaccgctgctgaaagaggcgaaccatttatgcattacgccgctcaacgatgaggtgatgaaggccggtctcaatgcggcgaatgccctcaagccgggagtggattcgctgttaaacgccagcgtagaaaccatgctctacccgacgctaaaaatcgatcatccggtatttatcggtataggcagcgtcgatatcaacgtcccgacggcgatgcaaaaacgctttgcggatgcggttaaaagcgcgggaacccgggcggacgtgcatatttatgaggggctggatcatagcggaacggttaacccgtcattgcgcgactcggtgccgtttttgattaagacgctcaacgataagcggtaa

SEQ ID NO: 172190 - DNA, 429 bp, Klebsiella oxytoca
atgacttattccctctcaaaaaaattccttaccgccacctctgcgctgctattgctttccatgagcgctgttccggctagcgccgctaccgacagcaccgatgccgtctctccgctcagcgcggagaacgggttaagcgaagcggctaagcaatattttctgcgttatccttcccacagcggcgtgaacggtaaaaccgcgcgcgaagataccgcggcggtctttattccctttggcgccacgccggaagggggatggccggtggtggtctgggctcacggtaccgttggcgtggcgaatcactgcgcgccgtcgttaaacccgcgcagcgatcgcgataagcagtatctgaacacctggctgtcgctgggctatgcggtggtcgcgccggattatgccggtctgggctcgtccgggctgcaccactag

SEQ ID NO: 172191 - DNA, 1035 bp, Klebsiella oxytoca
atgtcagcgaaaaaagtcaccatgaaggatatagccagagacgccagagtcggtatcgcgacggtggacagagtgttgaataaacgaactcccgtgaaagagagcaccgaacgtaaagtgcttgagtccgccaggcgcttaggctttgcgctcgaacaatcgcagtatcggctggcagccggtcagtcggcgatcccgctgagaatggggttcatcctgctgcaggagtcgcactcgttttaccatcagctggcgcaggcgcttgagcaggcggcattgccctggcatagtccggcacaggcgccggtgtttctgcattatgacattaacgccattgacgacatggttgccgcaatcgcccgcctcagcgaagaggttgacgcaatcggtattgtggcgctggataatccgcttatccgccatgccgttgctcaggccgttgataaaggcgtgcgcgtctttaccctgctctccgatatgagcatcccgcaacgcaccggctacattgggctggataatcagaaagcgggccgcaccgccggttgggcggtggacaggctgtgtcatggaagcggcgaaatcggcattatcgtcggcgataaccgatttatttgtcaggaaagctgcgagataagtttccgttcctacctgcgcgaacatggcaaaggcgaccgggtgctggagcctgtacgcagccacgaacgcgccgatatcgcccgccgggtgacggaggagatgctgcagcgttatcccgatctggaggccatctacgcgccctgcggcggcgtggaagggattatcgccgcgctgcatgcgcatcagcgtcagcatcaggtcacgctgatttgtcatggcccggtagaccacggcgagctggcgctaatcgacgggacaatcgatctcatgctggctcatcggcttgccgaattcgcctcagcgaccgtcgacgcctttgtccagtgcgctcaccagccgcaggcgacgtttattaacgccctgcagccttttgatttactcaccaaagaaaacctctga

SEQ ID NO: 172192 - DNA, 924 bp, Klebsiella oxytoca
atgaccatacatattgccaacgcgccgtgcagctggggcgtcgatgatcccaaaaatccttacctgccgccgtggaccaaggtgctggaagaggcggcgacggccggttataaaagtattgaactggggccgtggagctatctgccgacccgagccgatgaactcagcgccgcgctgaataaacaggggctgtcgctggtggccggaacgatctttgacgatctggtcagcgaagagaactttgcgaacattgtcgcactgacgcataacatttgccgcaacctgtcgcaggttccatcggcggaaaagacgccgggcaacctcttccagccgccttatctggtgattattgattttggcaatccgctgcgggcgaaatacgccggacacagcgaactggcgccccgcctctctcccgccgactggcagcggatgatcggccatattattaccatcagccaactggcgtggcaggagtacggcgttcgtccggttatccatcctcacgccggcggctgcatcgagtttgccgacgaaatcgacctgctcgcggcgcaaatcccccatgatgttgccggattgtgtctcgacaccggccatctcttctattcgggtatggaccccatcagctggctggatcgccattttgaacgccttgactacctgcactttaaagatgtcgatccgcaggtattcaggagcgtaatttcccgcggtatcgacttcttctctgcctgcgcggagggcgtgatgtgtccgctcggcagcggcgccattgattatccggcggtgcgcgcctttctcgacaaacgcggctatcaaggctggatcaccattgagcaagagcgcgacccgcgcaacgtcgagggcagccttaaggcggtcacggaaagcctgcgctacctgcattcggttggtttttaa

SEQ ID NO: 172193 - DNA, 1173 bp, Klebsiella oxytoca
atgattaacggtattaaacctgttggccggtcgttacgctggggtatggtgggcggcggcggaagcagccagattggttatattcaccgctccgcggcgctgcgcgacggcacgtttaccctgctggcaggggccttcgatattgacgctcagcgcgggcgtgagtttggccagcagctgggcgtggaggccgggcgctgttaccccgactacgaaacgctgtttcgcgaagaggccgcgcgggaggacggtattgaagccgtttccatcgctacgccgaacaatacccactacgccatttgccgcgcagcgctggaggccggattgcatgtggtctgcgaaaaaccgctctgttttaccggcgaagaggccgatgcgctggtggccctgagcgaaaaacagcgcaaaatcgtcggcgtgacttacggctacgccggtcatcagctgattctgcaggcgcggcagatgattgagcaggggctgctgggcgagatccgcattatcaatatgcagttcgcccacggttttcataaccagcctgtggagcaggaaaaccccagtacccgctggcgagtggacccgaagtttgttggccccagctacgttctgggcgatctcgccactcacccgctgtttctggcggagaccatggcgccgaagctcaatatcactcgcctgatgtgctcccgccagagctttgtcaaaagccgcgcgccgctggaggataacgcgcatgtgctgatggagtacgacaacggcgccgtgggttcgatgtggtgctcggcggtcaacagcggctcaatgcacgggcagaaagtccgtatcgtcggagaaaaagccagccttgagtggtgggatgaacagccgaatcagctgcgctatgagattcagggcgagccggtgcgcattctcgaacgcggtatgccctatctggacccgctggctctgcacgatgaccggatcggcggtggccatcccgaagggctgtttgaggcctggtcgaatttgtaccgccgcttcgccatcgccatggatgctaccgatcgttgcgacactgctttgctggaaaacttctggtacccggatgccaaagccggtgcgctcggcgtgcattgggttgagaactgcgtacgttcagcagacagtggcgcccgctgggtcgatttccattaa

SEQ ID NO: 172194 - DNA, 696 bp, Klebsiella oxytoca
gtgattcttcccgcatttactcagggtatttatggtcgtctgcgcctgcaggccggtgctgactggcagcgctacgtcgcccatcccttcctgcgccagcttgccgatggcacccttcccgaacccgcttttcgtcgctatctgacgcaggactacctgttcctgatccactttgcccgcagctacgcgctgctggtgagcaagctgcgtaccctcgcggaaatgcgcgttgccgccgcgtccatgaacgccattctcgacgaactgccgctgcacgtcggctactgtacgggatgggggctggatgaagcgacgatggcggctgaagaggaagccgctgaaacggtaaattatacccgctacgtactggacattggccacgccggcgatgcgctggatctactggcggcgctgatgccctgcgtggccggctatgcggaaatcggcctcggtctgctgcacgacccggcgacccggctgactgccaacccgtatgcctcgtggatccgcaactacggtgatgagggctaccttaacggcgtcaatgcagccttaaacctgctggaaaccctctggcagcagcgcggcggcgaagcgcgttttgccgaactcagcgccattttcacgaccgctacgcgcctggaggctaacttctggcaaatgggccttaacgtcctcgcggagcgccaggcgtga

SEQ ID NO: 172195 - DNA, 726 bp, Klebsiella oxytoca
atggctcccggcatcgaagtacgcggactgagcctgcgctttggtttgcgaccgatcttcgacaatttgacgttttctattcccggcggccagtggagctcgctgctgggggccagcggcgccggtaaaaccagcctcctgcgcatcatctccgggctggcgaaagcctctgggggcgaagttcgcgccagcgatggcctgccgattgccggacgcctggcgtggatggggcaaaaagatctgctttacccgtggctaagcgtgcgcgacaacgtctcgctgggggcgcgcctgcgcggggagcgcatcgatcacctgcgcgtcaccacgctgctacagcaggttgggcttgaacactgcgccgatgaccgcccggccgctctctccggcggcatgcgtcagcgtgcggcgctggcgcgtacgctctacgaagaccggcccatcgtgctgatggacgagcccttttccgcgctcgacacgattacccgcacgcgtattcagtccctggccgcccggctgttggtgaaccggaccgttgtactgatcacccacgatccgatggaagcctgccgtctgagccaccgtctgctcgtcctttccccggcccccggcgggattgacgacacgcatcgcttgtccggcataccgccgcgcgcgccggacgatccggcgctattagccggtcaggcggagttgctgcaacagctgataagggctaacgaatga

SEQ ID NO: 172196 - DNA, 741 bp, Klebsiella oxytoca
atgagcgcaaaactgtttcgcgccgccgtggtgttctgcggcctgctcctgatttggtggctggtgacccgcagcggcattcccgcctttctgctgccttcgccttcggcggtggcaagcgccctgtgggttaaccgcgcctacctcggtgggcacacgctgatcacattaagcgagatcctcagcggtctcgcgctcggcgttctgctcggcatgatactggcgctgtgcatgattgtttcgccgcgccttcagcgttggctgatgccgttggtgctgaccagccaggcgatcccggtctttgcccttgccccgctgctggtgctgtggttcggcttcgggatgagcgccaaggttatgatggcggtgctggtgatcttctttcccgtcacctcggcgttttttgacggcctgcgccgggttaaccaggactatcttgacctcgcgcgcaccatgggcgcctcttttggcgcacagctgcgccacgtccgcatgatggctgcccttccggccctcggttccggtctgcggatggcggccgccgtcgcgcccatcggggcgattatcggcgaatgggtcggttcagccgaaggactgggctacgtcatgcttaacgccaatgcccgtctgcaaaccgatatctgctttgcagccctgtttattctggtgctactgaccgtcctgctgtggctggcggtggatgcttttttacaccggctgattaactggacgccggaatga

SEQ ID NO: 172197 - DNA, 936 bp, Klebsiella oxytoca
atgcgtaaacgtatttatgccggtatcacgcttgccgcgctgttcagcggtcaggcgctggccaacgaaaaactcaccctggtgctggactggtatatcaatcccgaccacgcgccgatcgtggtggctgaacagattggcgcctttaaagaggcggggctggacgttaaaattgtgccaccgtccgacccggcgctgccgccgcgattagtcgccgcccgccaggcggacctggcgattacctaccagccgcaggtgcatttttttgccgatgaaggtctgccgctggtccgcgtcggcacgctgattaattcgccgctgaacacggtgatcgcgctggataaaagcatcaaatctcccgccgatctgcagggcaaaaaagtggggtattcggtaagcggaatcgaacaggcgacgctggccactatggcacagcacgcgaaaatcgatcccaaaagcatcaagctcatcaatgttaactttcagctgaccagcgccctgctggccggacaggtcgatgcggtgattggcggctatcgtaatatcgaagcgctggaactgcagcttcaggggaaagatccgcaggtgatgaacgtcgaggattacggcgtcccggcctacgatgagctggtgattgtcgccaaccgggacgacgtcaacgcgccgaaaatcaggacgttcctgaaagcgctgcaaaaaggcgttgcttaccttcgcgctcatccgcaggaaacctggcaggcgtttgccgccgcgcatcctgaacttaacacggagctgaacaagcaggcctggctgaaaactcttcctctgtttgccagcgatccggcagcgctggataaacctcgttatgaagcttatgaacagtttttatataacaacaagttggtgaaaaaagtcacacctttaacgaattatgcggttgaactgcactaa

SEQ ID NO: 172198 - DNA, 1383 bp, Klebsiella oxytoca
atgacggataaagtccgtattgatactttaggcgcagatttattagatgcaaacaacgatacctttttggcccgtcaggctgaattcgaatcgaatgtcaggagctacccgcgcaagctgccccttgcgattactaaagcggaaggcgtctggctgaccgatgcggataacaaacagtatctcgactgccttgccggcgcaggtactctggctctcggtcacaaccaccctgatgtgctgcagagcatccaaagtgtcattaccagcggcttgccgttacatactctcgatctcaccactccgttaaaagatcgcttctctgaatacctgctttccctgctgccgggcgaaggtaaagaatactgcctgcagttcaccggtccctccggcgctgacgccgtagaagcggcgctgaagctggcgaaaaaatacaccggccgtacttccgtgatcagcttctccggcggctaccacgggatgacccacggcgcgctgtccgtcaccggtaacctgtcgcccaaagcggcggttaacggcatgatgccggaagtgcagtttatgccttacccgcaccagtaccgctgcccgctgggtatcggcggtgaagccggcgtaaaagcgctgacctattacttcgaaaacctgatcaacgacgtcgaaagcggcgtgcgtaaaccggcggcggtgatccttgaagccgttcagggtgaaggcggcgtgaacccggctccggtcgagtggctgcagcgcatccgtaaagtgactcaggaacacggcattctgctgatcgtcgatgaagttcaggctggctttgcgcgtaccggtaaattcttcgccttcgaacacgcgggcatcgagccggacattatcgtgatgtcgaaagccgtcggcggcggtctgccgctggccgttctcggtatcaaaaagcagttcgacgcctgggaaccgggtcaccacaccggcaccttccgcggcaaccagctggcgatggcgaccggcctgacaaccctgcgccacctgaaagacaataacattgcggataaaaccgccgctcagggcgaatggctgaagggcaagctggccgagatgcagaaacgctatccggtgattggccacgttcgcggtctgggcctgatgatcggtattgagatcgttaaaccgaacgaagcgccggatcacatgggctgctacccggcggacggcgaactctccgccctgctgcagaagaaatgcttcgaagcgggcgtgatcctcgagcgcggcggtcgccacggctgcgtgctgcgtctgctgccgtccctgctgatcagcaacgctgagctggaaattttcttcgacaaatttgaacaggccctgctggccgccggcgtaaaaccggtctga

SEQ ID NO: 172199 - DNA, 1473 bp, Klebsiella oxytoca
atgtccaagttgaatccgattcttgctggttccgcacagagtattgatgcctatcagcaagcgatcgcccagaccagccaggctgtcgcgcagtggttgcagcagcctgaaatgtatcaggggaaaagcgttgacgaactgcgtgagcgcatcacccttgatttcaacgaacagggtctgggcaaccaggcggcgattgaacgtgcgatcgagtacttcctgaaagacagcctgtcggtacatcacccgcagtgcgtggcgcatctacactgcccgagcctggtgattagccaggcggcggaagtgctgattaacgccaccaaccagagcatggactcctgggatcaaagcccgtcagccaccatcattgagatcaagcttattgaatggctgcgtgcgcaggtcggctacggcgctggcgatgcgggcgtgttcaccagcggcggtacccagagcaacatgatgggcctgatgctggcgcgcgatgccttctttgcccgccagggccactccatccagcaggatggtctgccgggcgatgttcgtcgctacaaagtactgtgttctgaaaacgcccacttctcggtgcagaagaacatggcgctgatgggcctcggctaccgttccgtgacgctggtgaaaaccgaccaattcgcgcggatggacgtggcggacctgaaagcgaaaatcgccgaggctcaggctaacggcgagcagattatggcgattgtcgctaccgctggtactaccgacgcgggggccattgacccgctgcgagaaatcgcggctgtcgcggcagagcatcagatctggctgcacgttgacgcagcctggggcggcgcgctgctgatgtctgagaagtatcgcgatcgtctggacggcattgacttagtggattccatcactctggatttccataagcagttcttccagaccatcagctgcggcgcgtttctgttaaaagaagcccgtcactacgagctgatgcgctatcaggcggcctatctgaactctgagttcgatgaagagcatggcgtaccgaacctggtgtccaaatcgctgcagaccacccgccgcttcgacgcgctgaagctgtggatgggtcttgaggcgctgggccagaagcagtacgcggaaatcatcgatcacggcgtgacgatggcgctgaacgtagcggattatgtcgaaacgcagccgacgctggaactggtgatgcagccgcagctggcgagcgtgctgttccgttcccgtccgcagcagatggcgggcagcgacgacgccgccatcgccctgctcaaccagcgggtaggcgatgcgctgctggcctccggccgcgctaacgtcggggtgaccgagcacaacggcgttacctgcctgaagctgaccttgctgaacccgatcgttacgttagatgacgtgaaggtgctgctgagcctggtcgatcgcaccgcccaggagctgctggcgcagtaa

SEQ ID NO: 172200 - DNA, 783 bp, Klebsiella oxytoca
atgagtagtcaatcagcagtactggtgaccggggcatcgacaggtattggcgcagtctatgccgaacgttttgctcgccgcggtcatgacctggtgcttgttgcgcgtcatcttgagcggctgacggcgctggccgagcggctgcgcggtgaaaccggcgttcaggtcgacatcctgcaggccgacttagcccaggatagcgacattaccgccgtcgagcagcgactgcgggaagacgcacaaattgggattctgattaacaatgccggcacgtcgatacccggcgattttcttaaccagagcagcgccgatatcactcggctgattaccctcaacgttactgccgtgacccgcctggcaaacgctatcgcaccgcgtctgacccgggccggagcaggggccatcgtcaatattgcatcggtggttgggctgggcccggaaatgggcctgaccgtatacggcgcgacaaaagcgtttgtgctgtttctttcgcaggggctcgacgttgagctaagcgcgaagggcgtatacgtgcaggcggtcctgcctgcggccacccgtaccgaaatctggcagcatagcggtaaagatgtcaacgccattcccggcgttatggaggtgaagaaactggtggatgccgccctggtcggttttgaccgccgcgaattggtcaccataccgccgctgcaggacgaaacgaagtggcaaatgcttaacgcgatgcgtcaggctatgctgcccgctttcgtgcaatctgagccagcggcacgttatctcgcctga

SEQ ID NO: 172201 - DNA, 549 bp, Klebsiella oxytoca
atgagagtgagcagaaaacaggttgaagagaataagcagacaatcctgaccgccgccggccggttgtttcgtgagcgcggttttgacgcggtcacggtcaccgatattatgaaatcagccggtctgacccacggcggattttacggttactttaaatcgaaggatgacctgatcgcacaaacccttgctgaactgaagatagagagcgaagcggcggataacgacgtcgaatcgcttatcgcacgttatctctcacccgagcaccgggataattttgccagcggttgcccgctggcagcgctggcggcggagaccatccgccagtctgaatccgcacgcgatgaaatgaccgcgcgactgcagcagcagataacttatctcagcgaagcgattaatgagaaaaaaccggaaaagagccgtcgtgcggcgattggcaactggtctgccatggtcggggcgttgattctggcgcgaatgaccgctgattcggcgttttcagatgaaatcctgcgtgaaacggcggcctggcttgaggaaaaccagcgctaa

SEQ ID NO: 172202 - DNA, 744 bp, Klebsiella oxytoca
atgtcgttaagccgaaatacgcttcttattgtgcagaccggcaccccgccggatgaaatcgcctccgaccacggcgatcttccctcctggtttgctcatttactggcgccgtggcgcaataaaatcagcgtggcgcgagtgtttgccggggagacgcttcctgccccggataacgcgaccgtcgcggtgattaccggctcatgggatatggtgaccgaacgcctgccgtggagcgaaatgaccgcggcctggatccgcgaggcaatggcaatagagatgccgctgtttggcgtctgctacgggcatcagctgatggcgcatgcgctgggcggcgaggtggattaccatcctgccgggcgcgaggccggaagcaaaactatttcgctgtcagaaagcgggcggggggatcgtcttctggccgatcatccggcgccgttcagcgcgcatcttacccatatgcaaacggtcacccgattaccgccgggggcgacggtgctggcctcgtcgcagcacgatccgcaccagattgtgcgctacggcgcccatgccgtctccacccagttccacccggaaatcacgccggcgattgcccgctcgctgatcgcgtaccgtcaggcggcactgcgcaacgagggtattgacccggataagctgagccttgaggttgaggaaagcccggtggcctcggcgattttgacccgctttgttgccggctatctgccgccggatcgggaaacggcgtaa

SEQ ID NO: 172203 - DNA, 1920 bp, Klebsiella oxytoca
atgtcccttatgagagatgaaattcgcgaccatccagcggaagagatgctatttatccgccgtgccgtcattgcgtttctactggtggtggtctgctttgctgtcctgattgttaacctctaccgcctgcaggtagagcagcacgacttttatcagacccgttcaaaccagaacgacattaaaatgctgcccatcgcgccgagccgcgggctgattttcgaccgcaacggcatcccgctggtacaaaatattaccctctaccgtttgcaggtgatcccgagcaaaatcgccgatatgacggcgctgctgcagcagctgacgccgattgttgatttaaccccgcaggatatcgccgacttccgcgacgatatgcaccacaccagccgctacaaagaggtgaccttaaaatcggacctgagcgatgttgaggtggcgcgttttgccgtcaatgagttccattttcccggcgttaccgtagagagctaccagcagcgcgcttatccctacggcgccgagctggcgcacgtagttggctatgtctcgaagatcaacgacagcgatttgcaaaagctggccaaagccggcgaagaagagaactacgccgccgaccataatatcggtaagcagggcatcgaaggctactatgagaaagcgctgcacggcaccaccggttatcaggaagttgaggtggataaccacgggcgggtggtgcgtctgctaaaagaggtgccgccggtggccgggaagaacatctacctgacgctggatttgcatctgcagcagtatatcgagtcggtgctgaaggggcagcgcgcggcggtggtcgccgtcgatccgcgcgacggcggcgtgctggcgatggtttccagccccagctatgacccgaatccctttgtcagaggcattggctaccaggcctatcgttcgctgctcgaaaaccccgaccgtccgctgattaaccgtgccacccaggggctctatccgcccgcgtcgacggtgaagccctacatggcgctgtcggcgctctcggcgggcgtaatcacgccaaccacctccttcttcggcgcgccgacgtggacgctgccgggaacccagcgccgctaccgcgactggctgaagagcggccacggcatacttaacgtcaccaaagcgatcgaagagtcggcggatacgtttttctatcaggtggcgtttgagatggggatcgaccgtattcacgagtggctgagcaagttcggttacggtcagtctaccggtatcgatcttaacgaagagtatgccggggtgctaccgagccgggagtggaaacagcgggtgcataaaaaaccgtggtatcagggggataccatttccgtgggcatcggccagggctactggattgccacgccgatccagatggtcaaagcgctgacgaccctgataaataacggcaaagtgcaaaatccgcatctgctttactccatgaagcaggggaatagggtcgagcgctatcagccaccgcagaatctgccgcagattggcgatccgcattcgccatactgggacgtggtacgcaacggtatgtacggcatggcgaacctgccaaacggcaccgggtataagctgttccataccgcgccgtaccagatcgcggcaaaatcggggacgtcccaggtcttcagcctgaaggagaatcagacctacaacgcgaagatgatcccggtgcgcctgcgcgaccatatcttctacaccctgtttgcgccgtatcagcatccgaaggtggcgatggcgctgattctggagaacggcggcggcgatggcgtagtggcaggaccgacggcacgcgccatcctcgaccatatctttgacccggccaacgcgccggctgaacagggtgctgcggctgcggtgccgcaggtggagagcgcggacgcgcagtag

SEQ ID NO: 172204 - DNA, 603 bp, Klebsiella oxytoca
atgaccaaaaaagtcaatataacgaccggggcgggtgctgatgccgccagcatcaatgaagccgttgcggcgcgcattaagcgctatcgggcggaaaagaagatctccctcgacgagctatcaaggcgcgcgggcgtcagcaaagggatgctggtagacattgaagcctgccgggctaacccgagcattgcgctgttatgccgtctggcgtcagccatgggcgttgcggtggccgatttcgtcaatgttgcctccgcgccgccggtaaaggcgatcgccgcaggcgatatccccacgctgtggcagggtgaacagggcggccacgcgcgactgctggccggaaccagcggtccagatatggtggaactctggcagtggagtctttatccgggcgaaatttttacttctccgggccacggagaagggaccacggagctgctttttgtgaccgagggcgccctgacattaacggtgaacgacagcctctatttgattcccgccggtgattcagccgtcgcacgtaccgacgctccgcatagctacgctaacgccggcgaaacggtgacgcgattcaccatgacggtcagtgaaaaagcgcgctag

SEQ ID NO: 172205 - DNA, 714 bp, Klebsiella oxytoca
gtgaataacgtattaccgtcaatcagcccacaggtgtcggcgctggctcccggctttcgcgccctgagcattgatgttatctctgctcccgtacgcgcgccgcaggttggcgctgaagcgctccgctccgcctgccgtgcggttatcgccggtgagccgcagtgggcggaagcacatttgcaggcctggaacgaggtattccgcgcctttggcgcaaagcctaagcgcacgccctgctcggcggaagccttgcgcaggcgggtgctgcgcgatggcgaaatggcagcgctcgatccgatcgtcgatctctataatgcggtgagcctgcgctacgccgtgccggtcggtggggaaaacctggcggcttacgttggcgtcccgcaactgaagatcgccgacggcagcgagccgttcgataccgtcaaagagggaaagatcgtcttcgaaaaccccgacgcgggtgaagtggtctggtgcgatgacgcaggggtgacctgccgacgctggaactggcgacagggagtacgcactcgcctgagcgtagagagtccgcggatgtggtttgttcttgaaagtctgccggaaatgccgcttagtgcgcttcatgaggcgggagaaatgctgatggccggtctactgtcgatgatgcccgaagcgaaaatgcattcgcagttgataacggccgacgtctggctgacagggggcgcccggtag

SEQ ID NO: 172206 - DNA, 465 bp, Klebsiella oxytoca
atgagtagcataatgattttgttggcgctggtcggcggcgcgatgctgagtatgcaggcggcgatcaacggccgtttaggcagtcaggttggcgtgtttcgtagcgcatttctcaccttcgccgtgggaggattgatcaccgcgctgctgattttgtatttcgagcctcaccagacgatgacgctgctcgatgtgccgaaatggcagctgctgggggcgttttgcggtgtaccctatatcgtgattatggtgctggcggttcagcgtatcggcaccgcgacggccacggtagcggtgatttttggccaactggccatgagcctgctgattgataatttcggctggctgggaaatgacgccatcgctttctccccgggcaggctgggggcgatcgtctgtctggggctggcgttgttctttatttatcgctccagttcagtggccgcagcggaagataagcagtag

SEQ ID NO: 172207 - DNA, 438 bp, Klebsiella oxytoca
atgatgcagttattactgatttttctggtgattgccggcggcatgggtctgtccgtcgaagccgggctactgggaccgctggccggtcaggtaggggatttatgggcgacgttcagtatatttggcgtcgggagcgccctcacgtttttgctgatgctgctgtttggcccgcgccagagcccctcatttttctctttacccggctggcagctcaccggaggcgtgctgggacccatttacgtcgtcattttaaccgttgccgtaccggtgatcggtatcgctatgacgatgatcggcattcttgccggccaggtctgtaaaagcctgctgatcgaccattacggtctgttcggttcgccaaaacgtaaaatcgatgggcggcggcttattgctctgctgttaatcgttgtcgccctggttctgattgccacaagctga

SEQ ID NO: 172208 - DNA, 933 bp, Klebsiella oxytoca
atgagcgatgcgggtaatgtgaattttcgggcgctacagctgttcatcgccgtgtacgacagccagagcttttccgtggtggcgcgacgggaaggcgtttccccgtccatggtgtcgcgcgtcattcatcagcttgaagactccctcggccaacagctgttttatcgtaatacccgcgcagtggtgcccaccgaagccggacgcctttttgccgaacatgccagaggcatcagcgaacagttcagcgccgccagacgcgacctgcaggatcggagccttgagcctggggggctggtgcgaatcaacgccccggtctactttggccagcgccatattgcgccatggctaccgggtctgagcgaacgttatccacaaatgcaaattgagctggcgctgaccgatgattttatcgatccgcaccgggaggcgaccgatgttattttccgcatcggtagcctgcccgattccagcgttcatgccagagtgctggggatgcagcatcactatctggttgccgccccgcgctatctgcagcgtcgcggtgttccgcagcggccggaagatcttcgccagcacagtacgctggtgtacagcggttcaaacgggcctaaccgctggttatttcgcctcgcggaaggcgaatgggttcactatccgcaaaccccgcagctggcatccaataacgccgatgcgttgctgaccgccgcgctgggcggcatgggtgtagtgctttttcccgactggatggtcaacgaagccattggcgcgggaagactgattcatttgatgcctcattacaccgccgcgattagcagcacgccttcgccagtgtcggcgatttatcctcacgctcgccacccttcgctaaacgtacggacggtaattgactattttgtcgacgtttttggtacgcctttatactggcagcgctaa

SEQ ID NO: 172209 - DNA, 2190 bp, Klebsiella oxytoca
atgagcacgtcaaacgatccatcgaacaccccatccgcagggaaatgcccttttcacgccgaaacgccaacgccaacgccaacgcagagcgcgggcggtggtaccggcaaccgcgactggtggcctaatcagctacgcgtcgatttgctgaaccagcactccaatcgctctaacccgctgggggagaactttaactatcgggaagagtttaaaaagctcgactattcagcgctgaaagccgacctgcatgccctgctcaatgactcgcaggagtggtggccagcggactggggcagctatatcgggctgtttattcgtatggcatggcacggcgccggtacctaccgcaccgttgacggtcgcggcggcgccggacgcggtcagcagcgtttcgctccgctcaactcctggccggataacgtcagcctcgataaggcccgtcgcctgctgtggccgataaaacagaaatacggtcagaaaatctcctgggccgacctctatatgctggcgggcaacgtggcgctggaaaattccggcttccgtacttttggcttcggggccggccgcgaagacgtttgggaaccggatctggatgttgactggggtaatgaaaccgaatggctggctcaccgccatccggaaagcctgaatcagcaggccattggcgccactgaaatgggtctgatttacgttaacccggaaggccccaacgccagcggcgacccgctctccgcagccgcagcgattcgcgctaccttcggtaatatggcgatgaatgatgaagagatcgtcgcgctgatcgccggtggccatacgctgggtaaaacgcacggtgctgcggtgaccacccacgtaggcgcagagccggaagcggcgccgattgaagcgcagggtctcggttgggcgaacagctacaacagcggcgcaggcgcggatgccatcacctctggtcttgaggttgtctggacgcaaacgccgactcagtggagcaactacttcttagaaaacctgtacaaatatgaatgggtacaaacccgtagcccggcaggcgcgattcagttcgaagcgaaagacggccctgaaattatccctgatccttttaatccagagataaaacgtaagccgaccatgctggtgactgacctgacgctgcgctttgacccggaattcgataaaatttgccgtcgcttccttaacgatccgcaggcctttaacgaggctttcgcccgcgcgtggtttaaactgatccatcgcgatatggggccgaaatcccgctatatgggtccggaagtaccgaaagaagatttgatctggcaagacccgttaccggcagcgatccacaacccgggcgcagaagacatcgccgcgctgaaaaccgctattgccgatgctggtctgtcggtcagcgagctggtttccgtggcctgggcgtcggcttccaccttccgcggtggcgataaacgcggcggcgccaacggcgcacgtctggcgctggaaccgcagaatgcctggccggtgaacgctatcgcaacccgcgtgctgccgaccctgcaggcgattcagcaggcgtccggtaaagcttcgctggccgatatcatcgttctggctggcgtagtgggcattgagcaggctgccgctgcggcgggcgttcaggttagcgtcccctttgctcctggccgcgtcgatgcgcgccaggatcagaccgatgtcgaagcgatggatctgctgcagccgctggccgatggtttccgcaactatcgccgcattggcggcggcatttccaccgaaacgctgctgattgataaggcgcagcagttaacgctgacggcgccggaaatgacggtactggtgggtggcctgcgcgtgctgggcgctaacttcgacggcagccgtcacggcgtgtttaccgaccgcgtgggcgtattgagcaatgatttcttcgtcaatctgctcgatatgggcaccgtctggaaagccgctgatgagcacgctgagctgtttatcggtcgcgaccgtaagagcggcgaagagaaatacaccgcgacccgcgttgacctggtctttggatctaactccgtcctgcgtgcgctggcagaagtgtatgcctgcagcgatgcgcggcaaaagttcgttagtgactttgtcgccgcatggaccaaagtgatgaacctcgaccgcttcgatctgtaa

SEQ ID NO: 172210 - DNA, 2733 bp, Klebsiella oxytoca
atgactgacatgaaaatagaaaaccggaaaataaaccggtctgcgtcagaaaatgataagcagcataaaaaaagcttcgccattgaaaccgaggcatttaacagtccggatcatacgctggcgcggttaaacagcagtcgccacgggctcaccaccgaagatgcccttgaacgactggatgaatacggccgcaatgaagtggcgcatgagcaggcgccgccggcgttgatccagcttttgcaggcattcaataacccgtttatctatgtcctgatggcgctggccgccgtcagcttcgtgaccgattactggctaccgctgcgtaacggcgaagagaccgatctgaccgggatcatcattatcgtcacgatggttagcctgagcgggttattgcgtttctggcaggagtttcgcaccaataaagcggcgcaggcgctgaaatccatggtccgcaccacggcgacggtgctgcgtcgcggtcccgggaatatggggccggtgcaggaagaaattgccattgaggagctggtgcccggggatatcatcttcctggcggcgggggatctggttccggcagacgtccgcctgctggaatcccgggacctgtttgtcagccagtcgatactcagcggcgagtcgctgccggttgaaaagtatgacgttctggccagcgtttccggtaaaggatgcgacaggcttcccgagccgaacaaagataaaagcctgctggagatgggcaatatctgtctgatgggcactaacgtgaccagcggcagggcacaggcggtggtggtggccaccggaaaccgtacctggtttggttcgctggcgaaatccatcgtcggcacgcgtactcagacggcgttcgaccgcggggtaaacagcgttagctggctgctgatccgctttatgctggtgatggtaccgattgtgctgctgattaacggcttcagcaaaggtgattgggttgaagcctcgctgtttgccctggcggtagcggttggcctgacgccggaaatgctgccgatgatcgtcagctccaacctggcgaaaggcgctatcgccatgtcgcggcgcaaagtgatcgtcaagcggctgaacgccatccagaactttggcgctatggacgtgctgtgtaccgataaaaccggtacgttaactcaggacaatatcatccttgagcatcaccttgatgtcagcggtcatgagagcgaccgggtgctgacgctggcctggcttaacagcagcagccagagcggggcgcgcaacctgatggaccgggcggtgctgcgctttggcgaggggcggattgcgccagcgaccaaagagcgttttgtcaaacttgatgaactgccgtttgattttgtccgccgtcgggtctcggtgtcggtggaagatgtccgccacggtgacaaaagcctgatctgcaaaggcgcggtcgaagagatgctgatggtcgccacgcatcttcgtgaaggcgataacgttgtggcgctggatgaaacccgacgcgatctgctgttagccaaaacgaaggactataacgcccagggcttccgcgtgctgctggtcgcaacccgcaagctggatgactccgcgctgaccacgccgctatgcaccgccgatgagcagggattgacggttgaagggatgctgactttcctcgatccgccgaaagagagcgcgggaaaagccattaccgcgctgcgcgataacggcgtggcggtgaaagtgctgaccggcgataacccggtggttacggcgcgtatttgcctggaagtgggcatcgatgcccacggtattctgaccggcgcccagattgaagcgatgacggatcgcgacctggagcgagaagtggaaacgcgctcggtattcgcgaagctgacgccgctgcagaagtcgcgcatcctgaaaacactgcagaaaaacggccacaccgtcggctttctcggcgacggcatcaacgatgcgccagccctgcgcgatgcggacgtcggcatttcggttgacagcgcggcggatatcgccaaagaggcatcggatatcatcctgctggaaaaggatctgatggtgctggaagaaggggtgatcaaaggacgtgagacgttcggcaatatcattaagtacctgaatatgactgccagttctaacttcggcaacgtcttctcggtaatggtggccagcgcgtttattccgttcctgccgatgctggcgattcatctgctgattcagaacctgatgtacgatctctcccagctctcgctgccgtgggacaaaatggacaaagagtttctgcgcaagccgcgtaagtgggatgcgaagaatatcggccgttttatgctgtggattggcccaacctcgtccatttttgatatcaccaccttcgcgctgatgtggtacgtgtttgcagcaaatcacgtcgaagcccaggcgctgttccagtccgggtggtttattgaaggactgctgtcgcaaacgctggtggtgcatatgctgagaacgcagaaaattccgtttatccagagccgtgcgaccttgccggtgctgctcaccaccgcggtgattatggctatcgggatctacattccgttctcgccgctgggagcgatggtcggactggagccgctaccgctgagctacttcccatggctggtcgcgacgctgcttagctattgcctggtagcgcagggcatgaagcgtttctatatcaaacgtttcggtcagtggttctga

SEQ ID NO: 172211 - DNA, 684 bp, Klebsiella oxytoca
atgttgatgtttccttatatcgcaaatttactcgccgcgatgctgttgggcgcgctgattggcgctgaaagacagtggcgtcagcgtatggccggcctgcgcaccaactcgctggtcgccaccggcgcggcggtttttattctgagctccatttcaacatcgccggacagccccggacgtattgccgcgcaggtggtatccggaattggttttctcggcgccggcgtcatcatgcgtgaaggcatgaacgtgcgcggcctgaataccgccgcaaccctgtggtgctctgcggcgattggtgtactctgcggtttaggccagttctggcaagcagcggcggcaacgctgataatcctctgcgccaatattctactgcgcgaagcggcgcagagaattaatcagatccccggcgcgacagaagaagagaaatgctacgttctgaatattgtctgtcaaagcgaatatgaaaacgcgattcgtcagctattgcttaatatcagtaaagagatgacgctcagccttcagggactggtgtcgacagcagcaaaagaacaagggcataaagaaatccgcatcgaactggtgggaaataccgactgtcgaaaagcgcgagatctcattatgacaagaattggcggggacgaaaacattacgtcagtccgctggtgcgtcgaggggagttaa

SEQ ID NO: 172212 - DNA, 513 bp, Klebsiella oxytoca
atgtccagaaagcaagttttgcaagcggcgctggcggcggcgctttcgctgaccatgatggcgacgcctgttttcgccaaccccggtaacggcaacggcggcggtaatcatggtaatagcggtaaccatgggaataacggtaacaacggcaatagcggtaaaaacaacgttgataagggcaacaagggtcataaagaaggaaacccggggcagagaaaaaattacggcaaacccgatcatgtctctgccgatatcagcttctccagagcgcgttcgctggcggtaaactacggtttaaccggctatcagtcgctgccgccggggatagcaaaaaatctggctcgcggaaaacctctgccgccggggattgccaaaaaagcggttccggcatcgatgcttaacgaactgccgtactatcctggctatgaatggcgcgtggtgggccaggatttggtgctaatcgcgctgagtacggcgatcgtgacgtcgataattaatggcgtctttgattag

SEQ ID NO: 172213 - DNA, 1410 bp, Klebsiella oxytoca
atgtctaccacccaggtcctgggcgacgccgcgttcgcctctccgggacgctcccactccagcctgaccgctcgcattgatgcgctgcccgcctccgttggcctgtggtcttttatcacccttctggcgctgggcggtttcttcgagctctacgatctttttcagaccggttatatcagtaccgggctactggcagagaatattttccataccggcgagcagggtattttcgggatttcagaccaggccgccttcgcctcgtccacctttatggggctgtttatcggcgccagcctgcttgcgccgctggcggacaaactgggccgccgcctgacgtttatgttcgccctcgcctggtacggcgtgttttccctgatgatggccctgcaaagcagcgctgaaggggttatcttctgccgctttctggtgggcatcggtctcggtattgagctggtgaccatcgacacttacttaagcgaatgggtgccgacgcatctgcgcaataaagccttcgctttcgccttctttattcagtttttatcggttcccgccgtggcgctgatgtcgtggatgctggtgccgattaccctttttggcctgaccggctggcgctgggtgattatcttcggcgcgctctgctcattgatcatctgggtcatccgcaagaagctgccggaatcggcgcgctggctggaggaaaagggccgccatgatgaggcccataaggtcatgtgcgaaatggaacagcgctgcggcgtttctccctcgccgcgccatcaggtgcagacgcaggagcatccgcgcaggctgggaagttttaaagcgatctgggcgccgcagtaccgcaaacgcacgattatgctgatggtgatgaacttcttccaggccatcggcttctttggcttcggcaattggctaccggccctgctttccggccagggagcgagcatcacccacagcctgctgtatgcgttttttattaccctcgcctatccgattggctgcctgttttgtacccgcttcgtccatcgttttgaaaacaaatggcaaattgtgttttccgcgctgatgacggtggtatttggtaccctgtttgcgcttcagaacagtccggtgctgctggtgatctgcgggtttatgatcacctggtcaaacgcctggctgaccattagctatcacgcctaccaggccgaagttttcccgacccatattcgcgcgcgggcggtcggcttttgctactcctttagccgcctgtccacggcgatcaccagcattttgatcggcattattctgcaatacgccggtacacccggggtaattagctttatcgtcgccagcatgctgatggtgatgctctcagtaggcatctttggaccaaaaacccgagggattagcctggagaatatttga

SEQ ID NO: 172214 - DNA, 1164 bp, Klebsiella oxytoca
atgcccggatatctggtacgaataacgttgatcatggcttttgttcaattcatcaacgcgctcgaatatatgatttttaatcccttatttgcctggatggcgccgacgtttcaggtgccggtaagccaggcgggttacgtcaccggcatttatacgctggcttccgtcattgcgggggtcagcgtctggcgatgggtcggtaacgttaaaccgcagcgctttttgctctgcaacatggccctgctggggggattaacgataatgacgctgaccaccaccagttttagcggattgttattttggcgttttctcgccggtctggtcggcggaacaacgatgggggtgggcagcagtttactggtcaacattatgccagcacacctgcgtcctcgggcgttggcctcaacgattgccgcattctcgctggtcagcatcgtcggcatgccgacgatgttatttctcagtgaaaaaatcggctggcagatagcccccgcgacgatcggcggactctgcctgattgcgttgccactgataaaactcgcgctgccggaacagaccattgcggcgaaccgtcaggcagatttgcgctggtcttcatcggtgctgttttacgcctccggcaacgccctcgcgcagttcagtgcgatgttaatcattccgctgctggttccgttactgacggcgaaaatgggggccagcggcgatcaattaccgtggttctttttcgctggcggactggcggggctgtgcgccactaaactcaccggcaagctatgccagcattacagcggctaccgcatcagcctgctggccagcctgctgtttatactgagcctgagcatcgcttttaccttcaaccacggcggcgggctgtttatggtgttgtttctggcggccgcctactgtcgcctggtggcctcatcggcagtggcgatgcgttttccagaggatggcgccagggcggggtttacccttttacagaataccctgatgtcattaagtacggcggcggcttttctgctttcatcatggttgttatcggttgccgggaatggcgagcgggcgatgaatgggatattgctgttctgcgccctgagcgcattgccgctgccgtggctactacgggttcaggagaaaaaattagccgcgcgcgccgccggttaa

SEQ ID NO: 172215 - DNA, 900 bp, Klebsiella oxytoca
gtgaaaagattggatctcaacgcgctgcgggtcttcgtcaccgtggcggaaaatggctcgtttagcgccggcgcaaaagcgctgcagatgccctcatcgaatgtgagccgacagatatcccagcttgagcagagccttcagctgcgcttgatacagcgcagtacccgacatatgaagctgacctctgccggtcagacgctgctcgccagtatgcgacccgtgctggagcagttagccgctacggaagctgagctaacgcaacagcaggcagaacccgaagggctcctacgcctgtgtctccctaacgaaattggcccctcgctgtttgcgccgctaatggcgcaatttgccctgcgctatccaaaaataaccgtgagctgtacgactaatctggcgggcacggaggtgttaaaagaagatgtggatattgcggtgatcatcactcgcggcaaaatggaagacatcagcgttattgcgcgcccgctcttttcgtttccctgctgcgtggtcgcttctccgcagctgatagccagaacgggtatgccgacagacagcgagcaattaacctcgctaccctgtatcaccaccgtcagcgccctcgcggggcaagcctggcagtttgtcgcggcggacgggagctttaaaaaggttaacgtcagcggacactatcgcgtcaacagcggcgaaatggcgctgcatgccgctcttgccggcgtcggattcgctattctgggggaacaaccctgccgcccgtttatcaatcgcggggagctacagcaagtcacgcttgagttaccgccggcgccgttacagctttcagccctctatcgggagcgccattttatgcccgccagaatgcgcgtctggcttgaatttatccagaggcagatggcaggctaa

SEQ ID NO: 172216 - DNA, 906 bp, Klebsiella oxytoca
atggatattaaacagcttaagtacctgattgcgctcgacagaacacgacattttggccaggccgcagcggcgtgccacattactcagcctacgttatcaatgcgtattcgcaatctcgaagaagagctcaatttaacccttatccagcgcggacagcgctttgaaggatttaccccggagggcgagcgtattctggcctgggcgcgagcgctgctggcggcgcatgacgggttagaagccgaggcggctatctgtcgggggcagatggtcggccagctaagggtggggatggtgcctttagccagccttaatccgatgcagttgataaaaccgctggcggagaactatccggagctgcagttcagcctgctgtccatgacgtcggaacagattatcgacggcgtcagccgcaaccagctggatttagggatctgctacctgcaccatgtcgatagccaactgttcaacgtgctctggctgccgcatacgcgtatggggctgctgcatgataaacgtcattatcagtttaccgatgcgacgccggagtgggagacgctggccgcgctgccgctgggctttctgaccaagggcatgtactaccgagaatcgattgaaatgagctttaaggccaaggggctggcgccaaaatacgtttttgaaagcgattccacgtttcagatcatccaggcggtgcaggccgggatctgctgcgcgattatgccgctgaataacggactggaagcgttaagcgataacctggaaatcaggccgatcgccgaaacggaggtcgactcgatgctggcgctgatcatgcgcaacaaagagccggtgtcgtcgctggcggaaaaatgctttgccgatgcccaggcgatttttagcgaacgccagcaggatgaaggcgcttag

SEQ ID NO: 172217 - DNA, 243 bp, Klebsiella oxytoca
ttgaaaactcgccttcatcacgttcagcagcaccggctggccatgccaggcctggaagccatatcgttagtcacggatcagcgctttccgcgccattcccacgaccagttcggtatcgggattttcactcagggcgcgcagcattcatggagccatctgggcaaaattgaggccgccgccggagatatcattatggttaatccgggcgagatgcacgatggtatctggcgtgggccaccctga

SEQ ID NO: 172218 - DNA, 327 bp, Klebsiella oxytoca
gtgacaggcatcgagcaacgcaactcgcgtcaggtcatcagccacgcgatcctgatcaatttgctcaaccccaaactgccgctcttctttctcgcctttctgccgcagtttatccagcgcaactcgaggtcgccgatcggcgaaatgctgatcctgagcgctgtgtttatgctgatgacgctgctgatttttctgctctacggcgccttttctgcggcgatgcgcggatacgtgctgacgcgtccggggggtttacaggggctgagagcctgctttgccgccggtttcgtcgggctgggggttaagctcattctggcgcagaggtag

SEQ ID NO: 172219 - DNA, 2301 bp, Klebsiella oxytoca
atgagtagtagaagacgcgtcgttcccggcgtccatccctatgatggtccggcgggcggctggggtgccttaaaagccaccgcgattgccgtgcgtacgcaaatggacgcgctcgatgctcccgccacgctgctgcggaccaatcagccggatggttttgattgccctggctgcgcctggcccgacaaagagcataaatcaacgtttcagttctgtgaaaacggcgccaaagcggtgacctgggaagccaccagtaaacgcgtgacggcagagtttctggcagccaataccgtgacctcgctgctggcgaggagtgatttcgagctggaaggctacgggcgcttaactcagcctctggcctatgataaggccagcgataccctgcgtcctgtctcatgggaagcggcgtttgcccgtatcggcgccattctccgaacgctgcagcctcatgaagtcgagttctatacctccggacgcgcctctaacgaagcggccttcctgttccagctgttcgcccgcgaatatggcaccaacaacttcccggactgctccaatatgtgccatgagtcgaccagcgtcggcctgccgcagtccatcggtatcggtaaagggacggtctcacttgatgattttgataagaccgagctggtgatttctatcggccacaatcccggaaccaaccatccgcgcatgatgggcacgctgcacgaactggcgcgccggggcgtgccgattatcgtcttcaatccgctaaaagagcgggcgctggaacgtttcgccgatccgcagaacgtcattgagatggcgacctacagctcaaccaacattgcatcgacttacttccaggtcaaagcgggaggcgacgcggcggcgcttaagggcatcgcgaaggcgctgctgcagctggaagcagagcagggcaaagtgctggatcgggcgtttatcgatgagcatacgctgggctttaccgactttgcgcaggatctacaggcgacgcagtggcaggatatcgagcgcgagtcgggtttaacgcggggcgatcttgaacgggtagcggcggcctatgccaaatctcatgccaccattatcacctacggcatgggcattacccagcataataagggcaccgctaacgtccgcctgatagccgacctgctgttgatgcgcggcaatatcggtaagccgggtgccggaatctgcccgctgcgcggacactccaacgtgcagggtaaccgcaccgtcggcatcacggaaaagccgagcccccagtttctggccaacctgcagcgggtgtttggttttacgccgccgcaggagcatggccatgatgcggtaaaagcgctgcaggcgatgatcgagggtaaatcgaaagcgcttctctgcctgggtggtaacttcgcggtggctatgccggatagcgaacgggcttttccggcgatgcgggggctggatttgagcgtgcatattggcaccaagctcaatcgttcgcatcttctggtggcgaaagagaccatcatcctgccgtgtcttgggcgaaccgaactcgatctgcaggagacgggacggcagtcgatcaccgtcgaagattcgatgtcgatggtgcacgcatcgtcgggcaaactgaaacccggttcgcctgaactgcgctcggaaccggcgattgttgccgggatggccatggcgacgctgacggagagcaaaattgactggctggcgctggtcgccgactacgatcggatccgcgatctgattgagcagaccatccccggctttaaccactacaatcagcgcattcgccatcccggcggttttcgcatgccgctgccgccgacggagcgtatctggcccacgccgaccggcaaagcgatgttctccgttttcgacggggtgcacgaaaaccagcaggtagaagggcatgaggtgatgcgcctggtgacgctgcgcagccacgatcaatacaacaccaccatctatgccatggacgatcgctatcgcggcgtgtttggccgtcgcgacgtgctctttatgaacgaacaggatatggctgagctgggatttgaacacggcgaccgggtggatatccgctccgcgctgccgggacaccatcagcggctggatgatatcacgctggttgcctacaacatcgccccgggcaccgttgcggcctactaccctgaagctaacgttctggttcctctggattaccttgataaagagagtggaacgccatcgtataaatcggcgcccgtgcgcttaaccttgcgctcgaaagagattcgcgcgctgacagcgcttcgctaa

SEQ ID NO: 172220 - DNA, 918 bp, Klebsiella oxytoca
atgattatccggccagaacaacactggttccttcgcttgtttgactggcacggctccgtgctgtccaaaattgtttttcgcctgctgcttaacgtaatgatgtcgattatcgccatcattagctatcaatggtatgagcggctggggatccatcttaccgtcgcgccgtttagcctgctggggatcgccatcgctattttcctcggatttcgcaatagcgccggatataaccgctttgttgaagcgcgcaatttatgggggacggtgctgattgcccaaagaacgctggtgcgccagctgaaaaatattctgccgacggaaagcgcagcccatcaacgcctggtgagctatctggtggcgtttagctggagtctgaagcatcagctgcgtaagacggatccgagcgctgatttagcacgtctgctgccgccgcacagcgtaaaggaaattctcgccagctcgatgccgaccaaccgtattctgctactggcaggtgatgagctggggcgtctgcgcgcagaagggaagattggcgatatcaccttcagcctgatggacaataaacttgatgagctgggccacgcgctggggggctgcgagcggctggccagcaccccggtgccctttgcctatacgcttattttgcagcgcacggtgtatctgttctgcgcgctgctgccgtttgcgctggtcggcgatcttcactatatgacgccgttcgtgtcggtgtttatctcctacaccttcctgtcgtgggattcgctggcggaggaactggaagatccgttcggtaccgccgctaacgatttgccgctgaacgcgatgtgtaacaccattgagcgcaacctgctggatatgaccggacagtatcccttaccggagaaactggtgccggaccgccactacaatctgacctga

SEQ ID NO: 172221 - DNA, 981 bp, Klebsiella oxytoca
atggcggcgacttattcaggaaaaattaagcctgaacgcgtagtctggctctttttcttcggggaagtgtcggtaatgaaaataagtaacgataagcagcgttcccaggttgcgcgtaaaacgacgctggtcagcgtgatggtcaatctctttttatccagttttcagatactggccgggatattctccggctcgcagggcttaatcgccgatggtattcattctctttccgatttggtggccgatttcgttgtgctgttggccaataaaaaaagcggcaaaccttcggatagcgaccatcactacgggcaccggcgctatgaaaacggcgcttcactggtgattggcgcgctgctgttactggttggcgcgggtatgctgtggtctgcttgcggcaaactactgcaaccggaatctattcagagtgtgcatattaccgcgctgtgggtggcgctcgccgcgctgaccgccaaagagattttattccgctatatgctaagggcggctaagcaaatccagtcctctatgctaattgccaacgcctggcacgcccgctcagacgccgcgtcttcggtagtcgttgcggtcggcatcatcggtaatctggccggttacgcctggtttgacccagtggccgcactggttgtcggcgcgctggtcacccgcatgggctataccttttcgtctgacgccctccatgacctgatggatcggtcagtggatagcgatagcgagcggcaaataatcgccactatcctggcaacgcccggcgtcgtggcgctgcacgacctgaaaacccgtcgtgccggggatttgatcctggtcgatgtgcatgtcgaagtacccgggcatttatcggtagcggaggggcacgatattgcgctgctggtgcggacccgggtgctaagccaccataacgttctgcatatgatgattcatattgacccgtgtcgcgcagagagcgccgcgattgtcgcgtaa

SEQ ID NO: 172222 - DNA, 870 bp, Klebsiella oxytoca
atgatcagcatacgcggaacgattgaagctcaggttctgggcttaaccggcatggcgctaaaagagatcgattttgaacatcccaaaggcgaaccggggctttttgggccgcagtcggctatctggcaggttcacggcgatttcacttccatgctctgcggcggggtcagcgcgctgttgttacagatgctgcatccgctggccctggcgggcgtctgggatcactcaaatttccgtgaagatatctttggccgcctgcgccgcaccagccagtttatttccgccaccacctttggcaccaccgccgatgccgaacggttgattgcaaaagtacaggggatccatctgcgggtaggcggccaggacaaagacggcacgccctatcaggccagcgatccgcacttgctgacctgggtacacgtcgccgaatgcagcagctttatggcctcgcatctgcgctacaagcggaccgtggtcagcgccgcccgtcaggagcaatactatgaggaagcggccgaagttgcccgtcgcctcggggcgcgggatatcccgcagacgccgcggcagattgctgattacctgcaggatatgcggccggtgctgcgctgcgatgagcgaacccaggaagttgcccacgttctgctgtcgacccgtctgccgggccgtatgagccggccggtggggcgaataatgatgcgcgccggaattgacctgctgccgccgtgggcgcaggagatgcttaatttgccgatgagcacgctacagcggcacagcgcgcggtttgcggttcacggcgtcgctcgcatactgcgcgcctcggtgcgcaacggcgcgtatcattgcgcaatgcgccggatgaatcagttttaa

SEQ ID NO: 172223 - DNA, 432 bp, Klebsiella oxytoca
atggcaatccataagaaaggtcaggcgcattgggaaggggatctaaaaagcggtaaaggaaccgtctctaccgagagcggcgcgctgaaccagcagccttatggttttaacacccggtttgagggtgtgaaggggactaacccggaagagcttatcggcgccgcacatgccgcctgtttttccatggcactatcgctgatgctgagcgaagagggctacaccgcgacctccattgataccgtggcagtggtaacgctggataaatccggcggcggtttcgccattacccagatcgcgctacagagcaaaatcgtgctgccaggcattgaggccgacgcgtttgacagcattattcagaaagcaaaagccggttgtccggtttctcaggtgttgaatgctgagataaccctcgattatcagctcaattcctga

SEQ ID NO: 172224 - DNA, 480 bp, Klebsiella oxytoca
atgattgttattcgcccaatgcgcgatgaagagtacgccgcgtacctgaactattttattgccgattatgcggcggagatcgcgaccaattacgcgctttctccggaggcggcattggcccaggcgcagcgcgaaattgccgaggatctgcccgatggcgtcaatactcacggccaggctttacgctgcttattcgatgaaattgatggtacagaaaagcgggttggctatctctggtataagcctgacgcagaaatacgctccgcctttatctgtgatttttatatttttccgtccttgcaggggcagggattgggtaaacaagcgatggcggcttttgagcatgaattaaaaaacctgggtatccgccaaataaaactgcgcgtcgccggcgataatccgcgcgctcgccgactctatgaagtcaccggatttcgcgttaccggcatcaatatgagtaaaaatatcgctgcggattga

SEQ ID NO: 172225 - DNA, 903 bp, Klebsiella oxytoca
atggatcgagtcattgccgcgcaggtctatatgcgtatttgtgagctgggaagcttaagcgccgccgcgcgggcgctggggatgtcgcggccgatggtgagccgctatctggaacagatggagcagtgggctggcacccgactggttcatcgctctacccgtaagctgacgctcacggctgcgggggaaaaggtactgcaaaaaacgcgcaccctgacgcagctgtcggatgagatcgccgggcagagtgaacgagcgatccccagcggaacgctgcgcgtagcctgcgctcattttaccgcgatgcagctgatttctccgcttttgcccgattttctcgcccgctatccgcagctgcgtcttgagctggatatcaacaatcatccggtaagcctgataggcgaaaggatcgacgtggcgattcggatcaccgacaatccggagccgggagctattgcccgccgtctcggcgtgtgccgttcggtgctgtgcgcgtcgccgcgctggctacagcagaatgggccgctgcatacgccggacgatctcactcgccacaactgcctgcattacagccattttgccagtcagacctggcagtttagcgaccccagcggcgaaagcgtggcggtggcggtttccggcaacctcagcgccgggatctcctcgctgctgatggaggcggcggtagccggctgcggcatcgcaatgctgccggagctggaggcgcagcgggcgctcaacagcggggcgctgaaacaggttttaccgacctggcggccaaaagccttaaacgtgtatgggatttatctctcacgggactaccagccgagcgcgctgccgctgtttcttgaagagattcagcaaaaactggcgcaacctaacgatataaaaggacccttgtga

SEQ ID NO: 172226 - DNA, 852 bp, Klebsiella oxytoca
atgaaattatctgcccttgccatcgccactacgctgttcagcgcttcagttctggcagccccattaacgttgcaaacctataacccgcaggagaacggtattttcgcggttaactccaccctcgcctccggcccgcatgaagcggtgttgtttgacgctcagttcagcgtgaaggatggcgagaagctggttgaaatgattcagaaaagcggtaaaaaactgacccgcatcgtgattacttccggcgatccggatttctattttggcctgcagccgctggtcaaagcgttcccggaagccaaagtggtggcaaccgcagaagtggttaaacacattaacgccaccaaacaggccaaactggcgtactggggcccgcagatgaaggacggcgcgccgacccaggtttatgtcccgcaggagctgacggctaataccttcactatcgacggcgaaaaggttgagatccgccagccgcaaaattatgccgcctatgtgtggatcccggcgaataaagccattcttggcggtaccggcgtggcgtggggtatgcacgtctggacggcggacactcagagcgtcgaaagccgtcagcagtggataaatacgctcgacgagatggccgcgttgcatccgcagcaggtgatccccggccattatctcggcacgccgccagccggtgaccgggcgattacttttactcgcgattatttgacccagtttgagcaggcgctcaaagagcataaagattccgctggcgtcattaaggcgatgaaacagcgctggccggggctcgcggaagagagttcgctggagctgagcgccaaagtgaataccggcgaaatgaagtggtaa

SEQ ID NO: 172227 - DNA, 141 bp, Klebsiella oxytoca
atgaaatcgaaccaacaggcacgtcatcttcttggtctgaactacaaactttctcagcagaaaaaggtcctgctggaaggcgatgcggaaaccacggttaaccatgttcgcgccaccggccgcaagcgccgcggtggctaa

SEQ ID NO: 172228 - DNA, 1698 bp, Klebsiella oxytoca
atgcaattcactcataagaaaaaccgctctctttacatcccttacgccggccccgtgctgcttgaatttccgctgctcaataagggcagcgccttcagcatggaagagcgcagcagctttaatctgctgggcctgctgccggaagtggtcgaaaccatcgaagagcaggccgaacgcgcgtggatccaataccagggatttaaaaccgagatcgacaagcacatttacctgcgcaacattcaggataccaacgaaaccctgttctaccgtctggtcggcaaccacctcgatgaaatgatgccggtcatctataccccgaccgtcggcgccgcctgtgaacgcttctctgagatctatcgtcgcgcccgcggcgtgtttatctcttaccagaaccgcaataatctcgacgatattctgcaaaacgtaccgaaccataacgttaaggttatcgtgatgaccgatggcgaacgtattctcggcctcggcgaccagggcatcggcggaatgggcattcctatcggcaaactgtcgctgtataccacctgcggggggatcagcccggcctacaccctgccggtcgttcttgacgtgggcaccaataatcagcaactgctcgacgatccgttatacatgggctggcgccacccgcgtattaccgacgatgagtattaccagtttgttgacgatgttattcaggcgattaaagcccgctggccggatgtgctgctgcagttcgaagacttcgcgcagaaaaacgctatgccgctgcttaaccgctatcgccacgaaatctgctccttcaacgatgatatccagggcaccgcctcggtcaccgtcggtacgctgattgccgccagccgcggcgcgggcagtcagctgagcgagcagaaaattgtcttcctcggcgccggttccgcaggctgcggtatcgcggagcagatcgtcgcccagatccagcgcgaagggttaagcgaagaagaagcccgcaaacgcgtatttatggttgaccgtttcggtctgctcacggatgcgatgccaaatcttctgccgttccagagcaaactggtgcagaaacgcgaacacctgcaagagtgggacaccaccagtgacgtgctgtcgctgcttgacgtggtgcaaaatgtaaaaccggatatcctgatcggcgtctccgggcagcctgggctgttcaccgaagagattatccgcgagatgcataagcattgcccacgaccaatcgtgatgccgctgtcaaacccgacctcaagggtggaagccacgccgcaaaatatcctcagctggaccgacggagaagcgctggtcgctaccggcagtccgttcgctccggtaacgctcaaaggcaagcagtacgtcatcgcccagtgtaacaactcctatatcttcccggggatcggccttggggttatcgcttcaggcgcttcgcgcgtgaccgatgagatgctgatggccgccagcgaaacgctggcgaaacattcgccgctggtgaataacggtgaaggtccggttctgccggaactgaaagatatccagagcgtttcgcgcgctatcgcttttgcggtgggtaaaattgcccaggagcaaggcgtggcggtgaaaacctccgccgaagcgctgctgcaggcgatcgccgataacttctggcagccggaatatcgcaactatcgccggacgtcaatataa

SEQ ID NO: 172229 - DNA, 675 bp, Klebsiella oxytoca
atgcgcatacttgtctttgcggataaggctctgctgcgtcatcatttgaaagtacagctaacgcagcaagggcatatcgtcgatgatgcacaaaacgtcaaggaagcgaattactatatcgtagagtatccgcctgacatcgcaattattgatctggacgcgacaagtgaagcgggtctggctctgatccgcgactggcgcggccagggggtttctgtaccgatattggttatgagcgcaggcgagtgctggcaggattgcgttaacgccctcaacgccggtgcggacaaccacatccgtaagccatttcatattgatattatggttgcgcgtatcaatgcgctttttcgccgcaactatggattgtcatcagaattaatctcaataccgccatttctgctaaatctttcgcgtcgggaattgtcggtaaatggtgttacgttaaatctgaccgcttttgaatatattattatggaaacattaatccgcaactgcggtaaagttaccagcaaggatgatcttatgcgccagctgtatgcagaaggagagctatattgcagcagttcactaatggtccttattgggcggatacgtaaaaagattcgggcgtgttattcatctgagtccatcgtgacgattcgccggcagggctatagatttgatatcaaaaaatag

SEQ ID NO: 172230 - DNA, 1713 bp, Klebsiella oxytoca
atgagtacattactaactgcacaatctctccatgttgatacggcgtttggcccgctgttcacaaacctctcctttaccctcaaaaaaggcgaccgcattggcctgattggctataacggctgcggaaaaagtaccctgcttagagtgctggacggcacgatgattccgaatgggggcagcgtggcgctggccagccactgcctgatggcgcgggtggaacagcatctacccgatacgctgttagcgcaacctctgctacaggtggtcctggaaaaacttcccgcccttgagcgagagaaccagcgctggcaagcggagcggctgctggcggagatgggctttacgtccgatgaggcccggcagcgggcatcaaccctgagcggcggtcagcatacccggctgctgcttgccagggcgctgattcagcaaccggatctcctgctgttggacgaaccgggaaaccacctcgacctgccgaccctcctgtggctggaaagcttcttgcaaacctggcaggggagtttcgttctggtgtctcatgacaacatcttactggatgctgtaactaatgcgagttggatcctgcgcgacaaaaccctgcatgccttctccctgccctgcagcgctgcccgtcaggcgctggatgagcgagatgccagcgatgcgctgcgccataaagccgagcaaaaagagattgaccgggtcgccgccagcgccaaacgactggctatctgggggcgcacctatgacaacgaagatctctcgcgtaaagctaagcagatggaaaagcaggttcagcgcctgaaggagagccaaaccgatctcaccgccggaacaccctggcggctaacgctgcgcggcgacatgctgcgggcagacaggctgctggagatggatcagcttcccgtcccgcccgcgccgggtctgccggtcctgtttactgcgggtctggctcgtctgaaaagcggcgatcgggtcgcggtaatgggccgtaacggcggcgggaaatcctccctgctgcgtctactgtggcgacatatgcagcaggaatcagcggaggacggcttacgcctgcacccgcggctgaaaccgggttattacgatcagatcctgcatcagcttgcggatgacgacacgcttctcgacgcgctggagccttttgagccggcggcggacgcgcgcaagcgggcgctgatctcagccggatttagctgggctcgtcacgggcaaaaggtcgccaccttaagcggcggcgagcgttcgcgtctgctatttgtcggcctgtctctggcctgctatagcctgctgcttctggatgagccaaccaaccatctggatatggacggcaaaacagcgctggcaagaacgttgtgcgactacccaggcggactgctgctggtgagccacgaccgcgaactcattaaccatagctgcaatcgcttctggcttattgacgagcgcgggctgagcgaatggcacagcgccgaagaggtgtatgaggttttacgcaccgccgttcgttgtccggccccggaggtcgtggcggagaaccgccgcgaagcggaggaagaccatgatacgctgctggaacggttagtgtcgcttgagcaactgctggccgacgatctggcccgtaaaccaaaacatcaaaaaccgcagctgcaggcgcagtggcgtaaggagatagccaccctcaacgctttgctaagctaa

SEQ ID NO: 172231 - DNA, 969 bp, Klebsiella oxytoca
atgaactcacccgcgcttgttgatgaaattcgtaccgcttcccgcctgatggtgcgtgaactgggctttatgagcaccacgctggccgctacggcgtactcaccttcggcggtacatacgcttgtggaaatttctctacgcggcgcgatgacggccgctcagctggtgcagatcctggggctggaaaagtctagcgtcagcaggatgctttcccgtctgcttgccgccggggaactccgggaaaaaacgtcctcccgcgacgggcggattaagcagcttgcgttaacggcgcaaggtgcggcgacggtcaaaaaaattaacgcctacggcgctatgcgggtagtggatgcgctggaacacctgagcgatgcgcaaagacagtgcgtcgctcagggcctcacaacctgggcctgggcgttggaaaaatgccgcgacgtcgaggctacaggctcgaaaaagacgattgatatcgctaccggctatcggcctggaatgattggccgcatagcgcaaatgcacggcgagtattatgcaaaacattatcagtttggtgcttttttcgagagtaaagtcgccagcgggctggcggaattttcagctcgtctcgataaaccgtgcaaccgtgtttggctggccgttcagggcgagcaaattgtcggatcggtagcgattgacggcgaggatctggggaataaccaggcgcatctgcgctggtttattctcgacgatagctgccggggtagcggcattggtcggcgcctgctgagcgaagccatggctttttgcgatagccgggactttgcatcagtacagctatggaccttcagcggcctgcacgccgcccgcaggctgtatgaatcctttagtttcacgctggataaagagtggcagggcgaacagtggggcaggacgatgaccgagcagcagtttagtcgaatcaaaccgcgaccggcgactcatactaagtaa

SEQ ID NO: 172232 - DNA, 600 bp, Klebsiella oxytoca
atgcatctggcgaaaaccctcctggccgcaggccttctgctttctaccgccgttgaggcgcaaaacgtgctggattttccgcagccgaacaacaaccctgaagagttttacgccgtaaccgaaatcccggcgggcggcattatcaaatacgaaacggacgccaaaaccggctttctgatcgccgatcgtttccagtcgatgccggtggcctatccggctaactacggctcgctcactcaatcgctggcaggggatggcgatccgctggacgtggtgttttatacccgcgcgccgatggccccgggaacgctgattaagctgcgcacgattggcgtgctgaagatgattgatggcggcgagaaggacgacaaaatcattgccgttccggcaagtaaaatcgatccaacctacgatgacgtgattaacatcagcgatctgccgaaaattgagcaggagcgtctgcaggctttcttccgggtttacaaacagctgccggacggacgtaaaaaagtcgagctggacggctttaacgatgccgccgccgcgaaacaggaaatcaaagcggcatgggaagcgtggaaagagaaaaatccgcaataa

SEQ ID NO: 172233 - DNA, 1011 bp, Klebsiella oxytoca
atgaaagctgccgtcgtcacgcaagatcatcaggtcaatgttacggaaaaaacacttcgcccattacagcacggcgaagcccttttaaaaatggactgctgcggcgtctgccataccgacctgcacgttaagaacggcgatttcggcgataaaaccggcgtcattctgggccatgaaggcgtgggcgtggtgcagcaggtcggccctggcgtgcactcgctcaagccgggcgatcgcgccagcgtcgcatggttcttcgaaggctgcggtcactgtgaatattgtaacagcggtaacgaaacgctgtgccgttcggtaaaaaatgcgggctacaccgttgatggcgggatggccgaagagtgtatcgtcattgccgattacgcggtcaaagtgccggatggtcttgattctgcggcagccagcagcatcacctgcgcaggggtcaccacctataaagcggtaaaagtttcccatatcaaacccggccagtggatcgccatttatggcctcggcgggttgggtaacctggccctgcaatatgcgaaaaacgtttttaacgccaaggtcatcgcccttgacgttaatgatgaacagctgaaactggccgcagaaatgggcgcagatctgaccatcaattcccgcagcgaagacgcggccaaaattatccacgagaaaaccggcggcgcccatgccgcagtcgtgacggcggtcgccaaagcggcgtttaactctgcggtggatgcggttcgcgccggcggacgcgtggtggccgtcggcctgcctccggaagccatgagcctggatattccgcgcctggtactggacggtatcgaggtggttggttctctggtgggtacgcgccaggatctggccgaagccttccagtttgccgccgagggtaaggtggtaccgaaggtcaccctgcgcccgctgggtgatatcaacgccatctttaaggagatggaacagggacaaattcgcggtcgtatggtgattgatttccgccgttaa

SEQ ID NO: 172234 - DNA, 1623 bp, Klebsiella oxytoca
atgcacatccgttttcgcctgcccgcgctggcggcgctatttttaaccggcgcgttttccgcctgggccgccgacgccccggttaaaggcggtacgttaatctatctggagcagcagccgcatactaatctttacccaccggccggtggcttctaccccaacggcggcattcttaatcaaataaccgataagctcacctggcagaacccgaaaacgctgcaggtggagccgtggatcgccgaaagctggagcgccaacgcggataaaaccgaatatacctttaagcttcgccccggggtgaccttctcagatggcaccccgcttgacgccagggcggtcgccaaaaactttgatacctacggcctcggtgataaagcgcaccgcctgccggtgtctgaggtcattaataactacgatcgcagcgaagtcatcgatccgctgacggtaaagttctactttaaaaagccctcgccgggatttctgcagggcaccgccaccatcggctccgggctggtatccctcagtaccctggcgcgtaattttgaagagctgggcgatgcccgccatattattggctccggaccttttacggtaaaagatgaaaagccggggcgcgaactcactctggtcgcgcgcaaagattatcaatggggaccgaaaaatctcacccagcagggaccagctaatctcgatggcatcacttacatcgttacccctgaagatggcgtgcgcattggcgctctgctggcgggccaggctgattttatccgtcaggtacaggcctacgatgaaaagcaggccaccgggcagggctttaaaatttatgctgcccccacgcgcggcgttaacgacagcctgagcttccggccggataatccgctggttgccgacctgcgcgttcgtcaggcgctgctgcacgccaccgacgccaggcaggtagtcgaaacgctgttctccgccaactatccgcaggcgacctccgtcgtcgccagtaccgccgccgggtacgttaacctcagcgacaagctggctttcgatccggccaaagcaaaacaactgcttgatgatgcaggctggaaaccggctgccgatggtattcgggtcaaagatggccagcggctggccttaaccgtctatgaatctctgccgcaaccgcaaaataaagaagttttgcagcttgtcgctcagcagtggcgtcaggtcggcgtcgcgctggcggtcaaagccggcgatgccggcagccgtacgctggataacctcgatccgctgaaaacgccgctcaccgtgtcggaagtgggccgcgccgaccccgacgtggtgaaaagcatgtttttccccactaaccgcgacgcgctgctgcaaaaaggcggctccagcgacaaagtacaggggttccgcgacgataagctcaacgcattgctgagcgcgatttcagccgaagttgaaccgcaaaaacggctccagctcaccggcgatgcccaacgctatctgctggataatgcctacgtgatcccgatatttgaagaaccgcaggtcttcgccggcgccccgtgggtgaaaggcgtcagttttgaagcggtaggccgcccgtcgttctatggcgcgtggctggaaaagcactga

SEQ ID NO: 172235 - DNA, 945 bp, Klebsiella oxytoca
atgagccattatcttctgcggcgaaccggccagggtttactggtgctatgggcggcatttaccctctccttcatcctgttacaggtgctgcccggcgatgcggtactgatcaagtttcagaatccggatctggggctcagccctgagcagatcgccgaaatgcgcctcgcctggggggccgatagcccggtgtggaagcagtatctccacaccctcttcgccatgctgcgcggggattttggttattcgctgcaggccggactgccggtgagcgcgctgatcgccagcaatctgccgcagacactaagcctcgcgctccccgcctttgcgctggcggtggcgctggcttttaccctcgccttcgcctcacggctgccgggtctgcgctggctaagcaatacgctgcaatcgctgccggtgctgtttatctccctgccgacgttctggctcgctatcgccctgatacagcttttctcctttcagctgcgctggataccggtgatcaatccgggaccgattgagggactcattctgcccgtcgtcgccgtcgcggtaccgatttccgctccgctggcgcagattctgatgcgcagtctggatcaggtcgccgcgctgccgtttgtgggcgttgctcgtgctaaaggcatgagcgagaccggcgtgctgtggcggcacgttaccggcaatgccctgctaccggtgctcaatatggccgggctgctgctcggggaactgatcgccggagccctgattaccgaaaccgtgtttggccgcggcgggctgggtctgctgacgcagcaggcggtcaataatcaggatatcgcggtactgcaggcggtggtgatgatctcagcccttggttttgtcctgattaatctgctggtcgacctgctgatgccgctgctcgacccgcgcctgaaaaccgctgagggaggtacgctatga

SEQ ID NO: 172236 - DNA, 852 bp, Klebsiella oxytoca
atgagtctggttgattacgcaatcgccgcccgccgccgctcgccagactggcgcacgctacgcttccagcccggcctgctgctggcctgggcgattatgatcgttgctgcgctgatggccgttgtcccgcagctgtttaccgcttataacccgttggaaggtttccccggcgcccagcgcctggccccccaggcgggtcactggctgggcaccgaccagcttggtcgcgatctgtggagtcgaatcgtctacggcgctgcccattcgctctccgctgcgctggcggcagtggcgattggcctgatcatcggaaccgcgctgggtacgctggccggcgcgctggcgggacgcgtggagtcgatcgtcatgcggctggtcgacgtactgctggcgattccatccctgttgctgtccctaacggtcattattctgctcggcttcggcaccctcaacgccgccgtcgcggtcggggtggcggcaatagccagctttgcccgcctggcgcgcgcggaagtcgtacgcgtacggcgcagcgattacgtcgaagcggcctacggcagcggcggcaccttttttgccgtcttctggcggcatattttacccaattcgctcaccgcggtactggccttcgccacgctccagttcggccaggccgttctggcgctctcaaccctgagttttctcggctacggcacgccgccgccggtaccagagtggggattactgatcgccgaaggccgtaactacctctccaccgcctggtggctaacgacccttcccggtatggcggtgattgcggtcgtgcttgccgccaatcgtattagccgtcaatttagcggagaacgccgatga

SEQ ID NO: 172237 - DNA, 1605 bp, Klebsiella oxytoca
atgaatgttttaaccgtagaaaacctacgcatcagctatcgttcgcagagtgaatggcgtgaagtcgtgcataacgtcagttttcaggtaaaacgcggcgaaatgctggcgttcgtcggcgaatccggctcgggcaaaaccactaccgcccaggcgataatgggtctgctggcggagaatgcccggcgcgacagcgggcgcatcagtattaacggtgaagacattagcggctggtcaggtaaacgcctcgacggcctgcgcggcgcgcgaattagcctggtgccccaggatccaggcaactccctcaatccggtgaaaaccatcggcgcgcaggtaggtgaaattctgcgcctccatcagaaacgcagcgccgcggaacgtaaaacgcaggtactggcgctgctggcgaaggttggactgagccacccggagcagcgcttcgatcaatatccgcaccaactttcaggcggcatgaagcaacgagtgctgattgccatcgccatcgctctgaaaccggatttaatcattgctgatgagccaaccagcgcccttgacgtgacggtacagaagcggatcctcgatctgctggataccctgcgccgggagtccggcacggcggtgctgttcgtcactcacgatctggcgctggcagccgagcgtgccgaccgcctgctggtctttcgtcatggcgaaattcaggagcaaggcgcgacccgcgatgtggtacggacgccgcagcatgcctatactcgccagctgctcagcgatcttcacggcccgacgctgaccatggctcccgccggcggtcgcgtgctggctacgccggcgattcgcgtcgacgacatcagcaagcgcttctcattaggccgggcgcatttgcaggcgctggacgccgtgagttttgaggttaagcgcggctgcacgcacgcgctggttggtgagtccggttccggtaaaacgacacttgcgcggatcctgctgggattcgaaaaggcggatagcggccagattgccatcgatggtattgatgccgggcatctcagtcgggaggcgctccgccagctacggcgtaaaattcagtttgtctatcagaacccctttgcctctcttgacccacggcaaacgctgtttgaaatcattgaagagccgttaaagaacttcgaccgcttcagcgccggaatacgacgccagcgcgtcgaaacggtcgccgctcgcgtggcgctcgctccggagctgctgtcgcgaaccgcccgtgagctatccggcgggcagcggcagcgggtggctatcgcccgcgccctaatccttgaaccgacgatccttgtcctcgatgaagcgacttcggcgctggacgttaccgtccaggcgcaaattctcgccttgctgcagcagttgcagcaacagctgggattgacctatctgtttatcacccacgatttggcgacggttcgccgtatcgcccacagcgtgacggtactgcgggcgggccaggttattgaacatggcgacgtcggccgactgttctgcgctccgcagcatgagtatacccgcgagcttattgccgctattccccacttttccccctcgaacaaggaggtcgcatga

SEQ ID NO: 172238 - DNA, 990 bp, Klebsiella oxytoca
atgacgcgtaaacgactgggttttttcactcgcctgctggaccacgtcgcgccaggtgagcgctatcggctggctaccgaacaaattcgccacgccgaacgactgggtttcgacagcgcctgggtcgctcagcaccattttcatgagcacgaaggcggcctgccgtcgccgctggtctttctcgcccacgcggcagcgcatacggagcgcattcgcctgggaaccgccattatcaccctgccgatggaaaacccgctgcgggttgccgaggatgcggcggtgctggatctgctcgccgatggacgactggaagtgggcttcgggtctggcggcacgccgacctcgtttttaccctttggattgaccatcgaccagcgcagcgcagtctttgccgaacacctgcatctgattcaaagcgcctggcgcggagattcactttcgcatccggataatcatctttatccccaggcaccgcagttggcggagcgtatctggattgccaccttttccgttgagggcgcggtgcgcgcggctcaggccggacacggcctgatgctttcgcgtacccagccgcgtccttcagggcagcccacgctgccgctggacgctatccagaatccgattattgacgcctatctcgccgcgctgccgccgggcgtcgagccacggatcctcgcctcgcggacggcctttgtcgccgatagccagcagtatgcgctacaggtcgctgaacccggtctgcgccagcaggcggcccagcatcgcgccgcaggtcatcatattattggtgacactgtcactgattttttgccgcagcttgacgcgcacgttggcgacccgcagcacgtcgccgcatcgctggggcgcgatagcgtcctgcggcgggtaaccgatatttcgttccaggtgcactccgttgaaccctcgcaccgcgacacgcttcgttccattgagctgatcgctcagcatattgccccgcagatacgataa

SEQ ID NO: 172239 - DNA, 1092 bp, Klebsiella oxytoca
atgacgctcagtcaggatatattggccgaactggcagaaattgcccccgattccgccttagcggcggcgagagccgtgcgcaaggcggccacccatcatgctcagggaagctatgaagcgctgttcggtcagcaggataacgactttccgctcgacgaacgttttgccgttgccgccagggtagcgaagctgcatgagagcgatgcgctggccgcccactatgccgggtttgggattgccgatccgacctcgccgcggctggttccggcgcaggcctttgcccggctgttgaccttcgcgccggtagaagccacgccttcggctctggaggcattaacccgcgccggatggagcccgcgcgctatcgtgacgctggcccagttgattgcgtttgtcagcttccagagtcgtctgctgaacggtctacgtctgctcaacggtaaaagcgccccggttgccgggaccccggtcgtagccggattctggcatacctcaccgcaaaccctcagcggtaaacgcgcgccggtgcgcttcacccgcgatgaactgcactgggaaccctggctggcggctaaaccgctggcggaatttaccccggatgagcaggcgctgctggcgaaattcggccacagcgactcgccctacttccgcctgctggcgcgcaatcagccggtgctggagcagcgtacgttaaccgataaagggattttttatactcccggcggcctgccgcgcgccgaacgcgagctggcggcgacggtagcgagtaaaatcaacggttgtatttattgcgcctcggtgcatgctcgcaaggccgcgcagttagcgaaaggtgaaacggcggtagagaccctgctggcggtgaccccgggagagaagctgagcgatgggcagacgccgcgctggcaggcgctcattgattttgccgcagcgatttccgttacccctcccgccctggccacgagccaccttgcggccgtcgaacagcaacagctggatacccttgcccaactggatctgctgcaatcggcagccttcttcgcctgggccaaccggttaatgctgaccctcggggagccgtggcaggattag

SEQ ID NO: 172240 - DNA, 1152 bp, Klebsiella oxytoca
atgaaaaagactattttttcgttagcgcttggcacttttggtctcggaatggcggaatttggcatcatgggggtattacctgaaattgcccgtgatgtcggcatatccattcctgccgcaggcaacatgatttcatattatgcgtccggcgtcgtgatcggcgcgccggtgatggcgatattctccagccgcttttcactaaaatcagtgatgctgtttctcgtagcgctatgcattatcggcaacgccatcttcacgttctcctccggctacacgatgctggcgctggggcgcctcatctccgggtttccgcacggcgcattctttggcgtgggcgcgataattctgtcgaaaattgcgccgccaggcaaggttaccgcagcggtggcggggatgatcgccgggatgaccgtcgccaacctgctgggggtaccgggaggaacctggcttggccatcagttcagctggcgctataccttcctggcgattgcggtctttgacgtcgcggtgctggtgtccatcgcctggtgggtgccgacgttatttgataaatcaaccacgcgcttgcgctcgcaatttcattttttaacctcacctgcgccgtggttaatttttgccgccaccctgttcggcaatgccggcgtcttcgcgtggtttagctatattaagccgtttatgatcaacgtctccggcttcggtgaaagcgccatcataatgattatgatgctggtgggcctggggatggttctggggaatttatttagcggtaaagtttccgcgcgctacagtccgttacgtattgccgccgtgacggatggcgttatcgttttgaccttattactcctgttcctgctgggtgagaataaaaccgcctcactaaccctggcgtttatctgctgcgcggcgctgtttgccctgtcggcgccgctgcaaatcatgctgctgcaaaatgccaaaggcggcgagatgctgggcgcggcgggcggccagatcgcctttaatcttggaagcgccatcggggcgctgttcggcgggatgatgattacggccggccttggctggcgttccgttgccttaccggccgcgctgctttcgtttcttgcgctcagttcactgctgatttatgcccgctatcagcagcgttctgtctga

SEQ ID NO: 172241 - DNA, 189 bp, Klebsiella oxytoca
atgaaagcaatgcttcgctattttttaaaggatatttatgacggcattcgcactcacgtaatattaatctgcgtaatagtacttacagggcttatttaccgggttttcgattttgacgtttggttcacgcctgtcgttgtcattgttatattggttgcccattgggtattaagccaattcaggatttaa

SEQ ID NO: 172242 - DNA, 342 bp, Klebsiella oxytoca
atggaagatactaaattaataaaaatcatgcatgaaagtggctttacagataagcagatcgacaagttaacggcgagatataagacgcttttatactgtgccgttgacgaagcggcatcgcgcttgcccagggcaatatttgtccatgtattcgttcttttaattatcgggatcggcatcctgaaagcggtccatgaagggacctggcatcctgcgcaactcattattttcgcgctaccgctggtcgtcgcctgtggggtatcgcatcacttcgctccgctaagtgaggtatacaaagcagcaaaggtgatgaaaaagatcaaacatcagcaggttcactaa

SEQ ID NO: 172243 - DNA, 657 bp, Klebsiella oxytoca
atgagtaaatcgaaaatgattgtgcgcacgaagtttattgaccgcgcctgtcactggacggtggtcatctgctttttcctggtggcgctgtcggggatctcgtttttcttcccgacgctgcagtggctgaccgaaaccttcggtaccccgcagatggggcgtattctgcatccgttcttcggggttctgattttcgtggccctgatgtttatgttcgtgcgctttgtccaccataatattcccgacaaacaggatattccctggctgaaagggattatcgaggtgcttaagggcaatgagcataaagtggcgcgggtagggaaatacaacgctggccagaaaatgatgttctggacgatcatgagcatgatatttgtgctgctggtcaccggggtgattatctggcggccttattttgcccactatttcccgattcaggttattcgctatagtctgttgattcacgcaacgtcggccattattcttatccatgcgattctgatccatatgtatatggcattctgggttaaaggatcgattaaaggcatgattgaagggaaggtgagccgacgctgggcgaagaagcatcatccgcgctggtatcgcgacgtggagcgcctggaagcgaaaagggaaaatcgcgaagggctgaagtaa

SEQ ID NO: 172244 - DNA, 885 bp, Klebsiella oxytoca
atggcgatggaaacccaggacattattaaacgctccgccaccaatccgatcacccccgcgccgcgcgcgcgggattttaaggcggaagtggcaaagctgattgatgtctcctcctgcgtaggctgcaaagcctgccaggtggcctgttccgagtggaacgatatccgcgatgaagtcgggcactgcgtcggggtttacgacaatcccgccgatctgagcgccaaatcctggacggtaatgcgctttagcgaaaccgagcagaacggcaagctggagtggctgattcgcaaagacggctgtatgcactgcgaggatccgggctgcctgaaggcgtgcccgtccgccggagcgattattcagtacgcaaacggcatcgtcgactttcagcaggaaaactgcatcggctgcggttactgcattgccggatgcccttttaacgtcccgcgcctcaataaagaggataaccgggtctataagtgcacgctgtgcgtcgatcgggtcagcgttggccaggaaccggcctgcgtgaaaacctgcccaaccggcgcgattcacttcggcagcaagcaagagatgctggaagtggccaacgagcgtgtggaaaaactgaagaaacgcggctattcccatgccggggtgtataacccgcctggcgtcggcggcacccacgtgatgtacgtgctgcatcatgcggaccagccggagctgtaccataacctgccgaaggatccgcagatagatacctcaataaatctgtggaaaggcgcgctgaaaccgctctccgccgttggctttatcgccacctttgccgggctgatctatcactacatcgggattgggccgaacaaggaagcggatgacgatgaggaggagcatgatgagtaa

SEQ ID NO: 172245 - DNA, 2412 bp, Klebsiella oxytoca
atgaccaaccactgggttgatattaaaaacgccaatgtcgtggtggtgatgggcggtaacgccgccgaagcccatccggtgggattccgctgggcgatggaggcaaaaaacaacaatgatgcgacgctgattgtcgttgacccgcgctttacgcgtacggcgtcggtggccgatatttatgcgccgatccgttccggtaccgacattaccttcctgtcgggcgtgctgctgtacctgatcgaaaataacaaaatcaatgccgagtacgttaaacactataccaacgccaacctgctggtgcgcgacgattttgccttcgaagatggcctgttcagcggctacgatgccgaaaagcgtctgtacgataagtcttcgtggaactatcagttcgacgaaaatggcttcgcgatgcgcgatgaaacgctgcagcatccgcgctgcgtatggaacctgctgaagcagcacgtttcgcgctatacgccggaggtggtggagaacatctgcggtacgccaaaagcggacttcctgaaagtgtgcgaagtgctggcctcaaccagcgcggcggaccggaccaccactttcctctatgcgctgggctggacgcagcataccgtcggcgcgcagaacatccgcaccatggcgatgattcagctgctgctcggcaatatggggatggcgggaggcggggtcaacgcgctgcgcgggcactccaatatccaggggttaaccgatttaggcctgctttcgaccagcctgccgggctacctgacgctgccgtcggaacagcaggttgatctgcaaagctatctcgctgccaatacgccgaaggcgacgctgcccgaacaggtgaactactggagcaactacccgaagttcttcgtcagcctgatgaaatctttctacggcgacgcggcgcaaaaagagaacgactggggcttccactggctgccgaaatgggaccaggcttatgacgttatcaagtatttcaatatgatggataacggcaacgtcacgggctatatctgccagggattcaatccggtggcgtccttcccggacaaaaacaaggtggtccgcagcctgagtaagctgaagtacatggtggttatcgacccgctggtgaccgaaacctcgaccttctggcaaaaccacggcgagtcgaacgatgttgacccggcagcgattcagaccgaggtcttccgcctgccgtccacctgctttgccgaagaggatggttccatcgccaactccgggcgctggctacagtggcactggaagggccaggacgcgccgggcgaagcgcgcaacgacggcgaaattctggccgggatttaccaccgcctgcgcgagatgtatcgcaccgagggcggcaaaggcgtcgagccgctgctgaagatggggtggcactacaagcagccggatcgtccggaatcagaagaggtcgcgaaagagaacaacggctacgcgctggcggatctctacgacgctaacggcgcgccgctggcgaagaaaggccagctgttgaacagcttcgcgctgctgcgcgatgacggtaccaccgcgtcgtcttgttggatctataccggcagctggaccgagcagggcaatcagatggctaaccgcgataacgccgacccgtcaggtcttggcaatacgctcggctgggcatgggcgtggccgctcaaccggcgcgtgctgtacaaccgcgcgtcggcggatatgaacggcaagccgtgggatgcgaagcgaatgctgatccagtggaacggcagcaagtgggttggcaacgatattccggacttcaataccgcgccgccgggcagcaaaaccgggccgtttattatgcagccggaaggtctggggcgtctgtttgccctgaataagctggcggaaggtccgttcccggaacactacgaaccgatggaaacgccgcttggtaccaatccgctgcacccgagcgtggtctccagcccggtggtacgcctgtatgaagaagatgccctgcgtttaggtaagaaggacaaattcccgtacgtcggcaccacctatcgtctgaccgagcattttcatacctggaccaagcatgcgcggctcaatgcgattgcgcagccggagcagtttgtcgaaatcagcgaaggcctggcgaaagcgaaagggatcgccaatggcgatcgggtgacggtcagcagcatgcgcggctttattcgcgcggtggcggtggtgacgcgtcgtctgcaaacgctcaacgtcaacggtcagcaggtggaaaccgtcggtattccgctgcactggggttttgaaggagtggcccgcaaaggttacatcgccaataccctgacgccgaacgtcggggattccaactcgcagacgccggaatataaggcgtttctggtcaacatcgagaaagcgtaa

SEQ ID NO: 172246 - DNA, 588 bp, Klebsiella oxytoca
atggacgtcagccgcagaaagttttttaaaatctgcgcaggcggtatggccggaacaacagccgctgcattgggttttgcgcccaaaatggccctggctcaggcgcgtaattacaagttgctgcgcgccaaagagatccgcaacacctgcacatactgctccgtgggctgcgggctattaatgtatagcctgggcgacggcgcgaaaaacgcgaaagaagcgatttatcacattgaaggggatccggaccatccggtgagccgcggcgcgctgtgcccgaaaggcgcagggctgctggactatgtccatagcgacaaccgtctgcgctatccgcaataccgcgcgccgggttcggataaatggcagctcatctcctgggatgaagcatttacccgtatcgctaaattgatgaaagccgaccgtgatgccaactttattgagaaaaacgagcagggcgtgatggttaaccgctggctgtccaccgggatgctgtgcgcgtcggcggccagcaatgagaccggcatgctaacgcaaaaatttgtgcgctcgctcggcatgctggcggttgataaccaggcgcgcgtctga

SEQ ID NO: 172247 - DNA, 879 bp, Klebsiella oxytoca
atggagaagaaaaaagccacgctaattggattcgccgccatcgtcctctggagcaccatggtcgggctgattcgtggcgtaagcgaagggcttggtccggtaggcggcgcggcgatgatctacagcctgagcggccttttgctcatctttaccgtcggttttccgcaaatacgtcagatcccccgcccttatttgctggcaggcagcgtgctgtttgtcagttatgaaatatgcctcgcgctgtcggtcgggctagccggaacccgccagcaggcgattgaagtgggcatggtcaattatctgtggcccagcctgacgattttatttgccattgtctttaacaatcaaaaaagcagctggctggttatcccggggttattgctggctttattcggcgtcacctgggtattaggcggtgagcatggcctgaacattgacgaaattatcagcaacgtggtttccagcccgctgagctatattctggcgttcgtcggcgcatttatctgggcggcctactgcacggtcaccgctaaatatgcacaaggcaaaaacggcatcactctgtttgttctgcttaccgccctgaccctgtggctaaagtttctgttcagcgaacagccgcccatgatctttagctggccggtaatagtcaaactgatcgcgctgtccattgccctgggcctgggctatgcggcgtggaacgtcggcatcctgcacggcaacgtcagcctgttagccgccgcctcctactttacgccggtgctctcctccgcgctggcggcggtactgctcagcgccgcgctctcgtggtcgttctggcagggcgccggcatggtgtgcgccggctccctgctctgctggcaggcgacccggcgctaa

SEQ ID NO: 172248 - DNA, 774 bp, Klebsiella oxytoca
atgcgatttaaccataaagtcgtggccattaccggcgccgcgcaggggattggccgacagaccgcagagcaagcggcgcgtgagggtgcgcggctgctattgattgaccgatctcgctatgttcacgaactggcggcggcgctgaacgccgccggttgccaggcgctggcgctggaagccgatcttgaacaatgggaaagtaccgagcgggcattcgccaacggcgtggcccattttggccacctggatgtattgattaacaatgtcggcggcaccatctgggcgcggccgtttgcggaatatcagccggatcagatagagaaggagattcgccgctcgctgtttccgaccctgtggggctgtcgggctgcgctaccgtggatgctgaagcagggcaagggcagtatcgttaatatttcgtcggtggcaacggcgggcgtgaaccgggtgccttattccgcagcgaaaggcggcgttaatgcgttgacccgttcgctagccctggaatatagcgcaaacgggatccgcattaacgccgtggcgccggggggcaccgaggcgcctgcgcgccggacgccgcggaatgaggagctgccgtcggcgcaggagcagacctggtatcagcaggtggtcgatcagacggtggcgagcagcctgatgcatcgctacggtacgctggcggaacaggccaatgccatcctgtttctcgccagcgatgaggccagctacatcaccggcgtgacgctgccggtcgccggcggcgacctcggttag

SEQ ID NO: 172249 - DNA, 1017 bp, Klebsiella oxytoca
atgacctttaatattgctctcaattttgaagacggcatcacccgctttattcaatgtcacgccggagagaaagttctcgatgccgcctatcgtcagcaggttaatctgccgatggattgttcggacggcgtttgcggcacctgcaagtgccgctgcgtcagcggcgaatatggtttgggcgatgagtatcttgaagaggcgctcagcgaagacgaagccgcagagcgcctggtgctgacctgtcagatggtgccatccagcgattgcgtcattgatgtaccggcggcggcagcccagtgcaagaccgcgctggcaagcctgggggcgacggtgaaagcggtcaatctcctttctgacaccgccattgagctggcgatcgtgctggatgagccgctggacttcctggcgggtcagtacatcaatattcaggttcccggcacgccgcaggtgcgcgcctattcgtttagctctctaccgggctcgcgtgaggggagctttctgatccgtaacgtgcccggcggcttgatgagtcagtggctgacgcagcgggccagtcccggcgatcgtctgacgctaagcggcccgatgggcagcttttatctgcgcagcggcgagcgtccgctgttgctgttggcggggggcaccggcttagcgccgctgctctcgatactgcaaacgctggctatgcaacgcagcgcccggcccgtcaccttgctctatggtgtgacccgcgacagagacctggtgaaaactgatgcgcttgaagcatttaccggccagcttcccgcttatcgctggctgccggtggttgccgatgcgcaaagccaatgcccgcagcgcggttttgtgaccgaccatcttaatgacgcaatactcaacgatggcgatgtggatatctatctgtgcgggccaccgccgatggtcaatgcggtatccacggcgctgcgcgagagaggcatttcgccggcggggttctggtatgaaaaattcatcgccagccagagtgcggcggcataa

SEQ ID NO: 172250 - DNA, 486 bp, Klebsiella oxytoca
atgctgactctcgaacaggttcgccagtttctctattacgaagcccgcctgcttgacgatcgccagtgggatgattggctgaactgctacagtccacaggtggtgtactggatgcccgcctggggggatgacgacaagcttacccgcgaccctcagcgcgaaatttcgctgatttactacccgaaccgcgatggcctcgaagaccgggtataccgcatcaaaacggaacgctcaggggccagcacgccggaaccgcgcaccactcatatgatcggcaacgttgagctgcttggcgaaaccgaacaggggatggaggtgcgctacaactgggtcacctactgccatcgctatcagcagacggatacctggtttggctctacctgctgcacgctgattgagaacgccggcaaaccgcagattatccgtaaaaccgtgcgcctgaataacgattacatccgtcaggtgattgacgtttaccacatttaa

SEQ ID NO: 172251 - DNA, 1383 bp, Klebsiella oxytoca
atgcaaaaaatgttcaccacattaaaagataaaatcaccaatgcattaattgtcgatcgtgaaaagcatatttatcgctgccatcgctcaatatttaccgatccgcagctatttgattttgaaatgaagcatgtttttgaaggaaattggttgttccttgctcatgaaagccagattgcgcagcctggagattattacaccctgactcttgggcgccagccggtaataataactcgcgacaaaaagaatgaactgcatgcgctaattaacagctgcgcccaccgcggggcgatgctgtgtcgccgtaaaaccggtaataaaagttcctttacctgtccatttcacggctggacattcagtaataacggcaagcttttaaaagccaaagatgaaagtaccggcggttacccggagactttcaagcatgaaggctcccacgatttaaagaaactgccgaggtttcaatcgtatcgcggcttccttttcggcagcctgaatgccgatgtacagccgctggaggcgtacctgggcgaaacctgcaaaattatcgacctgatcgttgaccaggcgccggaagggctggaggtgcttaacggatcatcgagctacgtttatgaaggcaactggaagctgggggcggaaaacggtgctgacggctatcacgttagcgtggtccactggaactacgcttccaccatgtcgcgccgcaactacgaagcggaagggacgcatgcggtagacgcaaacggctggtcgaaaagcgtcggcggcggttacggctttgacaatggacatatgctgttgtggacccgggtgctgaacccggaagtgcggccggtctacgaacatcgtgaacggctgcaggcggaattcggccagtcccgcgccgagcagatggtcaacgaaacgcgcaacctgtgcctctatccaaacgtctatctgatggatcagttttcgacgcagatccgcgtgatacgccccatcgcggtggataaaaccgaagtcacaatctggtgcttcgcgccgaagggcgaatctgaccatgcgagggcgctgcgtattcgccagtatgaggatttcttcaacgttagcggcatgggaacgcctgacgatctggaagagttcagcgcctgccagcgcggctatctcggtgagaatctggcatggagcgacctcagccgcggggcgctgcactgggtcgacggccctgacgaacacgctcttcaggcgggcttcaggccgcagctaagcggggtgaaatcggaagatgaagctttgtatatcgcccaccatcatcactggcaaaacgtgatgctggcggcgctggaaaaagagcagcagcgctacgagcaatcgatcacgcaacgcgtggaggtggtctga

SEQ ID NO: 172252 - DNA, 927 bp, Klebsiella oxytoca
atgagtaatgcattcgtacaacaagatgctgtgcaacatttattgcgtgaaagtgcaggtttaaatgcaaccggcggcgacgaacgttttaaaacgattgttcatcgtctgctggaaaacatctgcacgctgattgatgactataatgtcactgaagaagagttctggcatgcggtgaattatctgcatgaattaggcggccgccaggaagcggcactgctggcggcgggcctcggccttgaacacttcctcgacctgcgccaggacgctattgatgccgcagcgcagcgggaaaccggcactcctcgtactattgaaggcccgctgtacgtggcgaatgcgccgctggcagacgggcatacccgcatggatgatggtaaagatgcgggggaggtgatgtggctttatggccaggttcgcgacacccagggccacccgatagccaacgctatcgttgatatctggcatgccaataccctcgggaactactctttcttcgatcaaagccagagtgaatataatcttcgccgccgcattcgcaccggcgccgatggctgctatagcgtgcgcagcattatgccatccggctacggttgcccgccggatgggccaacgcaaaaactccttgacctgttggggcgtcacggtaaccgtccggcgcatatccatttcttcgtttccgcgccgggtcataaacatttgaccagccaaatcaatctcaacggcgacaaatacctgtgggatgatttcgcgttcgccacccgcgacggcctgattgccgatccggtaaaagtcagcgaccgcgagcttattcagcagcgtgagctggaaggcgaacatactgaagtgcgctttgattttaccctgtgcaaagcacttaacgccgatgaagaacaccgcggtacgcgcctgcgcgcgcaggagtag

SEQ ID NO: 172253 - DNA, 291 bp, Klebsiella oxytoca
atgctatttaaagtcgatatgaccgtgaatattccgctggggtttcctgccgacgaaattgaggaaattaagcagcgagaaaaaaagtattcacaacaacttcagcgtgaaggtaaatggcgacatatctggcgcgtcgccggactttacgccaatgtcagtattttcgatgtaaaagatgctgaagagctgcatcaaattttaatggctctaccgttatatccctttatgcaaattcgcgtggaggcgctctgtcgtcatccctcctcgattcgcgaagacgaccgttaa

SEQ ID NO: 172254 - DNA, 1119 bp, Klebsiella oxytoca
atgaccgcgaccattgaacgtattgaaagctggctggtagatatcccgaccattcgaccgcacaaactctccatgaccacgatgggctgtcagacgcttgcgatcgtccgcatcacccgttcggacgggatttgcggtattggcgaagccaccaccatcggtggattgagctacggcgtggagagcccggaagctatcgtttcggcaattaaccattacctgatgccgctgctgaagggccagcctgccgataatctcaattccctgaccgcgcgaatgaacggcgcggttaaaggcaacacctttgccaaatcggcgatcgaaaccgcgctgctggacgcgcagggaaaggcgcttggcctgccggtttccgcgctgcttggcggcgcgctgacgacctcgctgccggttctctggacgctggcgagcggcgacaccgagaaagatattgccgagggggaaaggctactcgcggagcgtcgccatcgggcctttaagctaaaaatcggcgcgcgcgagctggcgactgacctgcgccatacccgcgcgattgttgaagccctgggcgatcgggccagcatccgcgtcgacgtgaatcaggcgtgggaagccaccgtcgcggcaaagggctgccgcgagctggcggcgatgggggtcgatttgattgaacagccagttagcgctcaggataacactacgctggtgcgcctcagccatcacatcggcacggctattctggccgatgaagcggtagcgacccattacgaaggctatcgcctggcgcagcagggattcagcggggcctatgcgctgaagattgccaaagcgggcgggccaaacagcgtgctggcgctggcgaaggtggcgcaagcggcgggaattgggctttacggcggcacgatgcttgaggggaccgttggcaccctggcctcgctgcacgcctggtcgacgctccccctacagtggggcagcgagatgtttggcccgttattgctgaaggacgatattgtcagcgtgccgctcacgttcgccgaaggcgaagtgacgctaccgcaaacgccgggtcttggcgctgaactggatgaagacaaactgcgcttctatagccgcaaaggataa

SEQ ID NO: 172255 - DNA, 798 bp, Klebsiella oxytoca
atgagcgaaaaaaaaccagatactctcagcgtccgccagtctgaacacgaccctaactttatgctgtccctggcgcgcgggctggaagtccttaacgcgtttaccccacagcggcagcgcctgaccatttcccagcttagccaaaaaacgcagatctcccgcgcggctgtgcgccgctgcctctataccctcgccgcgctgggaatggtgcatagcccggatggccgcagctatgagctactcccccgcgtgctggcggtgggtcacgcttacctggccggaacgccgctggcgaaagtcgcgcagagcgccctggataatctgggtaaaaacctcggagaatcctgctccgccgccacgctggacggcgataacgtcctgtatattgccagagcggcggtgaataacctgctcagcgtagatatcggccgcggtagccgtctgcctgcgtgggccacgtcgatgggacgcgtgctgcttagcgcgttgccggaagaacagcttgaagtgacactgtcacgagccagcttaatccgctataccccgtatacgctatgcgatctgccgggtttacggcaggaaatcgccagagtgcgtatgcagggctacgcgctcgctgaccggcaaattgaggtgggattatgttcgctggcggtaccgctgctttcccgcagcggtcaggtggtggcggcgcttaacgttggcgttccggcaggctataccaacgccgccgcgctgaaggagaaagccctcgccccgctacggcgggcggcgatggcgctttctcttcagctgtaa

SEQ ID NO: 172256 - DNA, 1491 bp, Klebsiella oxytoca
atgtctcggcaatggttgacgctgatggcgattttgctggtttatattccggtggcgattgatgccaccgttctgcacgtggccgcgccaacgcttagcgtagcgctggggaccagcggcaatgagctattgtggattattgatatttactcgttggtgatggccggcatggtgctgccgatgggcgcgctgggcgataaaataggctttaaacgcctgctactgctcggcagcgctatttttggcgccgcctcgctggcggcggcgttttcgccgacggccgaaacgctgattgcgtcccgcgcgctactggcggtaggggcagcgatgatcgtcccggcgacgctcgccggtattcgcagcacttttgcgctggcgcaacagcgtaatatggcccttggcctgtgggcggcggtgggttccggcggggcggcctttggcccactgatcggcggcatgctgctggaacatttttactggggctcggttttcctgatcaacgtgccgatcgtgctgctggtgatagcgattaacgccaaagtggtgccgcgtcagcccgcacgacgggaacagccgctgaatctattccaggcgctaatcctgatcgccgccatattgatgctggtattcagcgctaaaacggcgcttaaagggcaaatggcgctgtggttaaccgggctggtggcggttgctggcgccggtatgttgttctggttcgtgcgcaagcagcttatggcgacgcggcccatggtcgatatgcgactgtttacccatcgcattattttaagcggtgtgatgatggcgatgacggcgctgatcacgctggtgggctttgaacttctgatggcgcaggagctgcagttcgtgcatagcaaaacgccatttgaggccgggctgtttatgctgccggtgatggtggccagcggttttagcgggccgattgccggcatgttggtttcgcgcctggggctgcgcgaggtggcaaccgggggaatgctgctcagcgcgctgagcttcctcggcctgtcgatgaccgatttcagcacccagcagtggttagcctggggactgatgacgctgctgggctttagcgtcgccagcgcgctgctggcttccagctctgccattatggccgcagcgccgaaggagaaagcggcggcggcgggggccatcgaaactatggcctacgagctgggggctggtctgggcatcgccctgttcggtctgatattgacccgcagctacacctcatcgattgttttgccgtcgggcgttgacggcgcagcggcggagcaggcgtcctcctccatcagcgaggcgattaagctggcgcagtcgatgccggctattcctgcgcaaaacctgctcgaagcggcgaaggcagcgtttattcattcgcacagtatcgtgctggcgacggccggtgtcctgcttctgctgctggcggctggtatctggcgcagtctggccagggcgccggagctgaattaa

SEQ ID NO: 172257 - DNA, 576 bp, Klebsiella oxytoca
atgagctacttaaatcgcgatgcgcgacgggaagttattgtactggcagccatgcgcgtagcgcttagaggcggattcagcgccatgaccgtgcgccagattgccgccgaagccggcgtctccgccggtcaactgcaccaccatttcacttcagcaggcgagctgaaagcccatacctttgtacgccttatccgtgaaatgctggacatgccgctggtcgctgacgacgccacgtggcgggaacgcctgttttccatggtgggcagcgacgacggcaagcttgagccctatattcgtttatggcgcgaagcgcagctgctggccgacagcgatagcgatatcaaaggcgcatatctgctgacgatgagtatgtggcatgaagagacgctgaaaattattcagcgcggaaccgaagcgggcgagtttacgccaaaagaccatgcggaaagtattgcctggcggctcattgcgctggtatgtggcctggatggtatttacgcgctgggtatggaggaaatagatgacgccacctttaaccggcatatcaattattttatttcgatggaactgttctga

SEQ ID NO: 172258 - DNA, 1389 bp, Klebsiella oxytoca
atgctgagcaaaaatgagaaaaagaatcattatcttttaagcgagtggaaacctgaaaacgcggcattctgggaaaataagggaaagaaaatagcccgcagaaatctttgcatttccgtagcttgtctgctactcgccttttgcgtttggatgttatttagcgccgtcgcggtcaacctcaataaagtcggttttaatttcactaccgatcaactctttttattaaccgctctgccttcgctttccggcgcgatattacgcgtgccctactcctttatggtacccatatttggcgggcgctactggacggtattaagtacgattattctggtggttccctgcatctggctgggaattgccgtgcaaaataccgctaccccattttgggtatttatcattattgccttactgtgcggatttgccggtgcgaactttgcttcaagcatgggaaatatcagttttttcttccccaaagcgaaacagggtagcgcactggggattaacggtgggctcggcaacctcggcgtcagcgtgatgcagatgatcgcgccggcggtgatttttctgcccatctttgcttttctcggtgttcatggggtgcctcaggaggatggatctcttctcgcccttagcaacgccgcgctcgtctgggtaccgctgctggcgatcgccaccttcgcagcctgggtgggaatgaacgatatcgccagctcgaaggcctccattcgcgagcagctgccggtactgaagcgcccgcatatgtggctgttaagcctgctctaccttgccacctttggctcgtttatcggcttctccgccggttttgccatgctggcgaaaacgcagttccccgacgtgaatattctgaagctggctttcttcgggccgtttatcggcgcgctggcgcggtcatttggcggcattatttccgaccgtctcggcggcgtgcgggtcacgttgatcaattttatcttaatggcgctgttcaccggcctgctgttcctcaccctgcccggcaccggctccggcagctttctcgccttttacgtggtgtttatgggactgttccttaccgccggtctcggcagcggttccaccttccagatgatcgccgtgatcttccgccagataactatcgacagcgtgaagaagcgcggcggcagcgatgaacaggctcagcacgaagcggtgaccgacaccgcggcggcgctcggttttatctccgctatcggcgccattggcggcttctttatccctaaagccttcggcacctcgctggcgctgaccggctcacctgtcggggcaatgaaggtcttctttgttttctacgtggtttgtgtgctggtgacctggctggtctacggccgtcgtaaaccggcaaaaaaataa

SEQ ID NO: 172259 - DNA, 3741 bp, Klebsiella oxytoca
atgagtaaactactggatcgctttcgctactttaaacaaaaaggcgagagctttgccaacggtcacggccaggtatacaacaccaaccgcgactgggaagacagctatcggcagcgctggcagttcgacaaaatcgtccgctcaacccacggcgtgaactgtacgggctcatgcagctggaagatttacgtcaaaaacggtctggtcacctgggaaacccagcaaacagactacccgcgaacccgcccggatctgcccaaccacgaaccccgcggctgcccgcgcggcgcgagctactcctggtacctttacagcgccaaccgtctgaagtatccgctggtgcgcaagcggctgattgcgctgtggcgcgaagcgctggctcagcacgccgatccggtgcaggcgtgggatagcattatgcaggacccggttaaaaccctcagctacaagcaggtacgcggcaaaggcgggtttatccgctcaagctggaaagagctgaatcagctgattgccgccgccaacgtctggaccatcaaaaactacgggccggaccgggtggcgggcttttcgccgatcccggcgatgtcgatggtctcttacgccgcgggtacccgctatctgtcgctgcttggcggcacctgtctgagcttctacgactggtactgcgaccttccccccgcctcgccgatgacctggggtgagcaaaccgatgtccctgaatccgccgactggtataactcaagctatatcatcgcctggggctcaaacgtcccacagacccgaacgccggacgcccacttttttaccgaagtgcgctataagggcaccaaaactatcgcgattactccggatttttcggaagttgccaaactcagcgatcagtggctggcgccgaaacagggcaccgacagcgcgctggcgatggcaatgggccatgtgatcctcaaaacgtttcaccttgataatcccagcgactatttcctcaactactgtcgcacctataccgatatgccgatgctggtgatgcttgagcgccgcgaggagggtttctacgttcccggcaggatggtccgcgccgccgatctggtcgacgatttgggcgaaaacaacaacccggagtggaagaccgtcgcctataacagcgctggtgaactggtggcgcccaacggttcgattggcttccgctggggagagaaaggcaagtggaacctcgaacagcaggccgccgggcaaaccattgaactcaaactatcgctgctggatagccgtgacgacgtggtgacggtgggctttccctacttcggcggcaacgaaaacccgcactttcgcagcatcaagcaggatccggtgacgctgcatcaactgccggttaagcagctcccgctggccaacggtgaatccggcctggtggtcagcgtttatgatctcatcctcgctaactacggactcgatcgcggtttagacgaccccaacgccgccagggactttggcgaaatgaaagcctataccccggcgtgggccgaacagatcaccggcgtcccgcgccagcacatcgagcagatcgcccgcgagttcgccgataccgcgcataaaactcacggacggtcgatgattatcctcggcgccggcgtcaaccactggtaccacatggatatgaactaccgtgggatgatcaatatgctggtgttctgcggctgcgtcggccagagcggcggcggctggtcgcattatgtcggccaggagaaactgcgtccgcaaaccggctggctgccgctggcgttcgcgctggactggaatcgtccgccgcgccagatgaacagcacctcctttttttacaatcacgccagccagtggcgctatgaaaagctgaccgcccgggagctgctgtcgccgctggccgaccccagccaattcagcggccatctgatcgattttaacgttcgcgccgagcgcatgggctggctgccttccgcgccgcagctgggggttaacccactgaccatcaaggcgcaggccgccgcagccggactgccccccgccgactacaccgcccgggcgctgaagtccggcgagatccgcttcgcctgcgaacagccggataacggcaaaaaccatccgcgtaatctgtttatctggcgctcaaacctgctgggctcttccggcaagggccatgagtatatgctcaaatacctgctggggaccgacagcggtattcagggcgaagagctgggggctaccgatgaggtgaagccggaagaggtggagtggcaaaccgcggccattgagggcaaactcgacctgctggtgacgctcgactttcgcatgtccagcacctgtctgttctccgatatcgttctgccaaccgccacctggtacgaaaaagacgatatgaacacctcggatatgcatccctttattcacccgctctccgccgccgttgacccggcgtgggaggcaaaaagcgactgggaaatttacaaagatatcgccagaaccttctctgaagtctgcgtcggccacctcgataaagagaccgacgtggtgctggtgccactgcagcatgactccccggcggaactctctcagccctttgacgtgctggactggcggaaaggcgaatgcgagctgacgccgggtaaaaccgcgccgtcgattgccgtggttgagcgcgattatccggcgacctatgagcgctttacctccctcggcccgctgctcgacaaactcggcaacggcggtaaaggcatcacctggaacacccagaacgaggtcgatttcctcggcaagctcaactacgtcaagctggatggcccggctaaaggccgcccgcgcatcgacaccgccatcgacgcctcggaagtgatcctcgccctcgccccggaaaccaatggccaggtggcggtcaaagcctggcaagcgctcggcgaatttaccggccgcgagcacacgcacctggcgctgaataaagaggatgaaaaaatccgcttccgcgacattcaggcccagccgcgcaaaattatctccagcccgacctggtccggcctcgagagcgagcatgtgtcgtacaacgccggctataccaacgtccacgagctgatcccctggcgcaccctttccggccgccagcagctctatcaggatcacccctggatgcgcgcctttggcgaaagcctggtggtctatcgtccgcccattgacacccgcagcgtcagccagatgaaagcgatcccgcctaacggctttcctgaaaaagcgctcaactttctgacgccgcaccagaaatggggcattcactccacctacagcgaaaacctgctgatgctaaccctgtcgcgcggcgggccgatcgtgtggatcagcgaaaccgatgctcgcgaactggggattgaagataacgactggatcgaggccttcaacgccaacggtgcgctcaccgctcgcgcggtggtcagccagcgcgtaccgccggggatgaccatgatgtaccacgcgcaggagcgtctgatgaatattccgggctcggaagtcaccggacggcgcggcgggatccataactcggtgacccgcgtatgcccgaaaccgacccatatgattggcggctacgcccagctggcttacggtttcaactattacggcaccgtcggctccaatcgcgatgagttcatcatgatacgcaaaatgaaaaatattgactggctggatgacgaaggtcgcgacggggtacaggaggcgaaaaaatga

SEQ ID NO: 172260 - DNA, 1545 bp, Klebsiella oxytoca
atgaaaatacgctcacaggtcggcatggttctcaatcttgataaatgcatcggctgtcacacctgttccgtcacctgtaaaaacgtctggaccggacgtgaaggaatggaatacgcctggtttaacaacgtcgaaaccaaaccgggcatcggttatccaaaaaactgggaagaccaggaggtgtgggaaggcggctgggtgcgcgacgttaatggcaaaatacgcccgcgtctgggcggcaaaatgggcgtcatcaccaaaatcttcgccaatccggtgataccgcaaatcgacgattattatgagccttttacctttgattatcagcacctgcacaacgcgccggaggggaaacatttgcccaccgcccgtccgcgctcgcttatcgacggtaagcggatggataaaatcatctgggggcccaactgggaagagctgctcggcggcgagtttgaaaagcgcgcccgcgaccgtaacttcgacaagattcagaaggagatgtacggccagtttgaaaacaccttcatgatgtatctgccgcgcctgtgcgagcactgcctgaatccgagctgcgtcgccacctgcccgagcggcgccatctacaagcgtgaagaagacggcatcgtgctgatcgaccaggataaatgccgcggctggcgtctgtgcatcagcggctgcccgtacaaaaaaatctacttcaactggaaaagcggtaaatcggaaaaatgcatcttctgctacccgcgtatcgagtccggccagcccacggtctgttcggaaacctgcgtggggcgtatccgctatctcggcgtgttgttgtacgacgccgatcgcattgaagaggccgccagcaccgagcgcgaaaccgatctctatgagcggcagtgtgaggtgttcctcaatccccacgacccggcggtgattgaagaagcgctgaaacaggggattccacaaaacgtgattgatgccgcccagcgctcgccggtgtacaaaatggcgatggactggaagctggcgcttccgctacatccggaataccgcaccctgccaatggtctggtacgtgccgccgctgtcgccgattcagtcctacgccgacgccggcggcctgccgaaaagcgacggcgtgcttccggccatcgaaagcctgcgtattccggtacagtatctcgccaatatgctcagcgcgggcgataccggcccggtgttgcgcgcgctgaagcgcatgatggcgatgcgtcattacatgcgctcgcaaacggtggaaggcgtcacggatacccgcgccatcgaggaagtgggcttaagcgttgaacaggtcgaggagatgtaccgctatctggcgatcgccaactatgaagaccgtttcgtgatcccgaccagccaccgcgaaatggcgcgcgacgctttccccgagcgcaacggctgcggctttacctttggcgacggctgccacggctccgacaccaaattcaacctgttcaacagtagccgtatcgatgccatcaacatcaccgaagtacgcgataaagcggagggggaataa

SEQ ID NO: 172261 - DNA, 696 bp, Klebsiella oxytoca
atgcaaatcctcaaagcgatcggcctgctgatggagtacccggatgagtttctttggcagtgcaaggaggaggtgctggccatggtgcggcacgacgcccccatgctcaacgacttcgccgctgagatgctgaatgccccgctgctggacaagcaggccgaatggtgcgaagtgttcgaccggggccgcgccacgtcgctgctgctgtttgaacacgttcacgccgagtcccgcgatcgcggccaggcaatggtcgatctgctcgctcagtatgaaaaggcgggcctggtgctcaactgtcgcgaacttccagaccatctgccgctgtatctggaatacctcagcatcctgccggaaaacgaagcgcgtgaggggctgcaaaacgtcgcgccgattctggcgctgctgggcgggcggctcaagcagcgcgaggtagcgtggtacccgctgtttgacgccctgctgagcctcgccgggagccccctctcaagtgacagtgtcacgcagcaggttaacaacgagtcccgtgatgatacccggcaggcgctggatgcggtctgggaagaagaacaggtgaaatttatcgaagataacgccacaacctgtgacagctcaccgttacagcaatatcaacgacgctttagccaggacgtggcgccgcagtacgtcgacgtcagcgcgggaggcccgaaatga

SEQ ID NO: 172262 - DNA, 681 bp, Klebsiella oxytoca
atgatacagtacctgaacgtctttttttacgacatctacccctacatctgcgcgacggtcttttttctcggcagctggctgcgctatgactacggtcagtacacctggcgcgcctcctccagccagatgctcgataaacgcgggatggtgatctggtcgaatctttttcatatcggcatactcggcattttctttggccatctgttcggcatgttaacgccgcactgggtgtatgcctggtttttaccgattgcggtcaagcagcagatggcgatggtgctcggcggcgtctgcggcgtcctgacgctgatcggcggcgccggtttgctctggcgtcgtttgaccaaccagcgcgttcgcgcgacctcgaccaccccggatatcatcatcatgagcattctgttgattcagtgcctgctcgggctgagcacgattcctttttcggcgcagtatcctgacggcagtgaaatgatgaagctggttggctgggcgcaaggcatcgtgaccttccgcggcggctcgtctgaaatgctcagcggtgtcgcctttgttttccgcgtacatctggtactgggaatgacgattttcctgctgttcccgttcacccgtctggttcacgtctggagcgcgccgtttgaatatttcacccgccgctaccaggtggtacgttcaagacgctga

SEQ ID NO: 172263 - DNA, 348 bp, Klebsiella oxytoca
atgaagacacagcgcaaattctaccgaattgccttcggaatagttggttttttattactcacttatattagagtgcaattaggttacaatcctctcaacccactccttgacgatttatgttttttagctgcagggtatgttttcatctattttgttatattttcactgattgaatccggtgtggaaaagatgggctccttccatcaaaaatacaataaagacaacctgcataaacaacctcttaagtgtttcatgcagcatcaatcgacagtcgctggaggatacaaactggtttttaatcttgggtatattttaatcacttacctgatattaaaacaacacctgtga

SEQ ID NO: 172264 - DNA, 846 bp, Klebsiella oxytoca
atgagtccctttttaagcgcctatttttctcgtctgggctggacgggcaccccgggtgtttcacttaataccctgcgcgaattgcatattcaccataacggcgcgatcccctttgaaaatctggatgtgctgctgccaagagagatacatctcgacgatcgcaccctggaagataagctgattcacggtcgtcgcggcggttactgcttcgagcaaaacggcctgctggagagagcgctgcgcgaaattggtttcaatgtgcgcagccttctgggccgcgtggtgctggccaatccgccgcatatgccgccgcgtacccatcggctgctgctagtggacgtggagggcgaacgctggattgctgacgttggtttcggcggccagaccctgaccgcgccgatcaagctgctggccgatgtggaacaagcgaccccgcacggtgagtatcgcctgatctacgaaggggaagagtggaccctgcagttcagccatcacggccactggcagtcgatgtaccattttgacttaggtcgccagtacgcttccgactatgtgatgggcaacttctggtcagcgcactggccgcagtcgcacttccgccatcatctgctgatgtgccgccacttaccggatggcggcaagatgacgctgaccaatttccactttacccattgggataaaaaccatgtggtcgaaaagcgggatttagcggatgttccggcgctgtatgaagcgctgcaaacgcgttttggcctcggcgtggatgatgccaaatatggcttcagcgaagcggaactggcggcagtgatggcggcgtttgatacccatcccgaagccggaaagtag

SEQ ID NO: 172265 - DNA, 1656 bp, Klebsiella oxytoca
gtgaaacagagacttatttcagcgggcacgctggcggcactgctggtgctggtggcgttgccgctgctctttatcgtcctccaggcgatttttccccggtttagcgccggctcgctgagcggcgcgtttagcggcgtgtcaacgctgattgccgacccgcagctgcctacgatgctcggcggtaccctgtgggtggcctgcggcgtggcgctgatgagcgtggtcatcggtctaccgctgggcgtcgtgcgcggattgtttactatcccgctgccgcgactgtgggatctgctctttctgatcccctttctgacgccgccatacatcgcggcgctgtcgtggatgctgatgctgcaaagcaacggctatctgcagcagctgaccggctgggatcttaacgatctgctttttagccgttccgggattgtgctggtgatgacgctcaatattttcccggtggtctattttgccgtttcgcgcagcctgctggcgagcggtcagcggttggcgattgtcgcccgggtgcacggcgccagcgcctggcgggcgttctggcacatcacgctgccgatgctctcgccggcgctggcggcggggatgctgttggcgtttaccctggcgattgaggaatacggcgttccggcggccctcgggtcgcgggcggggctggtcatgctgaccgtaggcattgagaaaaagcttgccgactggcctgtcgatctgcccggcgcatcgctgctgtcgctgctgctgatcgcggtggcgctgctggcctggtggctgcaaaaacggctgactggcggtaaagaggtcaccagcgtcaccggcaaaccgggggagaatagcggggcggagctgggctggctggcgcttccggcgatgctagtgatggcgggcgtcggtgggttggcggtggtgctgccgggcgcgtcgatggtgctgaccagcctgatgagcacgctgtcgggcggtatccacgctgacaacgttactcttcgccattttgccgcgctgtttgctcagcagggcgatgcgctgtcggcgctggcaaccagcctttcgctggcgctggcttcggctggggttgttgggctggtggggctgctcgccgcctggctggttgtggtgcaaaaaatcaaggggagcgcgatagtcgatgccttatcgctgctgccggcggcgctgccgggcgtggtggtaggcgtcgggttgattctgttgtggaatcagccgttctggccgctttccccctacaacagctggtttatgctgctgctctcctacagttgtctgctgctgccctggccggtacgctacgtcggcagcgcgctgcgccagcttggcaataatcttgagcctgcggcaagggtacatggggcgacggccctgcaggcgctgcgtctgatcgttctgccgctggtcttcccggcgctgctggcggcgatgctgatggtgttcgccgtcgcctcccgcgagctggtaacttcgctgctgctcgcgccagccgggacgcaaaccgtcgcggtgtttatctggcgccagtttgagcagggctcggcggggcagggaatggcaatggcgtcgctgacgctgcttaccggtctcgggctgatgctcagcgcgctggcgctgatgcagcgaggcacgcgcggataa

SEQ ID NO: 172266 - DNA, 969 bp, Klebsiella oxytoca
atgaaaaccgttatcaccgttaccaaaggagctgcgctcgcgatgatgctgtccgccaccacgatctcctgcgcccacgcgctcaccgtctacaccgccgggccgggctcgctggcgaaaagcctcgccagcggttatgagaagaaaaccggggtgaaggtgaatattttccaggctactaccggtaaggtgatggcgcgtcttgaggccgagcaggccaacccgcaggcggatgtgctgatttccgcttcgtgggatacggcggaggatttgcatcaccgcggctggctgctgccatatcagagcagcaacgccgataaggtgccggagaacctgaaatccgccgattacgttgcccaggggatttcggcgctggggatcgtctggaataccaaaagcggcactccggagccgaaagagtggcgcgacctgaccgaagcggcgttcaaagacaaagtgacgacgccggacccggcgctttccggtgcatcgctggatttgctgatcgggttacagaatggcatgggcgaccaggcctgggcgctgtttaaagacttgaagaagaatggcatggcggtcagcgggccgaatgcccaggcggtgacgccggtgatgcagggcgcgaaagcggcggtattcggcgcggttgattatgtctcttacggcaatatccatcagggcgaatcgctaaaggtgattttcccggccagcggcacggtgattgcgccgcggccgatgatgatcctcaaaaccagcccgcatgctgacgatgcaaaggcctttattgattatgtgctgtcaccggaaggccaggcgctggtcgccgacgcctggcttatgcccgcccgcagcgatattccggcgaagcgcccgctgctcaacgagctgaaaattctgccgaccgccggcgaaggcactagcgaacgtagtgcggtgctttcccgctttaatacgcttttcgcccagtaa

SEQ ID NO: 172267 - DNA, 702 bp, Klebsiella oxytoca
atgcgcgcgcttaccagcattaagctcgacggcgtttctttcgccttcggcgcccacaccgtgcttaatcagatcgatctgcacatcgatgcgggcagcatcgtggcgctgctcgggccttctggctgcggcaaaagcacgctgctgcgcctgctcgccggattaaccgtacccgccagcggcagcattcacttcggcgatcggctggtggcgaaagccggctggggtatgccgccggagcagcgcgatctcggcatggtcttccaggattacgccctgtggccgcatatgacggcggcgcagaacgtggcttttccgctgcgtatgcgcggcgtcgggcgtcagcagcgacagcaacgggtcgaggaggcgctggcaatggtcggtctcagcggcttcgccgagcgtaaaccgtcgggcctttccggcggacagcagcagcgcgttgcgctggcccgcgccatcgtcgcagaaccgcgcgtgctgctgttcgatgagccgctctccaatctcgacagcgagctgcgcgagtcgctgtgtctcgaaatgagccgcctgctgcgccagctgggcatcactgccgtctacgtcacccacgaccgtcgcgaagccgagctgctggccgacaagattattcatttatctgcgggctgcgttgccgctgtccgcgccgtgacttcaacctcaggggaatccgtatga

SEQ ID NO: 172268 - DNA, 582 bp, Klebsiella oxytoca
atgagccgttttcgccacgtggaactccagtacgccagtcgcctgctcaaccatggcccaacgattttaataaccagctacgacgcccatactcagcgccgcaacgttatggccgccgcatggtcgatgccggtggagttcgccccgccgcggctggctatcgtggtggataaaagcgcctggacgcgggaaattattgagcgcaacggcacgttcggcatcgtcgtcccgggcgtcgaggccgccagctggacctacgcggtcggtagcatcagcggacgcgatgaggataaatttaacgcttacggtattccggtggtgcaaggtccggagctgggcttgccgctgattgaagagaagtgtctggcgtggatggagtgccgactgctgccggcaacggcggctcaggagcagtacgatacgctgtttggcgaagtggtttccgccgccgccgacgaacgcgcgtttgtcaccggacgctggcagttcgacgatgataagatcaataccctccatcatctcggcaccggcaactttgtcgccagcggccgccacgtccgcgccaatacgccagaagagtag

SEQ ID NO: 172269 - DNA, 825 bp, Klebsiella oxytoca
atgatgatgttgaccgttgagtattatttcacccatccgcaggataagctgggcatgtacgccagcgatccggaagataatagccatgaacatagtcatgaatttgctgagctggtgatcgttgaggaagggcacggtttacatgttattaatggcagaccactatatattcaacagggcgacgttttttacgttcagccgggtgacgttcattattatgatgagctagggacgcttaagttaattaatgtgctgattaacccgttggtagggtttcattatttacagcctctcgatactttattacagactttctctgcgcagaatgcgtcctgctacggttggctggcgccggacacccgccatatctgcaaggaactggtggataagatattttctgccgagctgcggcaggggcaaaatattgccctgcgcgaagccgcgtttttccagctggtgacgacgattctgcatgccgaaaccgaagccgaatatagcaccactaaatataagctgcataaattgctgacctggctacaggagcactgttttgaagatcataactggcagcagctggcggagaaattccatctgaccacgcgtaccgcttttcgccatattaaagaggcgacgggattgacgccggataattatttaaagcgtctgcgcttagtttcggcgcgcgtaaaattacgcgagaccgatatgacgattaccgaagtggcttatctatgcggctttgccaacagtaatcactttaccactttatataaaaaggtttttggcctgacgcccagcgaagaccggcggcgtttgcagcgctag

SEQ ID NO: 172270 - DNA, 1572 bp, Klebsiella oxytoca
atgtcacaggcaattcagcataattctcaggtctcgatgacccgccacccggattttctacgcaccgccgagacgctccggcccgcgctacgccgccaggcgtacccgccgatcgccgtggtggaagcccacgccgacgccacggcgctgtttggctggcgcgccgaaccggtaagttccccggccgcgttttaccagcgcgagctgagcagcggcgatagcgtcattattgattttggcagccactttgttggctacctgcattttctctgtcagagcgtcgggagcccaccggacgctccggcccatctgcagttcaccttcggcgaaacgctgagcgaagtgtgtgagccgttcagcgattaccagggctggctaagcagcagctggctgcagcagcaggatctgtggcttgatgtcctgccggccgaagttgatctgccgcgccgctactgcttccgctatctgaaggtggaggtcaaagccgtgtcgcgcaagtttcgtctgcagttcaaccagattcaggtgaatgccgttacctccgccagcggcgcatgcccggcagcgacaaccgccgacccgcagctcaaggccatcgacagcgttgccgttctgaccctgcaaaactgcatgcaggaggtgtttgaggatggccccaaacgcgaccgccgcctgtggctcggcgatttacgtttgcaggcgctggtgaacgatgtgaccttcgcccgtcacgatttagtacgccgctgcctgtaccttttcgccgggcatactcgtgaggacggtatggtatcggccaacgtgttcgtgcagccggatgtcattgctgacgatacctttctttttgattattctctattttttgttgacgttctctacaactatctgcaaagcgcggaggatattgctacggcccgcgagctgtggcccacggcccgtcgtcagattgaactggcgctgaaacgctgcgacgcctacggggttgtgcgcgatagcgacgactggtgggtgtttatcgactggcaggcatcgctgaataaacaggctgcagcgcagggcgtgctgatttactgcctgcagcgcgccgtctggctggccgagcgtttcgaacctgagctggccgtcagctatcgccagcgtttacagcagcttaaagctgcggccctcgatgtcttatgggacgagcagcaaggcttctacatcagcggcgagcagcggcaggtctcatgggcatcgcaaatctggctggtactggcggaagtcggtactcctcagcagcgccgggagatcatgcataatctggagcaaaatccccccgcgatcgccatgaacacgccatacctgcgtcaccactatattgccgcccttctgcagtgcgggctgcgcgacgacgctattgcgcagatcaaagcctactggggagcaatggtcgactacggtgccgataccttctgggaaatcttcgacccggcgcatcctgatttttccccttatggcagcaagctgataaacagttattgccatgcgtggagctgcaccccggcctggtttattcgccagtacggactttaa

SEQ ID NO: 172271 - DNA, 1383 bp, Klebsiella oxytoca
atggcagaaacaacctttaccctttggcggcagcgccttggctatggcatcgccgacctctcctgcaaccttgtgtggcagatgatctctctttatctgatgttcttttacaccgatgtgatgggcctgcccgcttattacgtaggcctgatgttcctcgtgacgcgcctggtggatggcgttgccgacgtgctaatggggctggttatcgacaataccgccacccgctgggggcgctgccgtccgtatctgctgattggcgcgatccccttcggactgctgtgtattctggccttttacgtgcctgattttggcactaccggtaagctgatctacgcttttgtcacctatctgtgtctgtcgtttctctataccctcgttaatattccattctgcgccatgctgccgtttctgacgaacgactcgcgggagcgcacgacgctgtcggcggtgcgcattctgctcggctcgctcggcgcgactattgtcgcggtcgccactctgccgctggttggcgcgctggggaaaggcaatcaggagcacggcttcttctatacggcggtgattttcggcgttattgccaccttttttctgctggtgagcttccggaacgttaaggaaaatatcagtattactcaggagcgcatgaccttaaaacgcgcctgggtcagcctgcgcgccaaccgaccgtggttcgtcttcgccatcaatattttcctgatgtggggcgcgtttttcttccagaccggggcgctggtctacttcttccattattacgtcggtaataacgatctcacggcgatcgtcgccgggatctccaccttcgttcctctgctgggtaccctcaccgttccgctgctcgccagccggatgaaaaagcgccacgtctatctggtcgccagcgcgatcaacctggtcggcatgggcatgatgatggcggcaggcgttaacagctggggtctggttgccggagcggtcgtactctcgcttggcgccggacagcgcacggcaatttacttctctatgcaagccgatccggtggattacggagtatggaaaaccggcatcaataccgccggcattttgacctctatcaacggctttcttggcaaggtggcgatggcgggcgcgggagccattaccggggtcctgctctcatccggcggttatatcgctaaccagacgcaaagcgacggcgcgatgctggcgataaaagcctgctacctctatatcccggcgctgctgattgtggcttcaatgctgtggattggtcgcttctaccgactcgacgaccagtacgagcagatccgcgccgaccttgacgctggacgccgtgcgccgtcgaacccatcgtccgttgctggagaaaaccacgccctgtaa

SEQ ID NO: 172272 - DNA, 1605 bp, Klebsiella oxytoca
atgcgtatctctttgattagcgcagcggtttgctgcgcccttttttcggcttacggcgcgagtgcggccccgctcaccgtcgaacaacggctagcgcagctggaggcccggcttaatcatgcggagcaggaggccggagaggccaaacgtcgggcgcagcaggcggagctgcgcaccagcgccgcggaacaacgcgcggcggcagcggaaaagcaggtgcagaccctcagtcagcgcaccgcagcgaccgagcaaaagcagcaggctgctgacaaacagctggcgaaaagcagcctcagcgatggcttcgagttcaacgcctacgcgcgctccgggatgctggttgacagccatggtaaaggcgcgcgcggcggcccgggtgtctccccggccagttcgctcaacggcgatgcccacgttggccgtctcggcaacgagaaagataactacgtggagctcagcttcggcaaaaaaatgaccttcagcgacgggtcatgggcgcactttaaaaccatgcttgccgacggggcaaccaacccggatccatgggtacaggataacgacagccaccacatgaacgtgcgtcagctgtacgtcgagatgggcaatttcgccgatttttccgggccgttcaggagcgcttccatctgggcgggcaagcgtttcgaccgcgataatttcgatatccactttaccgatagcgatattatgttcctcggcggtaccggcggcgggatcaatgacgtgatgtggggtgatacgctgcgcggcgattactcggtctatgcgcgtaacttcggcgatctgggtagcgataactaccaggataacgatatacagaacctgatgttcaccgccaaccacttctggaacaactggcagctgatgaccacggcgatgaccgcccagggcaatgatgacctgaaagataatacctcgaccaccggcagttacgctctgcgcagcgataatacggcgaaacacggctactacgcgatgctggcgtatcacgacaaacagcaattctatggcctcgcgccgggcgtatcggagagcgccctgcagtacggcggcgggctgggcgccgaggcgcgccagcccggcagcgatggcgatcttaccgagaacgctaagtccctgcgttttgcgtcctacggcattttgccgttggggaaaaactggcagcttgcaccatcggttatcgcccagcatagtgaagatcgctaccgcgatggcgaccgctacgattgggcaacctttaacctgcgggtttcccagggcatcacccgcaacttcgccctgctatacgaggcgtcctggcaatatatggacctgaatcccaacggccgaacctatcgctacgacagcggcgtgcatcaataccaggcggtgagcggcgatttttacaagctgaccttcgccccgacgttcaaagttggcgatgtgtttgatatcaaagcgaggccggagatacgtttctttgtcacgtggatgaattgggataaagacctggatcgttatgcgatcaacgatgatttcggcagtaaaggctttaccgccggaggaaactggaactttggcgtgcagacggagatttggttttaa

SEQ ID NO: 172273 - DNA, 222 bp, Klebsiella oxytoca
atgctgcgcatctgtccgggctacgcgttctcagtggtctgctatccggtagcccgggcaggcgctgtgtgccccccgggagagagtgcggagtggcagaatatcccggaggcgatgctgcgcatctgtccgggctacgcgttctcagcggtctgcggtccggtagcccgggcaggcgctgtgcgccgcccccgggaagaggtgccagggctgatgtattaa

SEQ ID NO: 172274 - DNA, 228 bp, Klebsiella oxytoca
atgccgcatattgatattaaatgttttccccgcgacctgaatgatgaacaaaaagcggcgctggccgccgatattaccgaggtggtgattcgccatctcaacagcaaagagcgctcggtgagcgtggccctgaatgaaattaaagagagcgactggcaacaggtgtgggacagcgaaatcgccccgcagatggaacagctgattaaaaaaccgggttatagcatgtaa

SEQ ID NO: 172275 - DNA, 618 bp, Klebsiella oxytoca
atgatcaccgtctatggcgtacccggctggggctcaacgataagcgaactgatgctgacgctggccgatatcccgtaccattttgtcaacgttgagggctttgaccaaccgggcccgcagcgcgaccgtctcaagctgattaacccgctgtgtcaggtgccgaccctcacgcttgaagatggcagcgtgatgaccgaatccgcggcgattgctctgatgatcctcgacgtgcgaccggatctggctccggcgccgggatcgccgcagcggcatgcctttcagcgtctgctcatctggctggtggcgaacgtttatcccacctttacctttgcggattacccggagcgctgggccgccgatgcgccagagcagctgcgggaaagctgcatcagctatcgcaaatcgctttatcagtggctggaggagcagcttgccgccgcgccgtatgcgctgggggcggaaataactctgctggactgctatattgcggcaatgtgtgcctggggcccgcgacgggagtggtttgcggcgcaaacgccaaaattcgtcgccgtggcggatgcggtgtatcgccatcccaaactcgaagccgttcttcgccgcaacgagctgatttaa

SEQ ID NO: 172276 - DNA, 1005 bp, Klebsiella oxytoca
gtgaaaagcagaaaaccgacgcgcgcgccgacgctggatgatgtggcccgcagcgccgggttgtcgtcgatgacggtcagtcgggcgctgaatacgccgcagctggtaaggccaaaaacggtagagaaagtgatgcaggcggtgcaggccacgggttatatccccaatgcgctggccggcggcctggcctccaggcgcagcaaactggtggcggtggtggtgccgcaaatcaataacaatatgtttgtcgataccatccaggcgctgagcgataccctggcggcgcgcggctatcatatgctgctgtgcgtggcgggctatagccgtcagaccgaagccgagctggtagcaaccttactctcccggcgtccggatggcgtggtgttgaccggtattcagcacgctccggcgttaaagaggacgatcctcaacgccgccacgccggtggtggaaatctgggatctcaccccgacgccgctggatatgctggttggtttttcgcatgaaaaagtcggtgaaaccattggcgaatatttgctggaaaaaggctaccgtcgcccgggactgctgtgggcaggcgatgcgcgcgcgacgttgcgaaagcagggactcctggcccggctggccaaaagtggaattaacgttgccccgcaggtcgaggtgccgcttccggcatcgctggcgctggggcgacgcggtctggccgaactgctcgccggtggcgagtttgacgttatcgtctgcagttccgacacccttgcccagggagcgattatggaagcggaaagccgggggctgcgcgtgccgcaggatctggcggtgatcggctttggcgatctggatttcgccgccagcaatcgtccggcgatcaccaccgtcagcgtcgaccgtcacgccattggcgagcaggcggctacgctgcttgccgaccgcatagaaggcggcgaagaaggggacgcgattattgatattggctttcaccttgtggcgcgcgagtcggcgtag

SEQ ID NO: 172277 - DNA, 1197 bp, Klebsiella oxytoca
atgacctcgagcgcaaattccgactccgtgacctacgccaaagcttccggcgtcaaaaccgccgctgaaaccggcgaccgcattgaacatgtcaaactgtcgctggcctttctgccgctggccacccccgttagcgatgcaaaggttctgaccggtcggcaaaaaccgctgaccgaagtagcgatcgttatcgcggaaatccgctcccgggacggctttgaaggcgttggcttcagctattccaaacgcgcgggcggccagggcatttacgcccatgcaagggagattgccgataatctgctcggcgaagacccgaatgatatcgacaagatctacaccaaactgctgtgggccggggcttccgtaggtcgtagcggcatggcggtgcaggcaatctcccctatcgatattgcgctgtgggatatgaaagccaaacgcgccgggctaccgctggcgaaactgctcggttcgcaccgcgattccgtgcagtgttacaacacctccggcggcttcctgcataccccgctggagcaggtgttgaaaaacgtggctatttcacgcgagaacgggattggcgggataaaactgaaagtcggtcagccgaataccgctgaggatattcgccgtctgacggcagtacgcgaagttctgggcgatgacttcccgctgatggtggacgccaaccagcagtgggaccgtgaaaccgctatccgcatggggcgcaaaatggagcagttcaatctgatctggattgaagagccccttgacgcctacgatgtggaaggccacgcacagctcgccgccgcgctggatacgccgattgccaccggcgagatgctgaccagcttccgcgaacatgagcagctgatcctcggcaacgccagcgacttcgtgcagcctgatgcgccgcgcgtcggcggcatctccccgttcctgaagattatggatctggcggcgaagcacggtcgcaagctggccccgcacttcgcgatggaggtacacctgcatctcgccgccgcctacccgctcgagccctggctggagcacttcgagtggctgaacccgctgtttaacgaacagctggaactgcgcgacgggcggatgtgggtttccgaacgccacggtctgggcttcaccctgagcgaacaggcccgccgctggacccagcaaagctgcgagtttggcaaacgcccttaa

SEQ ID NO: 172278 - DNA, 1311 bp, Klebsiella oxytoca
atgactacacccttaaaacgcagcaacgtgcgttacggcatattactgtttttatttctggctaccgtatttaattatgccgaccgggcaacgctgtccgttgtcgcgcctattatgagcaaagagttaggttttgatcccgaggcgatggggctggctttttcagtttttggcatctcctacgtcattatgcaaatacccggcggctggctgctggataaatatggttcgcggctggtctacggctgcgcgctgattggctggtcagtcgtcaccatgtttcagggaacgatctatctgttcgccagcccgctgattgtactggttattctgcgcctgatgatgggcgcgatagaagcccccgcctttcccgctaacagccgtctgagcgtacagtggtttcccaataaagagcgcgggttcgtcacttcggtctatcaggccgcgcagtatatttccctggggattattacgccgctaatgacgattattctgcataatttaagctggcactacgtattttattatattggcgctatcggcgtggtgctggggatattctggctggtaaaagtaagagatccctctcatcatccaaaaattaaccaacaggagctcgactatattcgcgaaggcggcggcgagccggaattaggcacgaaaaaaacgcagcagaaattaaccctcgcgcaaatcaaaagcgtctgcgtcaatcgtatgatgatcggggtatatattggccagttctgcgtgacgtcaatcacctggttcttcctgacctggtttccgacctatctttaccaggccaaaggcatgtcgattctcaaggtcggctttgtcgccagcatcccggccattgccggatttatcggcggcctgctgggcggcgtgttctcggactggctgctgaaacgcggctatagcctgacgaccgcccgcaagttgccggtgatctgcggcatgctgctctcctgcgtcattgtggtcgccaactacaccacttcggaagtggtggtgatcgccgccatgagcctggctttctttgctaaagggttcggtaacctcggctggtgcgtgctgagcgacacatcacccaaggagatgctgggaattgccggtggggtgttcaatatgtgcggcaacctggcgagtattatcacgccgctggttatcggcgtgatcctcgcgaatactcactccttcgattacgccatcctgtacgtcggttccatgggcgtactgggcctgttctcctacctgtttatcgtcgggccgctggatcgcttaacgctgaccccgcgcgccgcctga

SEQ ID NO: 172279 - DNA, 894 bp, Klebsiella oxytoca
atgagaaacggatttttgaccctggcgttactctctttatctgcggcatcgcaggcggctatcgacctgcgcgccaacgagcagccgctgccggtaacccgcgatgagcaggcggtggcgaagatcccggcggattacgccttcgtcgaaccgggtactttaacggtggcgatttcagcgctcaactcgccgccgctggcgctactggccagcgataaccgcacgcgtatcggcagcgacccggatatcgcccgactgctggccggcagcctcgggctgaagctaaagctggtgcccaccgcctgggaggactggccgttggggattacttccgggcgctacgacgtggcgctggtgaatattgcggtaaccgagcagcggaaagcgaagtttgattttgcgacctatcgcgtcgattcgctggccttttccgtaaaatcgaccagcgacatcgccagcgtgagcggcccggcggatctcgccggtaaaaaagtgattgtcgggtccgggactaaccaggagcgaattttgctcggctggaacgccgaaaacgaagccgccgggcgacaacctgcgctaccggtctatctgaccgatgacgcttcgggcaatctctatattcagtccggtcgcgcggacgtgttttttgggccgcagtcggtagccgcatacaaagcggcgctcagcggtaaaaccaaagtcgtcgggctggggccgaaaaaggcttatgtcgccaccaccaccaggaagggtaacggactggtctatgcgcttcaggccgcgctggatggcgcgatagcgcgcggagagtatcagaaagtgctggcccgttggggtgagcagggcgaagaggtgaggcaatcggaggtcaatccgccggggattacctactaa

SEQ ID NO: 172280 - DNA, 780 bp, Klebsiella oxytoca
atgctcaactctcgtaacggtcatatctccattaccggcgtcagcaaatactttggccgccataaagcgctggacgatgtatcgctggaaatagcacccggtacggtgacggtgatcctcgggccgtccggttcgggaaaatcgacgctactgcgggcgatcaatcatctggagcgcgttgatgaaggctttattcagatcgatggcgactatatcggttatcgccgtaaaggcgacaagctctacgaactgaaagagaaggagatccttcgccagcggatcaacgttggctacgtgtttcaaaacttcaacctgttcccgcacctgacggtgctggaaaacctgattgaagcccccatcgcccataaacaggcgacccgtaaggaggctatcgcgcgggcgtacgaactgctggacgtagttggactacgcaataaagccgacgcctggtcgcggcacctgtccggcggtcagcagcagcgcatcgccattgcccgggcgctggcgcttaacccgcgagtgatgctgtttgatgaacccacctccgcgcttgacccggagctggtgggggaagtgctggatgtgattaaaaagctggcgcgctccggcaccacgctggtcgtggtcacccacgaaattggctttgcgaaagaggtggcggatcgggtggtgtttatggtcgacggcaagatagtcgagcagggcagcagcgacgatgtgctgaaccatccgcagcacccgcgtacgcagcagtttttatcgagggtattagcggcatga

SEQ ID NO: 172281 - DNA, 930 bp, Klebsiella oxytoca
atgcatacccaggaaacgattaaggttgtccccgcgcgctatccgctgcgggcagtgggcgcggtgctggcgctgctggtgctggcggtggtgattcaatcagttgcctttaacccgcgctgggagtggggcgtctttgcccgctggttctttgacccggtgatcctcgaaggccttgggcagacactgctgttgaccctgctggcgacggcgctcagcgttatcttcggcggactgctggcgctggcgcgactctccagttcatggctgctgagcagccttgcctggggctatatctggttgtttcgctcgctgccgctgatcgtggtgctgattattctctacaacttctcttatctctacgacaccctgtcgatcggcattccgttcaccgctattcgctgggccagctttgagaccattagcgtgctggggcagttttctaccgccgttgtcgggctgaccctggtacaaagcgcctacaccgccgaaattattcgcggcggtttcctcggagtcgatcacgggcagtatgaagcggcggcggcgctggggcttccggccagccgccgcacgctgcgcattatcctgccgcaggcgctgcgcaccattttaccggcgggttttaacgaaattatcagcctcgccaaggggacggcgatggtttacgtgctggcgatgccggagctgttttacaccatccagatgatctataaccgcacccaggaagtgatccccctgctgatggtcggcgccgcctggtacctggcgatcaccagcgtgctgtcgctgattcagtatctggtcgagcgcggcctggcccgcagcgagcgccgctcggcggtcaatagcgcccgctgcagccgtcgcgttgttgaaaccgttcatcgtccccaaccgcaggagtccgcccatgctcaactctcgtaa

SEQ ID NO: 172282 - DNA, 510 bp, Klebsiella oxytoca
atgagcgatctattccgcgatgtctctccggaagcgccggagctgcagccgattattgagggcctgttcggcgagtacgccgcgcgctacggcgactacttttcccgcgatgccgaagtcgagctgactgaatggtatctggcgccgcaggggctatttatcgtgctggagcgggagggggaaattatcgctaccggcgcgtataaaccgaaagatgcccatacggcagaaatcaaacggatctggacccatcgtcgtctgcgccagcaggggctggcggcgaaagtggtgcaggagctggaacgtcgggcgctgctggcgggctacagccatatctttttgacgaccggttttcgtcagccggaagcggtgcggctctatctgggccagggctacgaggcgcagtttgacctcaaccgcgatccggaagagtacagtttgccgccgttcgatggtcggctgcgctttacgaaagcgctggcggtcagcgcgctgagccagagcgcttaa

SEQ ID NO: 172283 - DNA, 942 bp, Klebsiella oxytoca
atgcagaaaacgcagaaaaaatcgctattactggcgctggcgctggccgtgagcgcgtcatcctgggcgcagaacgtcacgatcaacggcaccggcgtgagcctcgaagccaacaaaacgccgattcacacggcaaaaaatccgcaggctatcgcccaactgccgaagggtctccacctggcggtgccgggtaagctgaccgtcgcggtcgccgcgctgaattcgccgccgctgaccgtgttttctgatgataacaaaaccctgctcggcagcgaggtggatatcgcccgcctggtggccgacagcctcgggctggagctgaacgtggtgcccacctcgtgggaagactggccgctcggcgtcgcctccggcaaatatgatgcggcggtcagcaatatcaccgtgaccaaagagcgcaaagagaagtttgatttcgccacctaccgcaaagattcgctgggtttttacgtcaagagcaccagtccgctgagcaaaattgaaaaagccgaagatattgccgggctgcggattatcgtcggctccggcaccaaccaggaagcgattttgttggcgtggaacgccgagaatctcaagaaggggctgaagccgtttacgccggtctacaccaaagacgacgccgcccagaccctggcgctgcagtccgggcgagccgacgccttcttcggcccgaacgtaatcggcgcgtggaaagcggcgctgaccggcaaaaccaggctggtgggcagcgttgacggcggctggccgaaggcggcgcatatcgccgtgacggtgaaaaaaggcagcggtctggttgaaccggtacagacggcgctgaacggcgctatccgcagcggcgattacgcgaaggtgctgagtcgctggggcgaaggcgtggagagcatcccgcaatcggaaattaacccggccggactcggcgactaa

SEQ ID NO: 172284 - DNA, 1317 bp, Klebsiella oxytoca
atgtctgaacaacgacagctgcgcattggcactatcttacatggggcatcgggaaatatgtcggcctggcgccatccggccgcactggccgacgccagtattaactttgagttcgtgaagcagacggcgttaaaagcggaagagggcaagctcgattttatttttgttgccgatggcttatatattaatgaaaaatcgatcccgcattttttaaaccgttttgaaccactcaccgtattatccacccttgcagcggtaacctcgcgtttaggcctcgtcggcaccttgtcgacctcctacagcgagccctttaccaccgctcgccagttcgccagcctcgatcatctgagcggaggacgcgctggctggaacgtggtgacatcgccgctcgaaggctcagcgaaaaacttctcccgggcgcagcatcccgatcatgcgctgcgctaccgcatcgccgatgaatatcttcaggtcgttaaaggcctgtgggattcatgggaacaggacgcgtttattcgtaataaagagagcggccagttctttgataaaaataagctgcatacgcttaatcatcacggtgatttcttcaaagtggccggcccgctaaatattgcccgcacgccgcagggccgacccattatctttcaggcgggcgcttccgaagacggtaaaaaattagccgccagccatgccgacgctatttttacccatcaggactcgctggcggaagcgcaggccttttatcgcgacgtcaaaagccagctcgacgcgtacggccgccgggagagtgaactacacatattccagggcgtcagcgtgatcgttggcgatagcgccgacgatgtggaacagcaataccagaccaccgccgcgctggtatcgattgaggacgcgctgaattatcttggccgctattttgagcatcacgatttcgcccaatatccgctggatgaggcgttcccggatatcggcgacctcgggcagaacagctttcgcagcaccaccgatgagattaaacgcaacgcccgcgaacgcggcctgaccctgcgccaggtcgcgctggaggcagccagcccgcgaccgcgttttgccggaaccgccgcagaggtggcagatgggctacagcagtggtttgaacagcgcgcggcggacggttttattatccagggcggtacgccggataccttcccgcgctttgtggaccaggtggtaccgatcctgcagcagcgtggattattccgtgaagaatatcccggcaccacgctgcgcgaaagtttagggctggcagagcccgtcaatcaattccaaaaacaataa

SEQ ID NO: 172285 - DNA, 1122 bp, Klebsiella oxytoca
atgagccttgctgaacagttaattcgctggcggcgcgagctgcatcagtatccggaactttcgctgcaggaggtcgacaccaccgcgcgtattcgcgactggctacaaagcggcggcatcagcctgttgccatatgatctgaaaaccggcgcggttgccgaggttgggagcggcaataaggtgattgccctgcgtgccgatattgatgcgctgcctatcgaagaggcggccagcgtgccgtttcgctcgctgaatgccggcgtgatgcacgcctgcgggcatgatattcataccagcgtgatccttggcgcggccttactgctgaaacaacgcgaagcgcagctggcgggacgcgtccgcattctgttccagccggcggaggagagcttcggcggcgcgaaaaccctgattcgcgccggcgtgctggagggcgtttccgccattttcggtatgcataatgaaccggggctgccggtgggggaattcgccacccgaggcggcgcgttttatgccaacgtcgatcgctttgtgtttaaggtgaccggcaaaggcgctcacgccgcccggcctcatgaagggaaggatgccattctgctggccagccagctggtgaccctgctgcaaagcgtcgccagccgcgaagtgaacaccctcgattccgtggtgctgagcgtcacgcggattcagggtggcaatacgtggaatgtcctgccggaaagcgtcgagctggaaggtacgctgcgcacccatagcagcgaagtccagcagcgggtgaaggcgcgggtgagcgagattgccgccggcttcgccagcgccttcggcgcgcagatcgatgtcttctggtacgccgggccgaccgcgctggtcaatgatgaacgctgggcggctttcgccagccacgtggccgatcgatccggctaccgcacgcaccatgcggatctccatctcggcggagaggatttcgccgtttatcttcagcatattcccggcgcgttcgtcagcatcggcagcgccagcgagtttggtcttcaccatccggcgtttaacccggatgagcgcttaatcgcgccggcggcgcactactttgccgatctggcagagcaggcgctgaaagaactttaa

SEQ ID NO: 172286 - DNA, 1002 bp, Klebsiella oxytoca
atgtcttatcgaatcagtatcctggataaaagcccgctggcggccggagaaacggccgcccaggcgctggcgcgcacattaacgctcgcgcaacaggcggaagcctggggatatcaccgtttctggatcgccgaacaccacaacaccgaccagctcgccagcccgtcgccggaactggcgattgcctggatcctcggccagacccgcagcattcgcgttggctccggcggcgttatgctgcagcactacagcccatataaggtggcggagaacttcaatatgctggcttctcttgccccgggccgcgtggatctgggcgtgggcaaagcccccggcggactgccgctctccactcgcgcgttgcagcagggacttaatctccagcaaaaggggagttttgccgaccagctggcgcagctcgacaactggctgtcgctgaccgaaaccgatggtgaagagagcgtccgggcaaccccaatcccgccgcgtcgcgccgacggttttctgctcggcgccagcctggagagcgcgcagctggcggcgcagctggactggaacttcgtcttcgccgcccatctcaacggcgataagcaactgctgcgggaggtgttaacccgctggcgcgaactgagccgtcgcgacgccattatcgccgttcaggttattgtggccgaagaggccgcagcggccgcggcgctggcaaaatccgtcgaagcatggggcgttgagctggaaaacggtcagcgggtgaccgtcggcagcgaagcgcaggcggccgcctttgcccgtcaggcgggcagcaggccgacgcgtatcgcccggcgggaatcggccgtgctgttcggcacccccgagcaggtgaaagcgcagctggatgccttgcagtcggcgtggaacatcgacgaatttattatcgacacgcccattagcgacggcgcggcgcgccttaactccctgcgtctgttggcccgggcgcatctgagcgcggaggtccagccatga

SEQ ID NO: 172287 - DNA, 540 bp, Klebsiella oxytoca
atgaaaatcaacgtagtagggaccagcggcgtcggtaaatctaccctcgcgcgtcggctggctcaggaactgtctctgccttatatcgaaatggatgtactctactggctgcccgagtggcaagggacgccggacgatgagttctacgctaaactcgccgccgcgctcgccgcgccaggctgggtgcttgacggcaactataaccgcagtcgtccggtaaaatggcgcgacgtggatctggtggtgtgggtggattacagcttctggcgcacgatgcgccaggctatctggcgcgcggcatcgcgtgccagccgacgccaggaactgtggcccggcaccggtaactgtgaaaccttccgccgctccttctttagccgggactccattattctctggacgctaaaaacctggcgcaataatcgccgccgctatctggctgatatgcaggatccgcagtatcgacatattcgctttgtgcgcttacgcaaccagcagcagaccgaggcgctggtgcgcgagcttcggcagaatagccgataa

SEQ ID NO: 172288 - DNA, 1545 bp, Klebsiella oxytoca
atgctcgcttatctcattcatcagaatgatgggagagccagcagcacgaaccacttcatggacattgacaggaaaatagcgacatcaatgaatacaaaacactctagcgtggcggagcagcacgctgccaaacgccactggctaaactcgcaggagtccggctaccacaaggcgatgggcaaccgtcaggtgcagatgattgccatcggcggcgcgattggtaccggcctgttcctcggcgcgggcgcgcgcctgcagatggcgggaccggcgctggcgctggtttatctggtctgcggcctcttctcgttctttattttacgcgcgcttggcgagctggtgcttcatcgcccttccagcggcagcttcgtctcctacgcccgcgagttcctcggcgaaaaagcggcttacgttgcgggctggatgtacttcatcaactgggcgatgaccgggattgtcgatatcaccgccgtcgcgctgtatatgcactactggggcgcgttcggcgacgttccgcagtgggtctttgccctcggcgcgctggcgatcgtcggcaccatgaatatgatcggcgtgaaatggttcgccgagatggagttctggttcgcgctggtcaaggtactggcaatcgtggcgtttctggtggtcgggactatttttcttggcaccggcaagccgctggatggcaatgccaccggtttccatctgatcaccgataacggcggtctgttcccgcacggcctgctgccggcgctggtgctggttcagggcgtggttttcgccttcgcttctattgaactggtaggtaccgccgccggcgagtgtaaagatccgcagaccatggtgccacgcgccatcaacagcgtcatctggcgtattggtctgttctacgttggctcggtgctgctgctggtgctgctgctgccgtggaatgcctatcaggccgggcagagcccgttcgtcaccttcttctcgaagctgggcgtgccgtatatcggcagcgtgatgaatattgtggtattaaccgccgcgctttccagcctcaactccggactgtactgcaccgggcgtattctgcgctccatgtcgatgggcggttcggcgcctaaatttatgtcgaaaatgagccgccatcacgtgccctatgccggtattctggcgacgctgggcgtctatgtcgttggggtattcctcaactacctggtgccttcgcaggtgtttgagatagtcctcaacgtcgcttcgctgggcatcatcgcctcgtggggatttattgtggtgtgccagatgcgcctgcgcaaggcgatcaaagaaggcaaggccgcagacgtcagcttcaagatgccgggagcgcctgttacttcctggctgaccctgctattcctgctgagcgtgctggtattaatggctttcgattacccgaatgggacttataccatcggttcgattccgctgattgccgttttgctggtcgccggctggtttggcgtacgcaagcgcgtgcatgatattcacagcactgcgccggatattgaaaaaccgtaa

SEQ ID NO: 172289 - DNA, 222 bp, Klebsiella oxytoca
atgaaaagaacattgatggtcgtttgcgccggcgcaatgctggctttgctggcaggctgtagctcaaactacgtgatgacgacgaaaagcgggcaaaccattgtgacgcagggcaaaccgaagctggataaagataccggcatgaccagctataccgatgagtcgggcaataagcgccagattaacagcagcgatgttgctcagctggtggaagataattaa

SEQ ID NO: 172290 - DNA, 1062 bp, Klebsiella oxytoca
atgtcattacgtcatctgtccgcgccgcgtctgcgccgttcactgttgttaacttcattactgctggcggggagctttagcgcccatgcggcggaagaaatgctgcgcaaagccgtcggcaagggcgcatacgaaatggcctatagccagcaggagaacgcgctgtgggtggccacatcgcaaagccgttcgctggataaaggcggcatcgtttaccgtctcgatccgacgaccctcgaagtgacccagatcattcataacgacctgaaacccttcggcgcgacgatcaataacgccacccagaccctgtggtttggcaacactaccgacagcaccgtcactgccattgatgctaaaaccggtaaggtaaaaggacgtctggtgctcgacgctcgtcagcgcagcgagaccgtgcgcccgctggcgccgcgcgagctggcggtcaatgagaaaaccaataccgtctacatcaccggcctgggtaaagagagcgtgatttgggttgtggatggcgacaagctgacgctgaaagacactatcgctaataccggcgcaatggcgaccggcctggcggtggacgcagaagcgaaccgcatctataccaccaacgccgacggcgagctggtgactatcgacagtaccagcaataagatcctctcgcgcaagaagttgcaggatgatggcaaagagcacttctatctgaatctcagccttgataccgccggtcatcgcgcctttatcaccgacagtaaacagccggaagtgctggtggtcgatattcgcgatggcaaagtgctggagaaaatcgccgcgccggagtccctggccgttctgttcaacccgacgcgcaatgaagcctacgtgacgcaccgcaaagccggggaagtgagcgtgatcgatggtaagagctacaaggtggtcaaaactttcaaaaccccgacccacccgaacagcctgatgctttccgccgatggcaaaacgctgtacgttagcgtgaagcaggaatcgacgcgtcagaaagaggcgacccagccggatgacgttatccgcatcgcgctgtga

SEQ ID NO: 172291 - DNA, 2112 bp, Klebsiella oxytoca
atgaaaatcctttccgtgcgcgccgtcgcgctccccgctctgcttttaccgctggtatccgctgcgccaaccgctatcgccgctgaacagaccatggtagttaccgccgcgccgtcggcagtctctgaactcgatacccccgccgccgtcagcgtggttaacggcgatgagatgcgccaggctgcgccgcgggttaacctctccgagtcgctgggcgcggtaccgggactacaggtgcaaaaccgccagaactacgcgcaggatctgcagctttcaattcgcggctttggctctcgctccacctacggggtgcgcgggctgcgcatttacgtcgatggcatcccggccaccatgcccgacggccaggggcaaacctcgaatattgatattggcagcctcgattcgcttgaagtgctgcgcggaccgttttccgccctgtacggtaactcctccggcggggtgatcaacgctaccagccagaccggcgcccagccgccaactctcgaagccagcagctattatggcagcttcggtacctggcattacggcatgaaagcaaccggcgcggtcggcgacggcacccatgcgggcgatgtcgactatgtggtctccaccaaccgcttcaccacccatggctcccgcgaccatagcggcgcgcgtaagaatctcgccaacgcgaagctcggcgtgcgcatcaatgacgtcagtaagctgaccctgctgtttaacagcgtggatattaaagctaatgacgcgggcggcctgagctatgacgaatggcaaaacaatccgcgccagtcgccgagaggcgatgagtacaatacccgtaaaaccatcaaacagacccaagccggtttacgctacgagcgacagctgagcgagcaggacgatctgagcgtgatgatgtatgccggcgagcgtgagaccacgcaatatcagtcgatcccgcgtgcgccgcagctcaaacccacccatgcgggcggcgtgatcgacctgacgcgtcactatcagggcattgatacccgctggacgcaccgtggcgaacttctggtgccggtcacctttaccaccggtctcgactacgagaccatgagcgaacgtcgcaagggttacgaaaactttgtcatgaacaacggcgcgccgcagtacggggagaaaggcgacctgcgccgcaacgagcgcaacctgatgtggaaccttgacccttatctgcaaacccagtggcagctcaccgagaagctctctctggacgccggcgtgcgctatagctcagtctggttcgattccaacgattattacattacgccgggcaacggcgatgacagcggcgaagccagctatcataaatggctgccggcaggctcgctgaaatatgcggtaaccgacgcctggaatgtctacgtctccgccggtcgcggtttcgaaacgccgacgatcaatgagctttcctatcgctccggcgaccagggcgggctgaattttggcctgcagccgtcgaccaacgaaacggttgaaattggcagtaaggcgcgaatcggcaatggcctgttaactgccgcgctgttccagaccgacaccgacaatgagattgttgtcgatgccagcagcgggggccgtaccagctacaaaaacgccgggaaaacccgtcgccaggggatggaactggggctggatcagcagttcggcgagagctggcgtttaaaagcggcctggacctggctggatgcgacctatcgtaccaatgtctgcgacgatgccagctgtaaaggtaatcgtattccggggatcgcccgtaacatgggctacgcctccttcggctaccagcccgaaaaaggctggtacgcgggcagcgatattcgctatctgagcgatattatggctaacgatgagaacaccgccaaagcgccgtcctggacagtcgtcggcctgacgaccggctataaatggagctacggcaagatggatatggatctgtttggccgcgtcgataacctgtttgaccgccgctacgccggttcggttatcgttaacgaatccaatggacgctactacgaaccggcgccgggccgcaactacggcatcgggctcaatctggcatggcgatttgagtaa

SEQ ID NO: 172292 - DNA, 300 bp, Klebsiella oxytoca
atgaaagatgttgtagataaatgcagtaccaaaggctgtgccattgatgtaggttcgattattgataatgaggactgcgtatggcgagttgagaaaaacttcgtcagccgcgaagaggctgagtccaccctggcggccgttcgccaacgtgccgaagccgccgcacccgccagcgagccgccgcaggttgactataccattgagaccgccggtgatgaggttaagcttgaggcttcaattgccttctcctgccaggcggagaagattatcttcgaattgtccttaagaaacgtgatttaa

SEQ ID NO: 172293 - DNA, 936 bp, Klebsiella oxytoca
atggcactgccagtgattatcgattgcgatccgggtcacgacgacgcgatcgccctcgttcttgccctcgcctcacccgaactcgatgtgaaagccgtcacctcctccgccggaaaccagacaccggaaaaaacgctgcgcaacgtcttgcggatgctcaccctgcttaagcgcccggatattccggtcgccggcggcgcgcttaagccgctgatgcgggagctgattatcgccgataacgtgcatggcgagagtgggcttgacggcccggcgctgccggagccgggctttgccgcgcaggcctgcaccgccgtcgagctgatggcgaaaacgctgcgcgaaagcgccgggccggttacgatcgttgctaccggtccgcaaaccaacgtcgccctgttgctcaacagccaccctgaactgcatagcaaaattgcccgcatcgtgatgatgggcggcgccatggtgctgggtaactggcagccggcggtcgagtttaatatctacgtcgacccggaagcggcagagatcgttttccagtccgggatcccggtggtgatggccgggctggatgtcacccacaaagcgcaaatccacgtcgaagatatcgagcgtttccgccgtatcggcaatccgatatccactatcgtcgccgaactactcgactttttccttgagtaccataaggatgaaaaatggggttttgtcggcgctccgctgcacgatccttgcaccattgcctggctgctgaagccggagatgtttaccaccgttgaacgctgggtcggcgtggaaacgcaggggaaatatacgcagggaatgacggtggtcgatttctacaacctgaccggcaagacgccaaatacgacggtgatgctcgacatcgatcgccgggcctttgtcgatctgctggccgagcggctggcgttttacgcctga

SEQ ID NO: 172294 - DNA, 1038 bp, Klebsiella oxytoca
atggcttttaatccgcaacgccaccgccgctggctgctggcatcccgtccgcacggcgagccgaccggggagaacttccgcctggaagagggtgaggtcgcttctcctgggccggggcagctgctgctgcgcaccgtctttctgtcattagatccctatatgcgcgggcggatgagcgacgcgccttcctactcgccgccggtcgccattggcgcggtgatggtgggcggcaccgtaagccgcgttgtaacgtcgaaccatgctgattatcagcccggcgattgggtgctcggctacggcggctggcaggattatgagatttccgatggcagcgggctggtgaagctgggcgataacccggaacacccctcctgggcgctgggtatcctcggtatgccgggctttaccgcctacatgggactgctcgatatcggccagccaaaagcgggcgagacgctggtggtagccgccgccaccgggccggtcggcgccacggtcggccagatagcgaagctgaaaggatgccgtacggtaggcattgcgggcggcagcgagaagtgccgttatgcggtagagacgctgggtttcgacgtctgtatcgatcaccgcgcgcccgattttgccgttaagctgttagaagcgtgcccgcagggcatcgatatctactatgagaacgttggcggcaaagtattcgatgaagtgctgccgctgttgaacacatcggcccgcgtgccggtctgcggcctggtcagcggttacaacgctaccgcgctgcccgatggcccggatcgtttaccgctgctgatggcgacgatcctcaaaaaacgcattcggatgcagggctttatcatcggccaggattacggtcaccggattgcggagttccagcaggagatggggcgctgggtgcaggcagggaaaatcaaataccgcgagcaggtcgttgacggcctggagaacgcgccgcaggcgctcatcggcctgctgaagggtgagaacttcggtaaggtcgtggttcgcgtctctcctgacgagtaa

SEQ ID NO: 172295 - DNA, 576 bp, Klebsiella oxytoca
atgaacactatagaagacaacctgaaccagcgcatcagcgcacgcatccgtattgagcgggaatctcgcggctggtcgctgagcgaactagcggatcgggcgggcgcgtcccgggcgatgatccacaagatcgagcgcggcgaaagcagcccgacggcctctatgcttgggcggctttccggcgcctttggcatcagtatgtcgacgctgatcgcccgcgccgagatgcaggaaggcaagctgctgcggttggctaatcagccggtgtggcacgacccgcagagccactatctgcgtcgtcacgtgtcgccgcgtagcgatttgcctatcgatctggtgcaggtggagctgcccgggggcagcgatattccgatgccggcggcttcttatgctctggcgcgacagcttatctggctgcagcagggcgagctggtgtttatcgaaggcactacgcgccacgaaatgcaggcgggggattgtctggagctcgggccgccgaacgactgccgcttcattaatgaaaccacgcagccctgcgtctatctggtcgtccggctcaatcaatctgcctcataa

SEQ ID NO: 172296 - DNA, 1278 bp, Klebsiella oxytoca
atgaaagtagtagtgccttcgatactgacaattattatgggtaatgtattagtcaataccaccatggcggctgaaaccaatgtgctacaggcggcaccggcttataccgcaacgcagactaaaggggagacgctgtggagcaatgatgatacggcgatcggtattttagggtccgtacgtttaatggccaaaacggattctcatcatagccaggaacataatatacagaataatgactcacggctgggggtagccgtaaggcataattttgatctgaacggcctgagcaattatgccgtaggttattatgagtctggcgttcatggtttagattccgcaacagatgaccagggcaacgatgtttatacccggcaggcttatgccggtattggtaacgatcgatatggtgtagtgaccttcggtaaacaatatgcgccgacagactgggggctgggcattgacacaacctatgcctggggtggaaaggcgaaacatgataccgccggaatgtcgacggatattattaactccgcggcgatctactattttaatgataaaaatatgacccttggcgtcatggggcaaggtaatgacaacgtcgacagcatcggctttgtggcctatggcgatggcccgaacctgcatgacgcttaccgcgatggctcagccaccgttcacggcggcgccgcggccgccgcgcagtatcgctgggataacggcttctccgtctccagcgccgttgcctataatcattacacggtaaatagcgggtcagccagcggctgccagagttttggcccgaatggtcactgctttcattacaccgataataacggtgatgcctatgacggcaatacgtattccatggggatgaacgcaaaatataccgccaacgtcggtgaccacgcctggtataacggcgcggaggtgacgtattacctgaataaagttaatgatgttaaagcggcgaccagcggtcattacgatcgtaatacccggcatggtgatgaccaggaaacggtgcttggcctggaatatgactcacagtttaaaatcacgccggcctggggagtgtacgttgattttaactggtcgcagggcggggatgccatggacgggcagcacttccagtcgacggtattaggcactgattactggctaggtaatagcgcggtgacctatcttgaatacggctacgaaaaagcctggggcaacgataacgaggcgtggaatattgacgatcatcttggcgcagtgggcctgcgcgtctttatttag

SEQ ID NO: 172297 - DNA, 519 bp, Klebsiella oxytoca
atgatcatccgccatgccagcaaagacgattgcgcggcaatcgcagaaatctacaaccatgcggtcgtccataccgccgccatctggaacgataaaactgtcgataccgacaatcgcatcgcgtggtatgaagcccgacagatcgccggttatccggtgctggtgagcgaagaaaacggcgtcattaccggttatgcttccttcggagactggcgcgcctttgatggctttcgccataccgtcgagcattccgtatatgtccatcctgagcatcagggcaaagggctgggccgcagcctgctggtggccctgatcgccgaagctaagcggttgaataagcacgtgatggttgccggtattgaagcgcaaaatgaggcttctttacatctgcaccactcgctgggctttatcaccaccggacagatgccgcaggtcggcacgaaatttggccgctggctggatttgacctttatgcagctacagcttgacgatcgccgcgatccggacggcggcgcatga

SEQ ID NO: 172298 - DNA, 450 bp, Klebsiella oxytoca
atgaatcagacgctcaccctggcctgtttgattgccgccggcattgggctggtcgtgcaaaacaccctgatggtacgaattacccagtccgcatcgaccattctgatcgctatgctgctgaactcgctggtcggcatcgtgatttttgtcacgatactgctgctgaagcacggcgcggcagggattcaggagctggcggtcagcgtaaagtggtggacgctaattccgggtttgctgggttcgttctttgtctttgccagcatcagcggctatcagaacgtcggggcggcgaccaccatcgcagtattgattgccagtcagttgatcggtggcctggtgatggatttacttcgcgcgcatggcgttccgcttcgcgcgctgattggcccactctgcggtgcggtaatgctggttatcggcgcctggctggtggccagacgccagttctag

SEQ ID NO: 172299 - DNA, 234 bp, Klebsiella oxytoca
atgtcgcatctggatgaggtcgtcgcgcgcgtggacgcggcgattgccgaaagcgtcattagccatatgaacgaactgctgattactttaagcgacgacgccgggctggggcgagaagagcgctacgtgcagcagcagcgtttgcgtaacgctattgctcatcatggccgccagcagcatgaggaacaggaagcgcgccgggagcagttgacccgcggcggcgagatccactaa

SEQ ID NO: 172300 - DNA, 1599 bp, Klebsiella oxytoca
atgtttacagggaaaacgtttattgcgctggcgttgagcgcacttctgccggcggcaagcgcgctggcggcgggcgatgatacgctggtctattgctccgaagcctctccggaatccttcaatccgcagattgccagttccgggccctcttttgtcgccagctctcaggtgctgtataaccggctgataaactttgatccggtcaaaaacacgccagttccttccctcgcgacggaatggaacgtctctccggacggcaaaacctggacctttaccctgcgtaaaggcgtgcagttcaacagcaataaattctttaagccgacccgcgatttcaacgccgatgatgtgctgttctcggtgctgcgccagaaagatgcgaatcatccttatcacaatgtttcccacgggcaatacgaatactttcacgacgtcgggctggataagctgattaaagaggtcaaaaagatcgatgactaccacgttcagtttgtgctcaacgaacccaatgcggcattcctcgccgactgggggatggatttcgcgtcaattctgtctgccgaatatgccgatgcaatgctgaaaaaaggcacgccggagtatatcgatacctggcctgtcggcaccggaccttacgccctccagcagtacaaggtggattcgctgatccgctatgttgccaacccgcactactgggatggtgaagtgccgactaaacacctgatcttctcgatcaccccgaacgttgagacacggctggcgaagctacaaaccaatgaatgccagattattcccgcgccgtcgccggtacaattcccggtgattaaaggtaataaagatctggcgctgcattcggttgaggcgctcaacgtcggctatctggcgtttaataccgagaaaaagccgttcgataacctgctggtgcggcaggcgctcaactatgccaccgacaagcaggcgatcgtgaaagcggtgttcctggagtccggcagcgttgcaaaatcgccgatccctgccaatatgctgggctataagaaagatctgcccgattacgactacgatccgcaaaaagcgaaagatctccttaaacaggccgggctggaaaaaggggccgaagtcaccctctggtcgatgccggtgcagcgcccgtataatcctaattcgcgccgtatcgctgaaatgatccagaacgactggagcaaagttggcatcaaagccaaaatcgtcacctatgagtggggcgagtacctcgccggtatgcgcaaaggggagcatgacagcgcgctgtttggctggatgtcagataacggcgatccggataactttgccggtaccctgttaagctgcgataacattaaaaccggctccaacgttgcccgctggtgcgataagccctacgacgcgctggtgaaaaaggctatcctggtgagcgacccgcaggagcgcgctaaactctacgctcaggcgcaggagattttttatcagcaggccccatggatcaccctggcaaccggcaaaaccttctacgcgacgcgcagtaacgttagcggatacagcgtgagcctgatgggcagcgatttttccaaagttaaacttaattaa

SEQ ID NO: 172301 - DNA, 1434 bp, Klebsiella oxytoca
atgacaataacctgcactctctacaccaacggccagtggcacgatgcggaaggccatgccacttttacccgccacaacccgctgacgcaagaaaacgcctccgttgccagcgccgccagcctggctgacgctcgccgctgcgccgataccgccggcgcggcgtatccgcaatggcgcgatacgatacccgcagaacggcgacgcctcctgctggacgctgccgaagagatgctgcgccgtgaggcgaagtttattgccgcgatggcggccgaaacgggagccaccgcgcactgggccggttttaacgtgcatctggccgccgatatcctgcgcgaagccgccgcattgaccacgcaaatcgaaggccaggtgatcccctctaacgtgccgggaaatctggcgttgggcatccgtcagggggcgggcgtcgtactcagcatggcgccgtggaacgcaccattgattctggcgactcgcgctatcgccacgccgctggcctgcggaaatacggttattctcaaaggcgcggagctctcgccggcgactcaggggctaattatcgatgccctggcggcggcgggcttccccgccggcgtggtgaattatctgacctgcactcccgccgacgctcctgcgctggtggagtctctaatagcgcaccccgccgtacgccgcatcaacttcaccggttcgacgccggtaggacggattatcgcccgcacctgcggggagcatctgaaaccggcggtgcttgaactgggcggcaaggcaccgctgctggtgctcgacgacgctgacctcgaacaggcggctgcgggcgccgtttttggcgcattcgccaacgccggacaaatctgcatgtcgaccgagcgcatcattgtggatgcggccgtcgcggaagagtttgtggcgctactggccaggcgcgcggcggccctgcccgccagcctgctcggcccggtggtagagatgaagaccgtcacccgctgcaatgccttgatagaggatgcgctggagaagggcgcgcgcctgctcactggcggcacatccaattcgacgcaaatgcgcgccaccctgctcgatggcgtcacccgtgaaatgcgcatctggcatgaggaatcgttcggcccggtgaaatcgattattcgcgttcagaacgaagccgaagcgctggccgtcgcgaacgaaagcgaatatggcctctcgtcggcgatatacagtcgggacagcgcccgggcgtggaacctggcgcaaaatctgcaaaccggcatttgccacatcaacggccccaccgtgcacgatgaagcgcaaatgccgtttggcggctgtaaatcatcgggctatggccgctttggcggacgcgcggggattgccgagtttaccgagctgcgctggatcacgctgcaaacgctcccgcgcgagctgccgttttaa

SEQ ID NO: 172302 - DNA, 1257 bp, Klebsiella oxytoca
atgcgaataatcaacatcctgggtatctcggctttactctgtacgcctctgcttctgcaagggtgcgtaacgcaacatccgcgcgggacggcttcccgcccgcagcttactgcggcggaagcggcaagcttcaccatggagcgctattttgcgcagggcggcgcgttgagtgccccggatgggccatggtcgccatcgccagttagccctccgcaaacggaaagcgcctggcgcgtggcgccagcgggagcgccgtactcccgcattcagcaggcggttaatgcggcaatagcccagcattcggcaaagaatgagcgtatctatatccgtatcgagccaggcatctatcgggaaacggtctatatccccgcaggggcgccgccgataactctttatggcgccggagagcagcccgaagaggtcaggattgagctggcgctggattcacaattttctgcgcagcgctatcgcgagcaggtgaacggccagcatcagtatcgtgaaggcgaccccgcctggtaccagtatgcgctttgcgccgggcgtaccagtaagacaataggcaccaactgcgcggcggtgatgtggtcgcaaagcgctgatttccagctggttaatcttagcgtagccaacagtctgctggataccgttgatggcggtacccaccagggggtggctctgcggacggatggcgatcgcgtgcagctggagaaagtccgtttgctgggacgccaggatacgctctatttgaataccagcaacctgcgtaatgaagcggtgacggatcgcattagccgcgtatacgtcaaagacagctacgtcgaaggggacgtggattatgtcttcggccgggcgaatgcggtctttgacaatgtgcatttccacaccgtctcgacgcgccgttctcccgaggcttacgtgctggcgccgaacacgttgccggataatccatacggttttctggtgaagaacagccgctttaccggcgacagcggctatcagggcagtttcaaggcaaagctgggccgcgcctgggatcagggggcaggcaagaccggctatttagcggggcagaccgccaacggacaggtgctgatcgccaacagcgctatcgatcaaagctacgatcggctttccccatggggcgctgcggccaccacctcccgaccgttccgcggcaatatttccgcagaacgacagctggatgacgtggcctttaatcgcctgtgggaattcaagaaccattggcggccgtga

SEQ ID NO: 172303 - DNA, 771 bp, Klebsiella oxytoca
atgaacagtttctattcctctcaggccggcggcaacgtgcgctggctggacctgcccggccgcggtgaaccgattatctttatccacggcctgggctgcgcctcaacctatgactatcctcgcgtggccgccgatcctgcgctggccggacggcgaacgattctggtcgatttacccggatacggctacagcgacaagccgccatctttcggctatcgcatcggcgatcaggccggagtgatagttgagcttctggattgcttagggctaacgcgctgctacttatatggtcacagcatgggcggcagcgtggcgattgaagccgcagaacggctcgccgaacgggtgctggggctgctggtggccgaacccaatctctatcccgggggcggtatgtacagcagacgcatcgcggaacaaaccgaagagcgctttattgcccggggctatgccgagatgctcagtgccgaaacctcgccctgggccggttgcctgcaaaacagcgctccgtgggcggtgtggcgcggagcgtccagcctggtaaagggcgctaatccgtcctggtttacccgctttatccatttatcctgtcctaaggccctgatttacggagagcattcgttaccggctcaagaagcgacggatactgtcgcggcggggatcccgctgttagcgatcccgctggccgggcattcaatggcgtgggaaaacccatcggcgctggcccgcacgctggacaatttttatgccagcattgaggcagaagtctga

SEQ ID NO: 172304 - DNA, 174 bp, Klebsiella oxytoca
atgacgttgtaccagaaaatgctggttttttatgcagttatgggctgtatctgcgcggtaataagctggttcttaacgaaagagagccgctggatccgcctgctggcggcgctgctgattggcgcgacatggccgttcagctttcccatggcgctgctggtctctttgttctga

SEQ ID NO: 172305 - DNA, 123 bp, Klebsiella oxytoca
atgtccggaatcgccgtgcttattgtggcgttaattttacttattgctgcaatttataatcttttttcttatgttcgcgagcgtcgtcaatcaagtttaccgagcaaaaaaaacaaacgttag

SEQ ID NO: 172306 - DNA, 1428 bp, Klebsiella oxytoca
atgcaaaataaccttttgataaacggtaagttagtggctggcgaaggcgagactgtgccggtgtttaatccagccaccggcgaagagattttgtcgattgcggaggcctctgcgacgcaggttgatgccgcggttgacgccgctgacctggcctttgccggctggagtcagacgacgccgaaaacccgcgccgaatgcctgctgcggctggcggatctgattactgaacatgcccgggagctggctcaactggagtcgctgaactgcggcaaaccgctgcactgcgtggtcaacgatgagctaccggcggttgccgatgttttccgatttttcgccggtgcagcgcgctgtctgccgggtatggcggcaggtgaatacctcgaaggccacacctcgatgatccgccgcgatccggtcggcgtggtggcttctatcgcgccgtggaactatccgctcatgatggcggcctggaaactggcgccagcgctggcggcaggcaactgcgtggtaataaaaccctctgagatcactccgctcaccgcgctgaagttaggtgaactggcgcaggagattttccccgccggggtgcttaatgtcctgttcgggcgcggagcaaccgtcggcgatccgctgaccgcccatgcccgggttcgcatggtgtcgctaaccggctcgattgctaccggcgcgcatattatcggccataccgcggcgtcgattaagcgaacccatatggagctgggcgggaaggcgccggttatcgtttttgatgatgcggatattgacgcggtggtggagggggtacggacctttgggttttataacgccggtcaggactgtaccgccgcctgccgcatttacgcgcaggccggaatctatgaccaactggtggaaaagctcggcgcggcggtcgccagcctgaagattggaccgccggatgatgaaacgaccgaactgggcccgctgagctcgcaggcgcatctggacagggtcagcgccgccgtcgatgcggctcgtgccttgccgcatattcaggtggtgaccggcggcagcaaagcgccgggcaatggttactacttccagcccacgctgctggcaggggcgaagcaggacgatgcgattgtgcagcgggaggtttttggtccggttgtcagcatcaccgcatttagcgatgaagagcaggcgctgtgctgggccaacgattcccaatatggtcttgcctcgtcggtatggactcgcgatgtcggcagagcgcaccggctcagcgcccgcctgcagtatggctgtacctgggtcaatacgcattttatgctggttagcgaaatgccgcatggcgggcagaagctctccggctacggcaaggatatgtcgatgtatggcctggaggattatacgaccatccgtcatgtgatgatcaagcacgggtag

SEQ ID NO: 172307 - DNA, 807 bp, Klebsiella oxytoca
atgcactctgatcgcgcaccgctgttcctgaaggtcgccacctggggtggcgtgatattcctgcatttcccgctgctgattatcgctctctacgcattcaataccgaagacgccgccttcagctttccgcctgcaggcctgacgctgcgctggtttagcgaagcggcggggcgtagcgatattattgattccgtgacgttgtcactaaaaatcgccgcgctgtcaaccgccatcgctctcgtacttggcacgctggctgcaggtgcgctgtggcgcagcacgttttttggcaaaaacgccgtgtcgctactgctgctattaccgatcgcgctgcccggcattattaccgggcttgcgctgctgaccgcctttaaggccgtcaatctggaacccgggctgctgactatcgtcgtgggacacgcgaccttctgcgtggtcgtggtatttaacaacgtgattgcccgctttcgccgcacttcatggagtctggtggaagcgtcgatggatttaggcgcaaccggcgggcaaacctttcgttacgtggtactgcccaatttgggatcggcgctgctggcggggggaatgctggcgtttgctctgtcgtttgatgaaattatcgtgaccacgtttaccgccgggcacgagcgtacgctgccgctctggttgcttaatcagctcgggcgcccgcgcgatgtcccggtcaccaacgtcgtcgcgctgctggtcatgctggtgacgatgtttccgattctgggggcctggtggctcactcgtgacggcgacatcagcgcggaaaacggaaaataa

SEQ ID NO: 172308 - DNA, 930 bp, Klebsiella oxytoca
atgacgatggcgataccctctgccggaggcggacgcctggccggcaccttctggcgtcatccctcgctggctctgtttctgctactgctggggccgctcatgtggtttggcattgtctatctggggtcgttgttgacccttttgtggcaaagtttctatacctttgatgatttcaccatgtcggtcaccaacgacctgacgctggccaatctgcgcgcgctgtttaatccggctaactacgacattattgtgcgcacgctggtgatggcgctatcggtgaccgtcgccagcgcgattctggcactgcccatggcctggtatatggcccgctatacccgtggcaagatgaaagcctttttctatatcgccgtgatgttgccgatgtgggcgagctatatcgtcaaagcctatgcctggacgctgctgctggctaaagatggcgtcgcccagtggttcctgcgccatcttggtctggaaagcgtactgagcatggtgctgacgatcccggcggtcggcggcaatacgctgtcgacctctgggctggggcgcttcctggtgttcgtctatatctggctgccgtttatgatcctgccggtgcaggcggcgctggaacgcctgccgtcttcattgctgcaggcttccgccgatcttggcgcccgtccgcgccagacctttcgctatgtggtgctgccgttagcgatccccggcattgcggcggggtccatttttaccttctccctgacgctgggcgattttatcgtgccgcagttggtggggccgccgggattctttatcggcaatatggtctattcccagcagggggcgattggcaacatgccgatggcggcggcgtttaccctggtgcccattgtactgattgccctctatctggcgttcgtgaaacgtctgggagcatttgatgcactctga

SEQ ID NO: 172309 - DNA, 1011 bp, Klebsiella oxytoca
atgcacgcggtagagctggataatgtttcgcgcctgtacggcgacgtgcgggcggtggatggcgtcagcatcgctattcgcgacggcgagtttttctctatgctggggccatctggctccggcaaaaccacctgcctgcgcctgattgccggatttgaacagctttcgggcggaacgatacgtatttttggccaaccggccagcgcgctgccgccctggcagcgcgatgtgaataccgttttccaggattatgcgctgtttcctcatatgtcggtactcgataacgtcgcctacgggttgatggttaaggggatcggcaaaaaggagcgccacgcccgtgcgcaggaggcgctggagaaggtggcgctcgcttttgtgcatgcgcgcaagccttctcagctttccggcggccagcgccagcgggtagccatcgcccgggcgctggtgaatcagcccaaggtcctgctgctggatgaaccgctgggggcactggatctaaaactgcgcgaacagatgcagctggagctgaaaaaactgcagcaggcgctgggcatcaccttcatttttgtgacccacgatcagggagaggctctgtcgatgtctgaccgcgtggcggtctttaatcagggacgcattgagcaggttgatgcgcctcaggatctctatttgcggccaagaacggcgtttgtcgccgggtttgtcggtaccgccaacgtgtttagcagcgagctggcgcagaagctgtgcgcgatgacgggcgcctggtcgctgcgtccggagcatattcggctgaatgccggcggggaggtgcagattcaggggatcgtgcaggcggtgcagtatatgggcgccgccacgcgcgtcgagctgaagctggctgacggcgagaagctgctggtgagtcaggcgaatgtcgatggtcaggctgcgctgaacgcccctccggtagggcaacaggtgctggcttcatggtcgcgtgcggcgatggtccccctggagagcggagggtga

SEQ ID NO: 172310 - DNA, 1146 bp, Klebsiella oxytoca
atgagcaaaaaaattgcccgtggcagcctttgcgtgctggggatggttttcctgacggcgcaggccgccgagccgccgacttctctcgataaaggcgaaggtcgtctcgatattattgcctggccgggatatatcgagcggggacaaaccgataaaagctacgactgggtgagccagtttgaaaaagagtccggctgtcaggttaatgtcaaaaccgccgccacgtccgatgagatggtcagcctgatggcaaaaggaggctatgacctggtcaccgcctccggcgacgcttcgctgcgcctgattatgggtaagcgcgtgcagccgattaacactgcgctgattactaactggcactccctcgacccgcgcgtggaaaaaggcgcgtggtttaacgtcggcggacaggtctacggcactccgtaccagtgggggccaaacctgctgatgtacaacagcaaaaccttcccgacgccgccggatagctggagcgtggtgttcgtaaaacaaaatctgccggatggaaaaaccaatcagggccgcgtacaggcttatgatgggcccatttatattgccgacgccgcgctattcgttaaagccactcagccgcagctgggtattaatgatccctatcaacttaccgaagcgcagtatcaggcggtactgaaagtcctgcgcgaacagcacccgctgatccaccgctactggcacgataccaccgtgcagatgagcgattttaaaaacgaaggcgtggtggcctccagcgcctggccctatcaggccaacggtctgaaagcggaaggccagccgattgccaccgtttttccgaaagagggcgtcaccggctgggcggataccactatgctgcacagcgatgctaaacatccggtttgcgcttataaatggatgaactggtcgctcaccccgaaagtgcagggggatgtcgccgcctggtttggttcgctgccggtcgtacctgcgggttgcaaagccagcgcgctgctcggggataaaggctgcgaaaccaatggttacaacgaattcgccaaaattgcgttctggaaaacgccggttgccgaaggcgggaaattcgtcccctacagccgctggacgcaggattacatcgcgattatgggcggtcgttaa

SEQ ID NO: 172311 - DNA, 1413 bp, Klebsiella oxytoca
atgaaaaagtaccagcggctggcgcagcagattaccgaacagatcgcgcttggggtgtggttacccggcgacaggttgccctcgctgcgcgaacaggtggtaagcagcggaatgagttttatgaccgtcagccacgcctatcagctactggagagccagggacgcatcatcgcccgtccgcagtccggctattatgtcgcgccgcagcccactaaaccgcggcagcccgcgccgcccgcccaggtaacgcgtgatgaagcggttgatatcaacacttatatctttgaagtgctgcaggccagccgccaggcctctatgttgcccttcgcctcggcttttcccgatccgcgactattccccttaccgcagctcaaccgctcgctggcgcaggtgagcaaaaccgcaaccgccatgagcgtgattgaaaacctgccgccggggaacgatgaactgcgccatgcgattgcccggcgctacgcgctgcagggaatgaatatctcgccggacgacatcgtgatcaccgccggcgcgctggaagcgctgaaccttagtctgcaggccgtcaccgaaccgggcgattgggtggtggtggaaaatccctgcttctacggggcgctgcaggctcttgaaagattgcgcctgaaagcgctatcggtggccacggatgttaaagaggggatcgatctcgccgcgctggagcaggcgctacagagctatccggtgaaagcctgctggctgatgaccaatgggcaaaacccgctcggctttaccctcagcgcggagaaaaaagcgcggctggtggcgctgctggcgcgctataacgtgatgctgattgaagatgatgtttacagcgagctctactttggtcgtgagaaaccgctgccggcaaaatactgggatcgcgacgatatgacgctgcactgcagctccttctccaaatgtctggtacccgggttccgtatcggctgggtggcggcgggcaagcacgcccgacggatccagcagctacagctgatgagtacgctctccaccagttcgccaatgcagctggcgctggtcgattacctttcgactaaacgctacgatgcccacctgcgccgtttacgccgccagcttgccgagcgcaaacagctggcctggcaggccctgctgcgccatcttcccgcagaggtaaaaattcatcatagcgatagcggttattttctctggcttgagcttcccgccggagccgatgcgggggagctgagcgcccgcgcgctggcgtataacatcagcattgcgccggggaaaatgttttccaccaccgccagctggacttcattcttccgctttaataccgcgtggggctggggcgaaaaagaggagctgggggttaaacgcctgggcgaactgattcgcgaaatgctggcttag

SEQ ID NO: 172312 - DNA, 1398 bp, Klebsiella oxytoca
atgttcggtcttgatgcattccacctggcgcggatccagttcgctttcaccgtgtcatttcatattatcttccccgccatcaccatcgggttagccagctacctggcggtactggaaggcttatggttaaaaaccaaaaacccgacctggcgctcgctgtaccacttctggtcaaaaatcttcgccgttaacttcggcatgggggtcgtctccggcctggtgatggcctaccagttcggtaccaactggagcggattctcggaattcgccgggagcattaccggcccgctgctgacctatgaggttctgaccgccttcttccttgaggccggattcctcggcgtgatgctgttcggctggaaccgtgtcggacctggcctgcactttttcgccacctgtatggtcgcgctggggacgattatctccaccttctggatccttgcatctaatagctggatgcaaacgccgcagggatttgagatcgtcaatggtcaggtggtgccggtggactggctggcggtgatttttaacccgtctttcccttaccgcctgctgcatatgtcggtggcggctttcctcagcagcgcgctgttcgtcggcgcgtcggcagcctggcacctgctgcgagggaacaatacccacgccgtccgcgcgatgttctccatggcgctgtggatgacgctgattgtcgcccccattcaggcgctgattggcgatatgcacgggctcaatacgttgaaacaccagccggccaaaatcgccgccattgaagggcactgggagaacgcgcccggagagcccaccccgctgctgctgttcggctggccggatatgcaacaggagcgtacccgctatggcctggagatcccggctctcggcagcctgattctcacccacagcctggataagcaggtgccggcgctgaaggagttcgccccggaagatcgccctgactccaccatcgtattctggtccttccgcctgatggccgggctcggcatgctgatgatcctgctgggcgcgctggccttgtggctacgctatcgcggccgcctctatcacagcaggccctttttacgctttgcgctatggatggggccttcgggacttatcgcgattctggcgggctgggtgaccaccgaagtgggccgccagccgtgggtcgtctatggcgttcagcgcaccgctgatgccgtctccgctcacggcgacctgcatatgtcgatcagtctgctgacttttatcgttgtctacggttcggtgttcggcgtcggctacagctatatgctacgcctgattcgcaaaggtccgcagaccgcgcagccgccggcctccggtacgccagcgcgtccactctccgccgctacgggccatgaacagcagaaggagttccgctaa

SEQ ID NO: 172313 - DNA, 1011 bp, Klebsiella oxytoca
atgggtatcgatttatcggttatttggtttgttatcattgtcttcgccaccctgatgtatatcgtaatggatggctttgacctgggcattggcattttatttaccactacccgggacacggcggaccgcgacgtgatggtaaacagcgtcgccccggtctgggacggcaatgaaacctggctggtgcttggcggcgcggggctgtttggcgcatttcctctggcttacgcggtcattatcgatgcgctggcgatcccgctcaccctgatgttgatcggtcttatttttcgcggcgttgcctttgaatttcgctttaatgcgacgccatcgcatcgtccattctgggatcgcgcttttatggccggttcccttctggccaccttcacccagggcatggtggtcggagcggtgatcaacggtttcccggtcaacggccgcagcttcagcggcgggatgtttgactggtttacgccgtttaccctgttctgcggcctggggctatgcgttgcctacgcgctgctgggtgccagctggctggtgatgaaaagcgaaaatgcgctccaccgcaatatgcgcatgaccgcgcgcggcttgctgttggcgctgctggcggtcattgtcgccatcagcatctggacgccgctggcgcaaccggccatcgcccggcgctggtttagcctgcctgacctcttcttcctgctgccggtaccgctgctggtggcggcgatcggcgcctggctctggcgaacgcttcgcaacagcgccagccacctgctgccttttactctcacgctggggctgatcttcctcggctttagcgggctggggatcagtatctggccgcatattattccgccggacattaccctctggcaggccgccgcgccgccgcaaagccagggctttatgctggttggcgcgctgcttattctgccggttatcctcggctacaccttctggagctactacgtttttcgcggcaaagttcaacacggcgaggggtatcactga

SEQ ID NO: 172314 - DNA, 126 bp, Klebsiella oxytoca
atgcaacgagtatggcttaagcgagcggtatggatgatagtgctgtggggaggcagcgtgctggcgctggcggcggtgagcatggggtttcggctgctgatgacggccgccgggctgaaggtttga

SEQ ID NO: 172315 - DNA, 234 bp, Klebsiella oxytoca
atgctcagaagatacgtttcagcgctactgctggtgtgcgccctgttttccggccacgtgctggcccaccagcacggacacgatttcttcccggtacagggcctcgagcagcagctacagcacgaagccgatagcgatgagctacgcagccagagcgaagaagccgcgtccgatctgcgcgaacatcaccgctggcaaaatgcgcgaaagccgaaaatgcacttctatccctaa

SEQ ID NO: 172316 - DNA, 1983 bp, Klebsiella oxytoca
atggataacgacgagcgtatgcgcctgcaaaaccatcatcttgaactattgagtcctgcccgcgatgccgggatcgcccgtgaagcgattttacacggcgcggatgcggtctatatcggcggaccgggcttcggcgcgcgtcacaatgccagcaatagcctgagcgacatcgccggactggtgccatttgcccaccgctacggcgcgaaggtgttcgtgaccctgaacaccattcttcatgatgatgaactggaaccggcgcaacgtctgataaccgatctgtacgaaaccggcgtggacgcgctgattgtccaggatatgggcgtgctggagctggatattccgccgattgagctgcatgccagcacccagtgcgatattcgcagcgtggagaaagcgaaatttctttccgatgtcggcttcagccaaatcgtcctcgcccgcgagctgaatcttcagcagatcaaagcgatttacgataataccgacgcgaccatcgaattctttatccacggagcgctgtgcgtggcctattccggtcagtgcaatatttcccatgctcagaccgggcgcagcgccaaccgcggcgactgctcgcaggcctgccgtctgccctatactctgaaagatgaccagggccgcgtggtggcctatgaaaagcatttgctgtcgatgaaagacaacgatcagaccgccaacctggccgcgctgatcgatgccggagtgcgttcctttaagattgagggacgctacaaagacatgagctatgtgaagaatattaccgcgcattatcgccagatgcttgacgccatcattgaagatcgcggcgatctggcccgctcgtcgttgggacgtacggagcacttcttcatcccgtccacggataaaaccttccatcgcggcagcaccgactattttgtcaacgcccgcaaaggcgatatcggcgcgtttgattcgccgaagtttattggcctgccggtgggtgaagtgctgaaagtaggcaaggattttctcgacgttgaggtgagcgaagccctgaccaacggcgacggcctgaacgtgatgatcaaacgtgaggttgttggctttcgcgccaacacggttgaaaaaacgggcgaaaatcgctaccgcgtatggccgaacgagatgcccgcggatttacacaaagtgcgcccgcatcagccgctaaaccgcaacctcgatcataactggcagcaggcgctgctaaaaacctccagcgagcgtcgcatcgcggtggatatcgaactgagcggttggcaggaacagctggtcttaaccatgaccagcgaggagggcgtcagcgtcacccatactctggacggcgattttgccgaagcgacccaggcggagaaagcgctgacgaatctgcgcgacggcctggcgaagctgggccagaccctttactactcgcgcaacatggaaattaacctgccgggtgcgctattcgtgccgaacagcctgttgaaccagctgcgtcgggaaaccgtagatatgctggatgacgcgcggctgaaagccgtggtgcgcggttgccgcaagccggtttccgtcccgccgccggtctatccggaaacgcacctgtcgtttctggcgaacgtctacaaccataaggcgcgcgagttttaccagcgttacggcgtgcagctgatcgatgccgcctatgaagcgcatcaggagaagggcgatgtgccggtcatgatcactaagcactgcctgcgctttgcttttaatctgtgtccgaaacaggctaaagggtcgattaaaagctggaaagccacgccgatgcagttgattcacggcgatgaagtgttgacgctgaaatttgactgtcgcccctgcgaaatgcacgtcgtcggtaagataaaaaatcatatccttaaaatgccgctaccgggcagcatcgtggcgtccgtcagcccggatgagcttataaaaaccctgccgaaacgcaagggcgcctga

SEQ ID NO: 172317 - DNA, 537 bp, Klebsiella oxytoca
atgaatattgcgcaacatctgtcggcgacgctaaaaacgctgcgccagcagcgcggctggagcctgtcgcgcctggcggaagaaaccggcgtatcgaaagccatgctgggccagattgaacgtaacgaatccagtccgaccgtggcgacgctgtggaaaattgccaccggcctgaacgtaccgttttccgcctttattatcgccgatgatagcgctgaaccagccgccttcgacccgcagcagcaggcgatggttgtgacgcctgtttttccctgggacccggtgctgcgtttcgatcacttctccattaccctggcgcccggcgcgctaagcgagtctacgccgcacgaggaaggggttatcgaacatgtggtggtgattagcggcgtgctggatctgtgcctgcagggcgagtggctgtcgctgcagccaggggaagggcggcggttcgccggtgatttagcgcacgcctaccgcaatagcggcgcgcagaccgctcatttccattcgctgatccactacccaaaagcacaataa

SEQ ID NO: 172318 - DNA, 426 bp, Klebsiella oxytoca
atggttacgaccagaacagctaaggaggccgatgctcccggcctgctcgtgctttttcaacagctcggctatccgatagatttagacaacctgcaatccttattacgggaacaaaacccctaccgctacgcgttgattgcccaggtaaaaggacgtttatccggggtgattgtagtgaacctgattgacccgatgcatgaaaaaggacgttgggggttaatttcggcgctggtgattgatgagtcatgccggggtatgggtgtggggcgaatattacttgtggaagccgaacggatcgcggccgccagcggttgtcgccaaattgaactctccagcagcgaacgacgggaacaggcgcataagttttatcagaacaacggctataaagaagtcagaaaacgctttttgaaatcgctcatatcctga

SEQ ID NO: 172319 - DNA, 1167 bp, Klebsiella oxytoca
atgcgctcttttactctgccttttccgactctgcttgccggttttgtcgcggtcttagtcggctacgccagttctgccgccattatctggcaggcagcggcggcggcaggcgccgatgcttcgcaaatcgccggctggatgaccgccttaggcctgggaatgggcgtgagtaccctggcgctcaccttatggcgaaaggtaccaatcctgacggcgtggtcaacgcccggggcggcgctgctggttagcggcctgcacggcgtcacgctggcgcaggcgattggcgtgtttatctttgctaacggcttaatcgtactgtgcggcgtaaccggtctgtttgcccggctgatgaaaatcattccccattcgctggcggcggcgatgctggccggtattttgctgcgttttggtatgcaggctttctccagcctgcagggcaatctgctgctatgcggcagcatgttagccgcctggctgatatgcaaagtctgccttccccgatttgccgtggtggccgccctgctggcgggaatcgcggtcgccgccctcagcggagatgtgacagggtcacatatcagctggcgctttgtcgcccccgcttttatcgctcctgaatttacgcccgcgctgctgcttagcgtcggcgtaccctttttccttgttaccatggcttcgcagaatgcccccggctttgctaccctgcaggcttcgggctatcgggttccggcttcatcgctgatcgtggcgaccggcggtctggcgctactgctgtcgccgtttggcgtctactcgatctgtatcgccgcgattacggccgcgatttgccaaagcccggaagcccatccggacccgctaaagcgctggctcgcggcggcggcggcgggtgttttttatctgctggcgggaatcttcggcggctccatcacttcgttgatgtcggcgctgccggcggcatggatccagatgcttgccggactggcgctgctgggcaccatcggcggcagcctgtttcaggcgctcaatcatgagcgtgaacgcgatgccgcggtggtgacttttctggtcaccgccagcggcgtggagctggccggtatcggctctgctttttgggggctggttctcggcggcgtcagctacgttttactgtcagcgctgcgccgagcgtag

SEQ ID NO: 172320 - DNA, 876 bp, Klebsiella oxytoca
gtgaaggctatggcttacgggactttcgaaacattgcgtcaaaaaaatgccgtgctgcgggagacggttaagctcaactccgggattcagctggcggcgtggtataacaatctcgataccataacggtacaaagcgatcaccacactctgagcctgtatattgccgatggctacgaaagctaccagaagacgccacatggctggaaaaacggcggcgggcccgatcgtttctgcctgatgccgaaaggcgatgagagcacctgggatattcgcggcgacctctcttttgtccatctttactgcaccgatgaacatctccgccgggtaggcgagcagatttgggaccgtagtccggcttcgttcacgctgcaggaaaaaaccttttccagcgatgacaaaattaccgctgtctatcgccagtttctgctggacaacgactggcagcagcaggcgaaccaccttacgttgagttccgccagcacgctgctgctcacgcacttgattcagcattattcaaacgttcagtggcgtttgccgacggtgaccggcggcctggcgccgcacgtcttgcgtaatctgctggcatggattgaggagaacctcgaccggccgctcacccttgccgatctggcgcaggaagcggcgctcagcgaataccattttgcgcggatgttccgccagtcaatgaaaatggcgccgcatcagtacgtgatgcagcgccggatggttaaagcgcaggcgctcattacccgcagtctgctgccgttaaccgatattgctatggcctgcggttttagcagcgccagccactttagcaatcgggtaaaaagcgccaccggcctgacgccctcgcagctacgctcggcgcagcgctga

SEQ ID NO: 172321 - DNA, 897 bp, Klebsiella oxytoca
ttgaacgcattactctatgggttagtcgtcgttatctggggtacgacatggattgctatctttttgcagcaggggccggtcgccgcgccggtgtctattttctggcgttttgccgtcgccagcatcaccatgctgaccattctgctggttacccgccgtcttcgcccactggccgcccgggaccatcttttctgcctgctgcagggctgctgcgtcttctgctttaatttctggtgtttttataccgccgctgcgtatatcaataccgggctggagtcggtgatcttctccatggcggtgctgtttaacgcgattaacagttttctctttttccgccagcagccgccgggccgtttctggctggccgccgcgctgggtctggcgggcatcgtaacgctcttctgggatgatttgtgggccaacggcctcaatgcatcgctgctgctcggtattacgctcagcgcattaggcacctacggattttcgctcggcaatatgctcagccttcgccaccagcgccgcggcctggaaaccttgaccaccaacagctgggcaatgctttacggcacgctggtcatgggcgctatcgccctggtacgcggcgatagttttgccccgcagtggacgctaagctatatgggcgcgctgctgtatctggcggtgtttggctcggtgatcgctttcggcgcctatttcacgctagtggggcgaatcggcgccagcaaagccgcctacagtaccctgttgtttccgctcgtcgcgctgacgatttccaccttttatgagggctacgtctggcatagcaacgccgtcgccgggttagcgctgattctgctcggcaatctggtgatgtttgctcgcccggagcagtggctgctgcggcgcaggctggcctga

SEQ ID NO: 172322 - DNA, 669 bp, Klebsiella oxytoca
atgcgtactcagttattttttaaggtcgccgcgctggctggcctgttagccctggccggttgttcatcaaaactggctaaacctgaacaatattccggttttttaaaagattactctggtctaaaagaaaccacctccgcttccggtaaaccggagctgcgctggatttctgcggattacaatccgaacaactatgacaatatcgtttataaccccatcacctattatccggtccctaaaccgacgacccaggttggcgaaaaggcgctcagcgatatcctgaattacaccaacaaagagatgaaacaggctatttccgagcgtaaaccgctggctaccaccgcagggaaacgcagcctgatcttccgcggcgccatcaccggcgtggattccagcaaagaaggcctgcagttctacgaagtgattccggtggcgatgattatcgccggtacccaggcggcaaccggccaccgtaccatggacaccaacctgttctttgaaggtgagctgattgacgcggcaacccacaagccggtggtcaaagtagtgcgcaagggggagggtaaaaatctctccaacgagaatacgccgctcaccgtcgagaccctgaagcaggtgatcgatgatatggcgattgacgcggtgaaattcgaccctaataaccgttaa

SEQ ID NO: 172323 - DNA, 1593 bp, Klebsiella oxytoca
atgcaacgcagattcacgacgcttgctctggcggtagcggccctgacggccagctcagctattagcgcaaaaacgctggtctactgttcagaaggatcgccggaaaactttaaccctcaactctatacctcgggaaccagcgtggatgccagcgcggtaccggtctataaccggctggttgactttaaagccggtactacggaattagtgccgagcctggccgaaagctgggaagtcagcgaagatggcaaagtttatactttccatttacgtaaaggcgttaaattccagagtaataaatatttcaaacccagccgcgattttaatgccgatgatgttattttttcatttatgcggcaaaaagatcctcatcatccttatcacaatgtctccaatggcaattattctaattttgaaagcctggagtttggtcagttaattaccgcaatcgataagcctgatgaatatacggtgcgttttacattagcgcatcctgaagcgccatttgtcgccgatcttgcctggtattttgcctctattttatcggcggaatatgccgatgcgatgttaaaagccggcaggccagaacgcgtggacatggacccgattggcaccggtccgttcaaactcgctcagtatcaaaaagattcccgcattctcttcaccgctttcccggaatactggcaggggaaagcccatatcgatcgcctgattttcagcatcacgccggacgcttcggtgcgttacgccaagctggagaaaaacgagtgccaggtaatgccgttccccaatccggcagacctgccgcgaatgaaagagaacaacgcgatcaatctgatgagcaaagcgggtctcaacaccggtttcctggcgtttaatacgcaaaaagcgccgctggacaacgtcaaggtgcgccaggccttagcgatggcgatcaataaaccggcgatcattgaagccgtcttccacggcaccggtacggcggcgaaaaacctgctgccgccgggggtatggagcgcggatagccagcttaaagattacgagtatgacccgcagaaagcgcaagcgctgctggcggagtcgggcgtttccgggccgataaccatcgacctgtgggcgatgccggtgcagcgtccttataatccgaacgccaaacgcatggccgagatgattcaggccgactgggcgaaaatcggcgtgcaaactaagatcacaacctatgagtggggtgaatacttaaagcgggttaaggatggtgaacaccaggcggcgctgatgggctggaccaccgcgaccggcgacccggataacttctttggcccgttgtttacctgccagtcggcaaacggcggctctaactcggcgaaatggtgctatcagccgttcgataacctcatcgccgaggcgaaatcgataaccgatcgccaaaaacgcgagacgctctatctgcaggcgcagcagatgatgcacgaccagatgccggcggtgatgattgcccactcgacaatttttgaaccggtacgtaaaaacgtttctggttacgaaatcgaccccttcggcaagcatattttttatcaggttgatataaaataa

SEQ ID NO: 172324 - DNA, 1230 bp, Klebsiella oxytoca
atgtcatcagccctggccagtcaattaacccaacgcttctttcgctatctggcgataaccagccaaagcgatccgcgagcgtccaccctacccaccaccgccgggcaacacgcgatggcgcaggcccttgcggatgagctacgccagcttgggctggatgacattgtgattgacgaacacgccaccgtgacggcggtgaaaaaaggcaatgtcccagacgcgccgcggattggctttattacccacatcgataccgttgacgttggtttgtcaccggagattcatccacaaattctgcgcttcactggtgaagatctctgtttgaacagcgagaaagatatctggctgcgcgtcgtcgagcatccggaaatcctcgcttatcccgatgaagagattatttttagcgacggtaccagcgtgctcggggcggataacaaatccgccgtcacggtggtgatgacggtgctggaaaacctcacggcggagcatcgccacggcgatatcgtggtggcctttgtgccggatgaagaagtgggtctgcggggagcgaaagcgctggacctctcgcgctttgccgtcgattttgcgtggaccatcgactgctgcgagctcggcgaaatcgtctatgagaactttaacgccgccgccgcggagatccgttttaccggcgtcacggcccatccgatgtcatcaaagggcgtactggtgaacccgctgctgatggccaccgattacatgagccatttcgatcgccagcaaacgccggaatatactgccggacgcgaaggctacgtgtggtttaacggcatccagggcgatcaaaatagcaccctactgcaggccagcatccgcgacttcaatctcgccagctttaatcgccgcaagcagcagatcggcgaagtggcgcaaaaaatcgccgcgcagtatccaaccggtaaggtggaatttcacgtcagcgatacctacagcaacatcagcaatgcgattggcgaagatcgccgcgccattgatctgatgttcgaagcaatggaaagcttaggcattacgccgaaaccaacgccgatgcgcggcggcaccgacggcgcggccctgtcggcaaaaggggtgttaacgccaaacttcttcaccggcgcgcataacttccactcgaagtttgaatttctgccgctgcgcgcctttgaagcctcttatcagaccgcgttccagctctgcctgttagccgcgcgttag

SEQ ID NO: 172325 - DNA, 597 bp, Klebsiella oxytoca
atgacgcttcgtgacgaaaactactttaccgataaatacggcatgacccgcacccattcggaggtgctgcacgccgccacgctgatcgccccgggcagggcgctggatctgggctgcggcaacggtcgcaatagcttgtatctggcagccaacgggtttgatgttaccgcgtgggacaaaaaccctgccagcatcggtaatcttgaaagcattcgtcaggcggaagggttggagaatctgcggacggcgattaaggatcttaacgccctgagctttgacggcgagtatgactttattctttccaccgtggtgatgatgtttcttgatgcgcagaccatcccgggtctcatcgccaatatgcaacgctgtaccaaacccggcggctacaatctgatcgttgccgctatggataccgacgattatccgtgcaccgttggcttcccgttcgcctttaaaccgggtgagcttagccactactaccagggctgggcgttcctcaagtacaacgaagacgtcggtgaacttcaccgcaccgacgccaacggcaatcgtatcaaactgcgtttcgccaccatgctggcgcgcaaaccggcctaa

SEQ ID NO: 172326 - DNA, 999 bp, Klebsiella oxytoca
atgaataaaacgcagcgcgcgagccgggtgttgaatcttccggcgggctattttggtatggtactgggcattatcggcatgggcttcgcctggcgctacgccagcaccatctggccggtgagccgggtcgtcggtgacgccctggtgatcgcggctacgctcatctggctgctgctggcgctggcatttattacccgggcggtccgtttcccgcacagcgtactgcaggagatgcgacatccggtggccagcagttttgtcagcctgtttccggcgaccaccatgctggtcgccatcggctttgttccctggctgcggccgctgtcgctggtattattcgcgattggggtggtgctgcagctgagctattcggcatggcagagcgccggattatggcgggggaaacatcccagcgaggcaactacgccgggtctctatctaccgacggtggcgaataactttatcagcgccatggcctgcggcgcgttgggctttaacgacgccggactggtgtttcttggcgccgggatcttctcctggctaagcctggagccggtgatcctgcagcgcctgcgcagcgatggcgaactgccgacggcgatgcggacttcgctcggcattcagctggcgccggcgctggtggcgtgcagcgcctggctgagcgtaaacggcggcgaggcggataccttcgctaagctgctgttcggctatggtctgctccagctgctgtttatgctgcggctgatgccatggtatctacgccagccgtttaacgcctctttctggagcttctcatttggcatctccgcgctggcgacgaccgggctgcatctcggtcatcagcatccgggcggctttttccatactctggcgttcccgctgtttctgtttaccaatctgatcgtcggcctgctgctggttcgtaccttcttgctgctggtgcgcggtaaactgcttattcgcgttgaacgcgacgcattattaaaaaataaggattaa

SEQ ID NO: 172327 - DNA, 981 bp, Klebsiella oxytoca
atgcgcaaatattacctcagcgagaaggttcgccagtttcactatgaggccgacggcaacaaacatagcgtaaatctgcggcaaattgtcgccttacgtgatttcgctgacgtaaaaagcggtgatgaaggcggctggctggacgatgaagcagcccttagccacgagggcgcgtgctggatttatgatcctaatagcgccgtatttgccggggcaaaaattgagggcaatgcgcgcttaaccggcgagtgcattatcagccatggggccatcgtcaacggtaacgcttgtctggatagcgccgcagtgagccataatgcgcaaataggtgacaacgtcacagtttcacactcgcacattcgcgggtgctgccacctggccgaccacgcgcggatcctcccccactgtttaattatcgccgctcaaggtctgactgccgacaacgataaaatcctgcgcatttatcagcgggccacggtcagcgcatcgcgcgtcgttcaccaggcacaaatttacggcgatgcgtttgtcgaacacgcttttgtcgagcaccgggcggaaattttcgatcatgcgcggctggaaggtaatgaagagaacgacgtctgggtctgcgataacgcccgcgtttatggccatgcgaggattatcgccgggcgggaagaagacgctatcccgaccctgcgctacagttcgcaggtggcggagcacgctgtggtcgaaggtaattgcctgctgaagcatcgggtgatggtaggcggccatgcgcacctgcggggcgggccgattctgctggacgatagtgtgttaattgaaggccatacggtgatttgcggcgatgtggtgatcgagcatcaggtcactatcggcgatgaagcacgcatcgaagccagcgcgggagacgccatttctatccggggcgcgaaggtcattaacggcgacgaacattatacccgtacgcccattgtcggctttctttaa

SEQ ID NO: 172328 - DNA, 585 bp, Klebsiella oxytoca
atgtccgccgaaaacagatctgctatcgaacatatccccgttacggattctctctccctgcgcgcggttgacgagcgtcacgtgccggaactgcatcagctggtgatgaaaaaccagcgctggcttcagcagtcgctgagctggcccgctgaggtgactcacgaagaggagacccgccgccacgtgcagggcaacgtgatgctccaccagcgcggctatgccaagatgtttttgctctttctgcaggaggagattgtcggcgtactgtcgttcaatcagatagagccaatcaacaagaccgcttacattggctactggattgatgaaagccatcaggggcaggggctgctttcgcaggccctgcaggcgctgatggactattttgcccgcagcggtacggtccgccgctttgtgattaagtgtcgggtggcgaaccacaaaagcaatcaggtggccctgcgtaacggttttagcctcgaagggtgcctcaggcaggctgagtatctcaacggttcgtatgatgatcagaatatctacggacgcattatcgatgatagcaccgggcaattcccgggtcgcggctga

SEQ ID NO: 172329 - DNA, 1656 bp, Klebsiella oxytoca
atgaaccgcagacgttttctcaaatcttccatggctgttgccgccgtatgcggaacgtcaggagtcgcctctctattttctaaagccgcattcgccgaagattcgggaattgccgatgggcaaacgcgccgttttgattatagtgtcctccagtcgatggcccacgatcttgcccgtcagccatggggcggcgcgcctcgcgatctgccgccaaccctggcaaccctgacgccgcaggcctacaacagcattcagtatgacgccgcgcactccctgtggagcaacattgaagagcgcaagctggatatccagttttttcacgtgggaatggggttccgccgccgcgtgagaatgttctcgctggattcacaaactcaacaggcacgtgaaatacacttccggcctgaactgtttaaatacaatgatgccggcgtcgacaccaaaaagctggtgggccagagcgacctgggttttgccggttttcgcgtatttaaggcccctgaactggcgcgtcgcgacatcgtcgcgttccttggcgccagctacttccgcgcggtggacagcacttaccagtacggtctttccgcccgcggcctggcgatcgatacctttaccgatacgccagaagagtttcctgacttcacctctttctggtttgagaccgttaaaccgggagccacggtatttaccgtctatgcgctgctcgacagcccaagcgtcaccggcgcctataagttcatcgttaactgtcaggagacgcaggtgatcatggatgtggaaaaccatatctatgcgcgcaaagacatcaagcagctgggcatcgcgccgatgaccagtatgttcagctgcggtaataacgaacggcgaatgtgtgacaccatccatccgcaaattcacgactctgaccgtctgtcgatgtggctgggcaacggcgagtgggtttgtcgcccgctgaataacccgcaaaagctgcagttcaacgctttccaggataagaatccgcgcggttttggcctgctgcagctggatcgcgacttctcccactatcaggatattatgggctggtacaacaagcgcccgagcctgtgggtcgaaccgcgtaaccagtggggcaagggggccgtcaacctgatggagatcccgaccactggcgaaacgctggataacatcgtctgcttctggcagccggagaagccggtgaaagccggggatgaactggacttccgttatcgtctctactggagcgcgcagccgccggtacgctcgccgctggcgcgggtgatggcaacgcggacggggatgggcggtttcccggaaggctgggcgccgggcgaacactatccggataaatggacccgtcggtttgctatcgattttgtcggcggcgacctgaaggccgctgcgcctaaaggcattgagccggtcattaccctgtcgagcggtgaagcgaaacagatagaaatcctctacgttgaaccctttgatggctaccgcattcagtttgactggtatccgacttcggattcgactgacccggttgagatgcgcatgttcctgcgctgccagggggaggctatcagcgagacctggctttatcagtacttcccgccgccgccggataaacgcaactatgtcgacgatcgggtaatgaggtaa

SEQ ID NO: 172330 - DNA, 624 bp, Klebsiella oxytoca
atggccaaaccgtatgttcgtctggataaaaatgatgccgccgtgctgctggtcgatcaccagaccggattgctttcactggtgcgcgatattgatcctgataaattcaagaacaacgtccttgcccttggcgacctggcgaagtatttcggtctgccgaccatcctgaccaccagcttcgaaaacggccctaatggtccgctggtgcctgagctgaaagagcaattcccggatgccccctatattgcgcgcccgggtaatattaacgcctgggataacgaagatttcgttaaggcagtgaaagcgacgggcaagaagcagctgatcattgccggggtggtgacggaagtgtgcgtggcttttccggcgctctcggctattgaagaggggtttgatgtatttgtggtgaccgacgcttccggcacctttaacccgattacccgcgatgcggcctgggatcggatgtcgcaggctggcgtgcagctgatgtcgtggtttggcgttgcctgcgaactgcatcgcgactggcgtaatgatatcgaaggactgggcacgctgttctccaaccatatcccggattatcgcaacctgatgaccagctttaatcttctgaatcaaaaataa

SEQ ID NO: 172331 - DNA, 1509 bp, Klebsiella oxytoca
atgcagaatccgtccaccccgctggtgaaaacccggcaggggatactatccggcacctctgaagagagcattcatatctggcgcggtattccttatgccgcgccgcccgtcggcgatcttcgctggcgcgcgccgcagcctgctgcccgctggcagggcgtgcgccgggcagagaccttctcggcctccagctggcaggatattgaatactgccgcgagctcggcggcggcgatcccggcagcttttccgaagattgcctctacctcaatgtctggtcgcccgccgcccgatcgcagccgctgccggttatggtctggctgcacggcgggggctataccatcggcgcgggaagtttgccgccctatgacggcaaagccttagcttcccgcggcgtggtagtggtgacggtcaactaccggctcgggcatctgggcttttttgcccatccggcgctggaaggggaagacggcgagcgtatctataacttcgcgctactcgatcagatcgccgccctgcagtgggtgcaggagaacattcacgcctttggcggcgatgcggctaacgtgacgctgttcggggaatccgccggcgcgcgcagcgtgctgtcgctgatggtttcgcctaagtccagaggcttgttccataaagcgatagtccagagcggctataccttgcccgatctgccgcgagagaaggcgctggcgaaggggcagcttattgcggaacacttttctttgccgcaggccagcgccgaacagctgcgggcgattccggcgcaagcgttctggtcgttgaccgcgccgttgaccatcggcccggcacccgtggttggcgatgccgtgctgccgcagccgatgctggagactttttttagcggacgtcagcatcccctgccggtgatgatcggttcgaacagcgatgaggcgagcgtcatggcggtgtttggcgtcgatatcgccgggcagatccagaagcttcgccgtgaacgccgtttcggtctgggtctaattaaattgctctatcccggcgtgaagggagatgaagcgctggggcgcgaagtttgccgggatatggcctttaccactctgggctatgtggtgatgcaggctcagcagcgagtagggcaaccgtgctggcgctactggtttgactacgtggccgaggcggaacaccagacctatccgcacggcgcgtggcacggtaatgaagtggcatacgtttttgacaatctcgaccttgccgagccggtacgaaattatgccaacgatcgcgacagagactttgccgcccgggtcgccgactattgggcgaacttcgctcgcttcgccggcaatgactgtcatgaactctcagggccggtacgctggcccgccagcgtgcgcggacgggatcgcctgctgcgaatcgggctgcacaaacgggccggctttaaggtggagaaccgctttatgcgcgcgcgtctggcgctgtttcggcgggtcatgaagcatcatgtgacgctggattaa

SEQ ID NO: 172332 - DNA, 1344 bp, Klebsiella oxytoca
atggcgaacaccatcacggctgatgagattcgggagtgcttttcgcaggcgatgtcggcgatgtaccagcaggaagttccgcagtacgggacgctactggagctggtggccgacgttaacctggctattctggagaataacccgaagctgcatgaacaactggctaacgccgatgaactggcgcggctgaacgttgaacgccacggcgcgatccgcgttggtacggcggaagaactggcgaccttgcgtcgcatgtttgccattatgggaatgtatcccgttagttattacgatctgtcgcaggctggcgtgccggttcactcaaccgcgtttcgtcccgttgatgacgccgcgctggcgcgcaacccgtttcgtatttttacttcgcttctgcgccttgagcttatcgctaatgaggcgttgcgtaagcgggcggcacaaatcctttccgggcgcgatatcttcaccccacgctgtcgtgaactgattgcgctttatgaacagaaaggagaattcaccgccgcagaggcccgggagttcgtcgaacaggcgctggaaacctttcgctggcatcgacagaccctcgtcgatgaagaaacctatcatgcgctgcacgatgagcaccggctgattgccgatgtcgtctgtttccccggctgccacatcaatcatctgactccgcgcaccctggatatcgatcgggtacaggcgctgatgcctgaatgcggcatcgccccgaaggcgttgatagaagggccgccgcgccgcgaagtgcctattttactgcgccagaccagctttaaggctctcgaggagccggtgatgtttgccggagagcataaaggcacgcataccgctcgctttggtgaaatcgagcagcgcgggattgccctgacgccgaaaggccgcgcgctctacgatcgtcttctgggcgaggcgggggtgggcaaggataacctcaaccatcagcgtcatctgcaggaggtgtttagcgcgtttccggacagcgaattcctgctgcgtcagcagggactggcatacttccgctaccgcctgacccctgccggagaagcccatcgtcaggcgtttcgccccggagacgatccgcagccgctgatcgaacgcggctgggtgattgcgcaaccgattatttatgaagactttttaccggtaagcgccgccgggatatttcagtcgaatctgggcaacgaggtgcagacccgcagccacggcaacgccagccgggaggcctttgaggaggcgctgggctgtgcggtttatgacgagttcaccctctatcagcaggcggaagagcgcagcaaacgacgttgcggtctgctgtaa

SEQ ID NO: 172333 - DNA, 741 bp, Klebsiella oxytoca
atgaacgacaaatggtcaccgcgcgaggttctgcatcgcgactatagcagccatcctccggcttacgcgccgggctataaaaccagcgttctgcgctcgccgcgcaatgcgcttatctccctacagaattcactttcggaaatcaccggaccggttttcagtagcgacgatctcggcgcgctcgataacgacctgatcctgaattacgccaaagacggcctgccgattggcgagcggattattgtgcacggctacgtacgcgatggattcggtcggccgatgaaaaatacgctggtcgaagtctggcaggccaacgctggcggacgctaccgacataaaaaggatcaatatctggcaccgatcgacccgaactttggcggctgtggacgcgtgctgaccgacgagaacggctattattgttttcgcaccatcaaacccggtccctacccgtggcgcaaccaggtaagcgactggcgcccggcgcatattcacttctctctctccggagacgcctgggcacagcgtttaattacgcagatgtattttgaaggcgatccgctgatcaaacagtgtcctatcgtcaaaaccatcaataacgacgatgccatcaggacgctgatcgccgagctggatccccatgccgccgtaccgctggactcgctggcttaccgttttgatctcgtgctgcgcggccaccgcgccacgctgtttgaaaaccgcacgcagggggccgcccgatga

SEQ ID NO: 172334 - DNA, 621 bp, Klebsiella oxytoca
atgagagattttttacccgaaaccgcttcacaaaccgccggtccttatgtgcatatcggcctggcgccggacgccgccggatttcatatctttgagaataactttggcccaacgctgacgacccctgcgaccgagggtgagcgcattaccattgaaggcagagtcatcgatggctccggaacgccggtgcgcgatgtgctactggaaatctggcaggccaacgccgccgggcgctacaatcacccggacgatcggcagcaaaacaaaaagctggatgcggagtttcgcggctgggggcgcagctgctcggactttaccagcggtatctggcgcttcgaaaccattaaacccggcgccgtggtgggccgtgatggccgcgtaatggcccctcacgtcaatttatgggtggtggcgcgcggaataaacattggccttaatacgcggatgtacttctccgacgagcaggacgctaatcaggccgatccggtactcaatctgattgagtgggaagttcgccgtcagaccctcatcgggcagcgcgaagtgcgcggcacggaaatcgtttatcgcttcgatattcacttacagggcgacaacgaaaccgtgttcttcgatatctaa

SEQ ID NO: 172335 - DNA, 924 bp, Klebsiella oxytoca
atgcaaaaaaatggtcttttcagtcagcgcattcgcttgcgccatctacataccttcgtggccgtcgctcaacagggaactcttgggcgcgcggctgaaaccttaaaccttagccaaccggctttgtccaaaaccctgaatgaactggagcagcttaccggtacgcggctgtttgagcgcggacgccttggcgctcagctcacgctggtcggggaacagtttcttacccatgcggtgaaagtgctggacgcgctcaataccgccgggcaagcgctgaatcgtaaagaaggcctcagcaacgacatcgtgcgtatcggagcgctgccaaccgctgcgctggggattctgccctcggtgattggccagtttcaccagcagcaaaaggatatcaccctgcaggtcgcgaccatgaataacaccatgctgctggcgggcctgaaatcgggagaaatcgatatcggcatcggaagaatgtccgatccggagttgatgagcggtctgaactatgagctgctgtttcttgaatcgctgaagctggtggttcgtccggggcacccgctgctgcaggaaaccgttaccctaagccgggtgatggagtggccggtggtggtatcgccaaaaggcacactgccgcgacagaatgcggaagccctgctgcaaagccagggctgtaaaattcccactggctgcatcgaaacgctgtcggcctcgctctcgcgccagctcaccgtcgattacgactacgtgtggttcgtcccctccggcgcggtgaaggacgatctgcgccgtggactgctcgccgcgctgcccatacccactcagggcgctggcgaacctatcggtattctgacccgcgtggatgccaccctcaccgccggtagccaaacgttgctgagcgccattcgcaaatctatgccggtctga

SEQ ID NO: 172336 - DNA, 186 bp, Klebsiella oxytoca
atgaatcaaattttcaagttaactcttttgaatgaagtgaccgtggccttcataaaagcgggttttttgctgttattgatttcgagtgaaccatttggtgaaatcgtggctatgatagatctgttaaataaatttgcgcaattgttaatgaatgatttcgcactaattgattattgtgatgaatga

SEQ ID NO: 172337 - DNA, 2391 bp, Klebsiella oxytoca
atggcaactggcaacgtgccgcgagggttcccacggatcctgcagtggcttctcgccggactgatgctgatcatcggtctggctatcggtattcttggtgcaaagctcgcctcggtcggcgggacgttctattttgcgattatgggcctggtgatggtgatcgcctcagcgctcattttccgcaaccgtcgcggcggcatactgctgtatgggctggcgtttatcgtctcgatcgtctgggcgattagcgacgcgggatggacttactggccgctgttctcgcgcctgttcgcgctcggcgtgctggccttcctgtgcgcgctggtgtggccgttcctttcccgccagcctgcgaaaaaagggcccgcgtttggcctggcagcggtgttggcagtggtcctgttggcaagtttcggctggatgttcaaatctcagcctctggtcagcgccagcgaggcggtgccggttaaaccggtcgccgccggcgagcagcagaagaactgggcgcactggggcaacaccacccacggcgatcgcttcgccgccctcgaccagattaacaaacagaacgtgaaccagctgcaggtcgcctggatcgcccataccggcgatatcccacagagcaatggctccggcgcggaagaccagaatacgccgctgcagattggcgatacgctttacgtctgtacgccctacagcaaagtactggcgctggatgtcgatagcggtaaagagaagtggcgctatgattcaaaagccaccgcgccgaactggcagcgctgccgtggtttaggctattacgaagacagccaggcccaggtgtcctctgccgccgatacgcagccggccgccgatgcgcagccggccgcctgctcccgccgtctgttcctgccaactaccgacgcccgtctgatcgccattgatgccgataacggtaaactgtgcgacgcattcggcgaccacggtatcgttgaccttagcgtggggatgggggaaatcaaagcaggttactaccagcaaacctctacgccgctggtggcgggtaacgtcgtcgtggttggcggtcgcgtggcggataacttctccaccggcgagcctccgggcgtggttcgcgcctatgatgttcacaccggcaagctggcgtgggcatgggatccgggctacccgaacctgaccggtgaaccgcctgcagggcaaacctacacccgcggtacgccgaacgtctggtcggccatgtcctatgacgcgaagctgaatctgatttacctgcctaccggtaacgctaccccagacttctttggcggcgaacgtaccgcgctggacgataaatacagctcttccatcgtggccgttgatgcgacgaccggacaggtacgctggcattatcagaccacccaccacgatctctgggacttcgacctgccttcgcagccgctgctgtacgatcttcctgacggtaaaggcggcaccaccccggtactggtgcaaaccagtaaacagggcatgatctttatgctcaatcgcgccaccggtgaaccagtcgccaaagttgaggaacgccctgtccctgcgggcaacgtcaaaggcgagcgctactccccgacccagccctattccgttggcatgccgatgatcggcaacgagacgctgacagagtcggatatgtggggcgcgacgcctgtcgacctgttgctgtgccgcattcagtttaaagagatgcgccatcagggtgtcttcacccctccgggcgaagatcgttcgctgcagtatcctggctcgctgggcgggatgaactggggcagcgtgtcggttgacccgaataatagcctgatgttcgtcaacgatatgcgccttggcctcgccaactatatggttccgcgcgccaacgtggcgaaagacgccagcggtatcgaaatggggatagtgccgatggaaggcaccccgttcggcgccatgcgcgagcgcttcctgtcgccgctgggcattccttgccagaaaccgccgttcggcacgatgtcagcggtcgatctgaaaaccggcaagctggtgtggcaggttccggtgggcaccgtagaggacaccggtccgctggggatccgcatgcatatgccgatccctatcggcatgccgacgctgggcgcttcgcttgccacccagtccggcctgctgttcttcgcgggtacccaggacttctacctgcgcgcgtttgataccgccaacggtaaagagatctggaagtcgcgtctgccggtcggcagccagtccggcccgatgacctatgtctcgccgaaaaccggtaagcagtacatcatcatcaatgcgggcggcgctcgccagtccccggaccgcggcgattatattattgcctacgcgctcccggagcagaagtaa

SEQ ID NO: 172338 - DNA, 279 bp, Klebsiella oxytoca
atgaagagttcaacctgccgcctgctcgcaggcaccgttttggcgttagccgctgcctccgcacaggcgctgaaggccccggaagtggacctgcgcgatccgacgatctgggaagagaaaacggccagcccgctcaccgctaaccagccgccctgcgaggtttttagcggcccgcactgcgcggtctgggaagatgaaaaatcagatattcagcgagaacgggagcgtcgggaacagcggcggtggcataacggttatgaaaatttgcggcgagaatag

SEQ ID NO: 172339 - DNA, 1119 bp, Klebsiella oxytoca
atgaaatcacgtgcagccgtcgcgtttggcccaggccagccgctttcaatcgttgagattgacgtcgcgccgccgaaaaagggcgaagtgctggtgaagatcacccataccggcgtatgccataccgatgctttcaccctctccggcgacgatccggaaggcgtcttcccggcggtgctgggtcatgaaggcggcggtattgtcgtcgaggttggcgaaggcgtaaccagcctgcagccgggcgaccacgttattccgctctacaccgccgaatgcggcgaatgtaaattctgtaaatcaggcaaaaccaacctctgtcaggcggttcgtgctacccagggtaaaggcctgatgccggacggcaccacccgtttctcttataacggtgaaccaatctaccactacatggggaccagcacctttagcgaatacaccgtagtggccgaaatttcgctggccaaagtaaacccgcaggcgccgctggacaaagtctgcctgctgggctgcggcgtcacgaccggcatcggcgcggtgcacaacacggcgaaagtgaaagagggcgataccgtcgccgttttcgggcttggcggcattggtctggcggtgattcagggcgcggtacaggcgaaagccgggcgcattctggcggtggatactaacccggaaaaattcaccctcgccaaagaaatgggcgccaccgactttatcaacccaaatgattacgataagccgattcaggatgtgattgttgagctgaccgacggcggcgtcgactttagcttcgagtgtatcggtaacgtgaacgtgatgcgcgcggcgctcgaatgctgccataaaggctggggcgaaagtgtgattattggcgttgctggcgcaggccaggagatcaaaacgcggccattccagctggttaccgggcgcgtctggcgcggctccgccttcggcggcgtcaagggacgcactcagctgccgggcatggtggaagacgcgatggcgggcaaaattcgcctcgacccgtttattacccaccgtatgccgctggatcgaatcaacgaagcttttgacctgatgcatgaagggaaatcaattcgtaccgtcatccatttcggtgacaactga

SEQ ID NO: 172340 - DNA, 276 bp, Klebsiella oxytoca
atgccacattcacctgaagataaaaagcgtgccctcagccgggtaaggcgcatccgcggccaggttgaagcgctcgagcgggcgctggaatctggcgaaccctgtatgaccattctgcaacagattgcctctattcgcggcgccgctaacggcctgatgggggagatggttgagattcatctgcaggacgaactggttagcggagaaacgacgccagaccagcgcgccgccagaatggcggaagtcgggcatctgctacgatcctatttaaaataa

SEQ ID NO: 172341 - DNA, 474 bp, Klebsiella oxytoca
atgaaagtcagacttgccatcgcagaagaggctccggccctttgggaagttcgtaatcaggcgattcgccacggctgccgtgaaagctatgctgcggaagtcctccaggcctggactcccgacaacatgcctgaaggttatcgccatgcggtgctcgataatccattttttgttgttgatgatgggcagggcaagccagtcgccagcggctatctggatatcaaagcgggtagcgttgaagccatatttactttgccgacctgggagggtaaaggctgcgccagcatgattatggcggcgattatcggggaggcgaaacaacgcaagttcaggcacattaccctcgatgcaacgccaaacgcggccggtttttatctgcgcctgggattcacttcaaccggcgaaaagcgctggcattcgaacatggcgaacgccgacttacgctgtgaatcgatgatccttagcctcgactga

SEQ ID NO: 172342 - DNA, 528 bp, Klebsiella oxytoca
atgcgcgataaatactctggcctgcagataggcatccactggctggtttttttattagtgattggcgcgtacgcggcgatggagctgcggggctttttcccgcgcagcgcgcggcctgccattaatatgattcacgtctcgtgcggtatttctatctttgttctgatggtggcgcgcctgatcgtgcgcctgaaatcaccggcgccgccgatagtccccaaaccatcgccgatgatgaccggcttcgcgcatctcgggcatctggtgatctatctgctgtttatcgcgctgccgatcatcggcatggtcatgatgtactatcgcggcaacccgtggttcgcttttggtctgaccatgccgcacgcagcggaaagcgactttgaactggtggataatctgaaagcgtggcatgagctgctggccaataccggctgctttattatcggcctgcacgcgctggcggcgctgatgcaccattatttctggaaagataacacgctgctgcggatgatgccgcgtaagcgctaa

SEQ ID NO: 172343 - DNA, 243 bp, Klebsiella oxytoca
atgtttgtagaactgatttatgacaaaagaaatttcgagggattggccggcgctaaagagatcattcttaatgaactgacgaagcgagttcaccgcatttttcccgatgccgacgtccgcgtaaaaccgatgatgactttagcttcgattaataccgacgccagcaagcacgagaaggagcagatcagccgcgccgtgcaggaaatgtttgaagaagccgatatgtggatgcaggaagattaa

SEQ ID NO: 172344 - DNA, 156 bp, Klebsiella oxytoca
atgaacacatttagcatcatagctatcccattctttgccgcagctattgttcttctggccttagccgcgagccgaaagaaccgaacctgttatatcgttggcggcgtgttaatggcttcatccgtggttaacgcagtgattggcatggcgctgtag

SEQ ID NO: 172345 - DNA, 198 bp, Klebsiella oxytoca
atgaacaacaaagacgagcaaacggggctgatcgggcttgcgattggcgcagcggtcattggcctggtgtctgaccagaagccaattaatcgggaaagtattgttgaggaactgatgcggttaggcaggcagaagggagatggcgtcgaggacgagatttttaaaaaagcggcaacgctggtgcgaaaggggatataa

SEQ ID NO: 172346 - DNA, 204 bp, Klebsiella oxytoca
atgatcacttacgatcgtaaccgcaaccctattactaacggtagtcaggtaatgattaacgggacgggtaaaaccggtaaaattgttgctatacatgccaatggtcttactcctgcccagctgcgtcgtaataagacagtagaagttgaaggcgctgaaggcaaattcgagcccgttgaattgatccgtcttggactccactaa

SEQ ID NO: 172347 - DNA, 972 bp, Klebsiella oxytoca
ttgaaattagccggacctcatccagatgaactgcgtcgtctgcaatcgctgcgggcatccgggttactgaatagcggaaaagaagagcgcttcgatcgcctgaccaggctggcgcgtacgctttacgatctgccggtggcgtcgattagcctcgtcggggagaacaccctgcatgtaaaatcctgcgccggacttgatgtggatacgctgccgagggatatcaccttctgcgcgcacaccattctgcaaaccgatcctttaatcgtcaatgacctgcagcaggatatgcgctttcacgataacccgctggtgacggaagcgccgtttattcgcttttatgccgggtatccggttcagctacctgacggcgcgacggtaggttcgttctgccttatggatcataagccgcgcgctttttccggacatgaaattcagatattgagtgacctggccgccattgtagaagatgaattcaaagtgctggacgcggcgaccgccgacgaactgacggggttatttaaccggaggggatttttgtcgttagcggagtatgcgctgttaacagccagacggcgaagtgaaccggcgagcctggtgtttatcgacctcgatcgctttaagctgattaacgatacctggggccatgagcaaggggataaagccctgacggcaatcgccgatgtgatgaagtctaccttcagagagtcggatttaattgccagacagggcggcgatgagtttatcatcctgcttgccaataccgcccagcaggccgcgaacaaggcgatggagcagcttagccagaatgttgccgagtataatcagcaagcgggtaatccgtggcagctggcgttctcatggggctgcgttgaatacgatccccatgagcaccatagtctcaatgacatcgttgcagtggccgaccggcggatgtatcaggctaaaacgagccatggcgcagagcgccggtag

SEQ ID NO: 172348 - DNA, 924 bp, Klebsiella oxytoca
atgaatattatgcatcccgcccttcgccgtcttgatttaaacctgctgccggtattcgaggcggtctaccgctatcgctcggtccgcctggcggcggaagagttagcgatgagcacatcggcgttaagccacgcgctatccaggctgcgcgcggcgcttaacgatccgcttttttatcgtgagggtcaccgcatgtgccccagcgtatatgcgacccagctcgcgccgtcgatatcatctgcgttaaagtttttaaatcaggagctcaccccgcagccaaagtttgtcgcttccgccagtaccgactgcctacagatcgcgatcacggatttcaccgcgcagtgcgtttttccaaccctgatgtccagacttcaccaccaggcgccgggtttgcgtttcgaactgcgttatctgccgcatagtccggcgctgacggaactgctggccggagaggtggacctggcgttgggtttcagcgcgctcaatgaagcggaacatccggaactggatgagattcgctggctgcaggatgactatgttgcgatgagtaacgaaaggcggaacagactcacgctggcggattatctggcggcccagcatctggtggtcactccgtggaatgaaagccagggggttctcgatgtgcagctggcgaaaatgggcttcacgcgacatatcaccatcaaaaccccctcaatgctgagcgcaccgtttattattgcgcaaagtgaactgttgatggcgatgccgcgctcggctgctgaaaagatgctcgcaaccgccgggttgaagatttttgaactgccgtttgaggtgccgccatttgaagtgaaaatctattcccataagcgcagcggtcagcgcggcgcaagccagtggctgaaagacacgctgcgggagtgggcggcgccggagggcatctga

SEQ ID NO: 172349 - DNA, 495 bp, Klebsiella oxytoca
atgaatatgaccattcgtcaggccagcccggcggacgcaaaagcaatttatgacatgatttatgagctcgcagtgtatgaaaaagcgccggagcaggtgattaccacggtcgaggagatccaggccacccttttcgccagcggcagcaaaacggaagcgctgatctgcgagatagaaaataaggtcgctgggtatgcggtgttcttcaccagctattccacctggctcggacgcaatggcatctatatggaagacctgtacgtctcgcccgagtttcgcggcaacggcgcgggaaaagcactcttgcgcaccattgctcagctagcggttaaaagagaatgcggccggttagagtggagcgtgctcgactggaaccagccggccatcgatttttatctgagcattggcgcgctgccgcaaagtgaatgggtgcgctatcgtcttgacggcgccgcgctagccgctttcgctgaatcaggcgctttggccagataa

SEQ ID NO: 172350 - DNA, 999 bp, Klebsiella oxytoca
atgagcaaactcgggattaatggatttgggcgtattggacggctggtgctgcgccggttactggaggttaatagttccttagaggtggtcgccattaacgatctcacctcaccgaaagtgctggcctacctgctaaagcacgactctaactacggacctttcccctggagcgttgattttactgaagatgcgctgatcgttgatggcaaaaaaatcaccgtttatgccgaaaaagaggcccagcatattccgtggaaagcgacgggcgctgaacttatcgtggagtgtaccggcttttacacttcatcagagaaagcgcaggcgcatctgaccgccggagccaaaaaagttctgatctccgcgccggcgggcgatatgaagaccatcgtctatcacgttaacgacgatacgctggacgccaacgatacgataatttctgtagcatcctgcaccaccaactgcctggcgccgatggcgaaagtgctgaatgacgcctttggtattaaagtgggaaccatgaccacgattcacgcctataccggcacccagtcgctggttgatggcccgcgcggcaaagatttacgcgcatcccgcgcggcggcggaaaatatcattccgcataccaccggggcggcgaaagctatcggactggtcatccctgaacttagcggcaagctgaaaggccacgctcagcgcgtgccgaccaaaaccggttcggtaaccgaactggtgtcggtgctggagaaaaaagtgaccgccgaggaggttaatcaggcgatgagggaggcggcggcgaacaatgagtcatttggttataccgaagaggagatcgtctcctcagacgttatcggcagccatttcggttcaatttacgacgccacccagctggagatcgcagaagttggcgatctccagctcgtaaaaaccgtcgcctggtacgataacgaatacggtttcgtgacccagctgattcgcgtgctggataaattcgccaaataa

SEQ ID NO: 172351 - DNA, 1440 bp, Klebsiella oxytoca
atgacagcacccgttcaacaccctatgtatattgacggtcagtttgaagccggccgcggtgatgcatggattgaggtgatcaatccggccacggaagcgctcatatcgcgtattcctgacggcagcgcggaagatgcgcagcgcgcgattctcgctgctgagcgcgctcagccgggctgggaagccttacctgcgatcgagcgagcggggtggctgcgtaaaatcgctgccggtatccgcgaacgggccgacgagatcgccgcgctgattgtcgccgaaggcgggaagatccagcagctggcggcggtagaggtctcctttaccgcggattacctggattatatggccgaatgggcgcgtcgttatgagggcgaaattgtgcaaagcgaccgcccgggagaaaacattctggtattcaagcgcgcgctgggcgtgaccacaggcatcctgccgtggaatttcccgttcttcctgattgcccgcaagctggcgccagcgctgattaccggcaataccatcgtaattaaaccgagtgagtttacgccgaataacgccatcgcttttgcgcaaatcgttcatgatatcggcctgccgaaaggggtctttaatctggtgctgggccgcggcgaaaccgtgggtcaggagctagccggcaatccaaaggtcgcgatggtcagcatgaccggcagcgtcaccgcaggggagaagatcatggccgcggcggcgaaaaacatcaccaaagtatgcctggagctgggcgggaaagcgccggctatcgtgatggatgatgcggatcttgagctggcggtaaaagcggtggtcgattctcgcgtgattaatagcgggcaggtgtgtaactgcgttgagcgcgtgtatgtgcaaaaagggctatacgatcgcttcgttaaccgtttgggcgaagcgctgaaagcggtgcagtttggcgatccggcagcgcgcgacgatattgccatggggccgttgatcaatgccgcagcgctggagcgggttgagcagaaggtagcgaaagcggtggctcagggcgcccgtatcgctctgggtgggaaagcggtggagggtaaaggctatttctatccgccgacgctgctgctggacgtgcgccaggagatggatatcgttcatgaagagacgttcggtccggtactgccggtcgtggcgtttgataccctggaagaggcgctggcgatggccaacgacagcgattacgggctgacgtcatcaatctatacccgcgatttgaacgtcgcgatgaaggcgattaaggggctgaagtttggtgaaacctatattaaccgcgagaactttgaggcgatgcagggtttccatgccggatggcgtaaatcagggattggcggcgccgacggtcgtcacggcctgaatgagtatctgcaaacccaggtggtctatctgcaggcctga

SEQ ID NO: 172352 - DNA, 792 bp, Klebsiella oxytoca
atgtcggagcattttccatcgctgccggaggcgacgctagccgcggcgaaccagctgggggcctggctggcgcagcatgatttgccgcagcagccatcaatcgatgtcgtggtgctggcgggcaatgcggtgatcccaaccattgatttcgcctgccagctggcggcgcatcacgccgttccgctactgatcagcggtggtatcgggcattccacttcgtttttataccacgcggtgttgaacgatccgcgctattgcaccatcccggtagccgatcgcgccgaggcgcacattctggccgatattgcccaccggttctgggctattcctcgcgaatacattgtcgtggaagaccgctccaccaactgtggagaaaatgcgcgttttacccggcaaatgctggaacagagaggtattacgcaccgaacgggcgtggtgatccaggacccgaccatgcagcggcgaacgatggcgacctttgcccgcgtctggcaagacgcagcgcatgcgccgatgtggtacagcgcgccggggtgttcgccggtgttgtgcaatggcgataacggcgtcacctttagcggcgatagcagcggcctgtggccggtggaacgctatctggcgctgatcctcggcgagctgcctcggctggcggacaatccgcagggttatggcccgttgggtaagggatttatcgctcatgtggatattccgccgcagattactgaagcgtggcagacgctgcgcaaggaccgtctgctgtccgatacattgagcgcacgccagctggcttag

SEQ ID NO: 172353 - DNA, 1326 bp, Klebsiella oxytoca
atgaccttgcacgagagcagcaccacatcaattctcaagaaaaacaaaaaggtgctcattgccagcctcaccggcagcgccattgaatggttcgattatttcctttatggtacggcggcggcgctggtattcaacaagattttctttccgatggtcgatccggtcatcggtttaatcctctcctggctctcgttctcgttgacctttttcattcgcccgattggcggggtggtcttcgcacatattggcgaccgaatcgggcgtaagaaaacgctggtcctgacgctctccctgatgggcggcgcaacggtcgccatcggtctgcttcccacctatgagatgatcggtttatgggcgccagcgctgctgataaccttacgtatcgttcagggaatgggcatcggcggcgaatggggcggtgcgctattgctggcctacgaatacgcaccggaaaagcgcaaaggttttttcggcagcattccgcaggcgggcgtgaccattggcatgctgatggccacttttatcgtctcgctaatgacccttttcagcgaagagcagtttctctcctggggctggcgcatccctttcctgctcagctcggtgctggttcttattggtctgtggatccgcaaagatattgatgaaacgccggaatttaaacaggtgaagcagtcaggccaggtagcaaaggcgccactgcgcgatacgctcaagtatcactggcgcgaagtgctaattgctgcgggcctcaaagtagtggaaaccgcgccattctatattttttcgactttcgtggtcagctatgccaccaccacgctgagctatcaaaaatcccaggcgcttgaagccgtcaccctcggtgcgctggttgctacggttatgatcccgctgatgggactgctttcagacagaatcggacgccagaaaatgtacacgctcagcgtggtgctgcttggattgtttatcgtaccgtggtttctgctgttggatacccgcagcacgtggggcattgcgctcgccacggtgatcgccttcggtattctgtgggcaccggttaccgcggtattggggacgctctgctccgagatcttcagcgctaacgttcgctacaccggcatcacccttggctaccagcttggcgccgcgctcgccgggggtaccgctccgctgatcgccaccggactgctggcaaaatatgacggtgactggataccggtcgcatggtatctggcgggaacggtggtgatttcacttatcgcgattttctgcgccagccgcttaaagcaggctcccggcgctgtcgccaccaggagcgagatgttataa

SEQ ID NO: 172354 - DNA, 1275 bp, Klebsiella oxytoca
atggaaaagttatcttacgcttctgaaagtagtacatctccatggaccacctacctgcgtcaaatcgatcgcgtcgccccctacctcggcgatctggcctactggatcgaaacgctgcgccatccgaaacgcgcgctgatcgttgatatcccggtacaaatggacgacggaaccattcgccacttcgaaggctaccgcgtccagcacaacctctcacgcggtccgggtaaaggcggcgtgcgttaccatccggatgtggacctgaatgaagtcatggccctctcagcctggatgaccatcaagtgtgcggcagtcaatattccctacggcggcgccaaaggcggtatccgcgtcgatccgttctctttatcagaaggtgaactggaacgtctgacccgtcgctacaccagcgagatcggcattattatcgggccgcaaaaagatattccggcgccggacgtcggcaccaacggtaaagtgatggcctggatgatggacacctattccatgaaccacggcaccactatcaccggcgtggtcaccggtaaaccgattcatctcggcggttctctgggccgcgaaaaggccacgggacgcggcgtcttcgtcactggtcgcgaagtggcccgccgcagcggtatcgaaatcgaaggcgcgaaggtcgcgctgcaagggtttggtaacgtaggcagtgaagcggcccgcctgttcgctggcgtcggcgcgcggattgtggtcattcaggaccataccgccacgctgtataacgaaggcggtatcgatatggccgcgctgaccgcctggcaggccgagaacaagcaaatagccggtttccccggcgcccgcgaaattgacaaagaagcgttctggacgacgccgatggatattctgatcccggcggcgctggaaggtcaaattacgcgcgaacgcgcggaaaccctcagctgcaaactggtgcttgaaggcgccaacggcccgacctatccggaagcggacgacgtgctggccgaacgcggcatcgtggtggtgccggacgtcatttgtaatgccggcggcgtcaccgtgagctactttgaatgggtgcaggatatggccagcttcttctggagcgaagaagagatcaacgccaaaatggaccgcattatgaccgatgcgatcgttcacgtttacgataaagcggtggaaaaagcgtgctctttacgtactgccgcctatatcgtggcctgtgagcgaattctgatggcgcgtaaagatcgcggtatttatccgggataa

SEQ ID NO: 172355 - DNA, 432 bp, Klebsiella oxytoca
atggataaccgacagctaaatttctcccatcttttgtatttgaccgcccatcattggcggctggcggtcaaccgtcgcctcaaagacctcggcatgagccaggccagttgggtcgccgtttccgctatcgcgcgcaacgcgcagccgctatcgcaaagcgagctggcccaggagctgggcgtcgaaagcgcgaccctcgtcccgttgcttaatcggctggtggatttggggctggttgagcgggtgaaaaccgaacgcgacaaacgtaaacggctgctgatcgccaccgctaaaggccttgaggtgtatcagcaggtaaaaacggtagccgatgaactgcgtgaggagatcctcaccgctatcacgcccgacgaacagcagcagactcagcgcgtgctggagaaactgctgcgcgaggtagagaaaaaataa

SEQ ID NO: 172356 - DNA, 1653 bp, Klebsiella oxytoca
atgcctcgccgtaaagataacccctatgtgccccacgactgggctccgcacgaaaaaccggcgatcctcggctcgccttccaccccgattcacagcacgcccaggcgcattgcctacgggatcgttggactgctggtctgcctgaccggtgcgctgggcaacgcggtggtcaccgctaacctgcaactgttgcagggaacctttgccgcctggtccaccgagatagcctggcttccggcggtctacgtgatgacgaacgtctctatcaacctgctgctggtaaaattccgtcagcagtatggcctgcgcgccttcaccgaaggctttctcgtcctctatgtgctggtgaccttctttcacctgttcgtcaacgaccttagctccgcgctgatggtacgcgccgcccatgggatggtcgctgcggcgctgagctcgttaggcatttactatcaggtgcaggcctggcccgcccgccatcggctaaaagcgttgactatcggtattaccggctcatcgctggcgatcccgctggcgcgcctgttttccaccgaactgctgcaaattgacgagtggcgcggactgtacttctttgaactggggctggcgctggtatcgctggcctgcgtgatcgccctgaagcttcccccaagcgatcgtaaaaaagtttttgagaagaaagactttatcaccttcttcctgctggcgccgggaatggcactggttaccgcggtgctgtcgctggggcgtctggactggtggtttgaagcgccgtggatcggctgggcgctggcgggagcggtggtgctcatcgtctccgcaattgcctttgaacataaccgcagcaacccgttactcaatattaaatggctctccagcggcagcattctgcgcctcgggctgattatgctgctgatccgcatcgtgctggcggagcaaaataccggggtcatcggctggctgcagtacgtcggcctgcagaatgaacagatgaccaatctggcgtggtcgattttcgccggcatcatctgcggcatcgtcgccagctgtctgacgctcaacccgcagcgtctctactggcccaccgctacggcgctggcgctgatcatgattgcctcgctgctcgacagccagtcgaccatcctgacccgcccggaacagctaatgttcagccagttcctgctgggcttcggcagcgcctttttccttgctccggcaatgctggcagggattggcggcgtgattgccgaccagcgcaatctggtaagcttctcggtactgttcggcatgagtcagaatatcggcggtctgctggggtcggccattctcggcacctttcagacatggcgggagaagtttcactccagccagctcgccgaccagttgaccaccctcaatccgctgattactgaacgtttgcagcagtacagccaaatgtatcaaagccagattggcgacagcaccctgctcaacgttcaggccaccacgctgctacaaaacgccgccacgctgcaggccaatattctcgcttacaatgatacctatctgctgacggcagcgatttcagccgccacgctggtgtgggttttctggcgcttaatgagattacgaattaccgcccgcgttgcgttgaagcgcgcgacgggaagcaaataa

SEQ ID NO: 172357 - DNA, 1086 bp, Klebsiella oxytoca
atgagtcagcaggatgcggccaaacaacaggccaacacccgtaataatattcgcgtggtatctatttttaccgccgcggcaattggtattgtcggcgttctggttattctttacgcctggcagctgccgccgtttacccggcaaagccagtttaccgataacgcctacgttcgcgggcaaaccacgtttatcagcccgcaggtcaacggctatattaccgaggtcaaggttcaggattttaatcaggtgaaagccggcgatgtgctgtttcagatcgacgatcgcatctataaacagcgcgtacatcaggcggaagccacgctggcgatgaaagaggcggcgctcaagaacaatctgcagcagcgcaaaagcgccgaggcggtcatcgtacgtaacgaagcggcgctgcaaaacgcccgcgcgcaaagtctgaaaacccaggcggatttaaaacgcgttcaggagctgaccgccgacggttcgctctcgatccgcgaacgcgattccgcccgcgccagcgcggcgcaggggactgcggatatcgagcaggccaaagcgacgctggaaatgtcgcgccaggatctgcaatcgacaattgttaatcgggattcgctgctggccgacgtcgccagtgcgagggccgcgctggaactggcgcagatcgacctccagaatacccgcattatcgcccccgccgatggtcagctggggcaaatatcagtgcgccttggcgcctacgtgaccgccgggacgcatttgacctcgctggtaccgccgcagcactggctgatcgctaacctcaaagagacgcagctggcggaggtccgcgtcgggcagccggtaacctttaccgttgatgcgctgaacagcgagaaattcaccggtacggtgcagagcatctccccggccaccggggttgagttcagcgccatttcgccggacaacgccaccggcaacttcgtcaaaattgcccagcgcattccggtacgcatcgccgtggatgaggggcagaaaaacagccagcgcctgcggccggggatgtcggtgcaggtcaccatcgacacccgcggggaggagacgcgatga

SEQ ID NO: 172358 - DNA, 1380 bp, Klebsiella oxytoca
atgattcgtccgctcaccctcgccgttattcttgcgctggttggctgccagtcagctgatatcccacaggccgcgccgacgctgcatattcccgccgcctggcgcgcggatatcggccccgccagcccggtcgagggcgtgtggtggcgcaattttcacgacagtacgcttaatcaatacgtcgaccaggcgctacgctacaacagcgacgtgctgattgcccgcgaacgggtcaacgagtaccaggcgcgggtctacgccgccgacagcagcctctttccttcactagacgccggactgaccggtacccgcgcgcggtcgcagtcggccgccaccggtctgccgatccacagtacggtgtataaaggcgcgctaaccgccagctacgatgttgatatctggggcgctaaccgcagcgccgccagcgcggcagaggccagtctggcggcgcaaaaagccgccgccgcggcggcgaacctgaccgtcgcctcttcggtggcgacaggctatgtcactctgctctcgctggacgaacagctgcgggtaacgcaacaaacgctcaaagcgcgggaagatgcctttaatctggcgaaacgtcagttcgagaccggctatacatcgcgcctcgaactgatgcaggcggattccgaactgcgctcgacgcgggcgcaaattccgtcgctgcgacaccaaatcgcccagcaggaaaacgcgctcagcctgctgctcggcgctaatcctggcgccgttaagcgcaacgcctttgcccggctgacgccgctgtcgctaccgtcccagctgccgtcaaccctgctcaatcgccgcccggatatcgttcaggctcagcgtcagctggtggccgccgacgccacgctggcgtcatcgcaggcgcagctgctgccgtccatcaaccttaccgccaccggcagcatgcaggatcgcactctgcccgacctgctggataatccgctacgcttatggagccttggcggcagcatcctggcgccgctgctcaaccgccaggcgctgaatgcccaagtagacgtgtcgatggcccagcgcaatcaggcgttgtatagctacgaaaaaacggtgcgcggcgcgtttaaggaggtcaatgacagccttgatgctattggccgctacggggagcagctgacggagctgcaggcccaggaggacgtagcccgggagacgctgcgcattgcccaaaaccgttatcgcaacggctactcatcctatcttgacgtcctggacgcccagcgtacgctgttttccacccagctcagcgtggtgcaggtgaaaaacaatctgctgctggcgcaagtcgatttgtaccggtcgctgggaggcggctggtctgattcatcagggatgtaa

SEQ ID NO: 172359 - DNA, 660 bp, Klebsiella oxytoca
atgcaacaacagtggtcggcagtagataattatctggtggaagcgttaatccccaacgatcccttgctcaaccaggttctggaaaataaccagcgcgccgggcttccggccatcgatgttgccgccaatcaggggcagtttctggccctgctggtgcgcatgacgggcgccagacgcatcctcgagattggcacgctcggcggctacagcaccatctggatggcccgggaattgcctgcggatggcgaattagtcaccctggaggccgatgcgcaccatgccgccgtagcgcgcgagaacctgcgcatggcgggcgtggataagctcgttgaggtgcgggaaggcccggcgctggccacgctggagaagctgggcgaccatccgccgtttgatctgatctttatcgatgcggataagccgaataacccaaactatctgcgctgggctttgcgctactctcgcccggggacgctgatcattggcgataacgtggtgcgcgacggcgaagtgaccgatccgcatagcgcagatgaccgcgttcagggcgtcagggagtttattgcgatgatgggcagcgacccgcgcctgacggtaacggccctgcaaaccgtgggcagcaaaggttgggacgggttcaccctcgcgtgggtgaacgcctga

SEQ ID NO: 172360 - DNA, 3903 bp, Klebsiella oxytoca
atgacagaacaacaaaaattcaccttctcacagctctttacgcagctggatggcctgatgctgcgcgataagtcgcgctttgcccgtcgcctgcacggcgtgaagaaggttaaaaatcctgatgcccaacaggccattctgcaggagatggcgcaagaaattgaacaggcggcagggagagtcctgctgcgcgaagccgcgcggccagcgatttcctatccggataacctgccggttagccagaaaaaacaagcgatcctcgaagccgtgcgcgatcaccaggtggtgattgtggcgggggaaaccgggtcggggaaaaccacccagttgccgaaaatttgcatggagctgggacgcggcgttaaaggcttaatcggccatacccagccgcgtcgtctggccgcgcgtaccgttgccaaccgtattgccgaggagctgcaaacggaaccaggcggctgcatcggttacaaagttcgcttcagcgaccacgtcagcgacaatacgatggttaagctgatgaccgacggtattctgctggcggaaatccagcaggatcggctactgatgcagtacgacaccatcatcatcgatgaagcgcacgaacgcagcctgaatatcgacttcctgctcggctatttgcgggaactgctgccgcgtcgcccggatctgaaaatcatcattacctcagcgaccatcgacccggaacgcttctcgcgccactttaacaacgcgccgattatcgaagtgtccggacgaaccttcccggttgaggtgcgctatcggcccatcgttgaggacgccgatgacaccgaacgcgatcagctgcaggcgatctttgacgccgttgacgagctgggacgtgaaagcgctggcgatatcctcatttttatgagcggcgagcgggaaattcgcgataccgccgatgcgcttaacaagctgaatctgcgccacaccgaggtgctgccgctgtatgcgcggctctccaatagcgagcagaaccgcgtgttccaggcccatagcgggcggcgaattgtgctggcgaccaacgtcgcggaaacctcgctgaccgtaccgggcattaagtacgttatcgaccccggtaccgcgcgcatcagccgctacagcttccggaccaaagtgcagcgtctgccgattgagccggtttctcaggcgtcggccaaccagcgtaaaggccgctgcggccgcgtatctgacgggatctgcattcgtctttattcagaagacgacttcctgtcgcgcccggaatttaccgatccggagattctgcgcaccaacctggcgtcggttatcctgcaaatgaccgcgctcggactcggcgatattgccgctttcccgttcgttgaagcgccggataaacgcaatattcaggacggcgtgcgtctgctggaagagctgggggcgattaccactgacgaacagcagaccgcctataagctgacgccgatggggcgccagctcagccagctgccggtggacccgcgtctggcgcgaatggtgctggaggcgcaaaaacacggctgcgtgcgcgaggcgatgattatcacctcggcgctctctattcaggacccgcgcgagcggccaatggataagcagcaggcttccgatgagaagcatcgccgcttccacgataaagagtccgacttcatggccttcgtcaacctgtggaactacctgggcgagcagcaaaaagcgctctcctcgaaccagttccgccgccagtgccgggtcgattttctcaactacctgcgcgtgcgcgagtggcaggatatctacactcagctgcgtcaggtcgttaaagagctcggcctgccggtgaatagcgaaccggcagagtatcgcgaaattcacaccgcgctgctgaccggtttgctgtcgcacattggtatgaaagataccgataagcaggaatacaccggcgcgcgcaacgctcgcttctctatcttccccggctccgggctgtttaaaaagccgccgaaatggacgatggtcgccgagctagtggaaaccagccgcctgtgggggcgtatcgccgcacgcatagagccggaatgggtcgagccggtcgctcagcacttgctcaaacgttcttacagcgaaccgcactgggagcgcgcgcagggcgcggtgatggcgacggagaaggtcaccgtttacggtctgcctatcgtcgcggcccgtaaggtcaactacagccagattgacccggcgctgtgccgcgaactgtttatccgccatgcgctggtggagggtgactggcagacccgccacgccttcttccgtgacaacctgaagctgcgcaacgagattgaagagctggagcataagtcgcgccgccgcgacattcttgtcgacgacgaaacgctgtttgagttctacgaccagcgcatcagccatgacgtcatctccgctcgccacttcgataaatggtggaagcaggccagtcgcgagacgccggatttgcttaactttgaaaaaagtatgctgattaaagaaggcgcggagcaggtcagtaagctggactatccgaacttctggcaccagggcaatctgaagctgcgtttgacctatcagttcgagccgggcgcagatgccgacggcgtgacggtgcatattccgctgccgctgctcaaccaggtggaagaggccgggtttgagtggcagatccccggtctgcgccgggagctgattatcgccctgattaaatcgctgccgaagccggtgcgccgcaattttgtcccggcgccaaactacgcggaagcgtttctcggccgcgcgacgccgctggagctgccgctgctggattcccttgagcgcgaactgcggcggatgaccggcgtgactattgaccgcgaggcctggcagtgggatcaggtgcccgatcacctgaaaatcactttccgggtggtggacgacaaaaataagaagctacaggaagggcgctcgctgcaggatctgaaagatgccctgaaaggcaaggtacaggagacgctgtccgcagtcgccgatgacggtatagagcagagcgggctacatatctggagctttggccgcctgccggagagctacgagcagaagcgcggcaactataaagttaaggcctggccggcgctggtggacgaacgcgacagcgtggccatcaagctgtttgataatccgctcgagcagcagcaggagatgtggcgcggcctgcgccgcctgctgctgttgaatatcccatcgccgattaaatatctgcatgagaagctgccgaataaagccaagctggggctctatttcaacccctacggcaaggtgctggatctgatcgatgactgtatctcctgcggcgtcgataagctgatcgatgaagcgggtggcccggtgtggagcgaggagggctttgccgcgctgcatgaaaaagtgcgcgctgagctcaacgagacggtggtggagatcgccaaacaggttgagcagatcctgaccgcggtgttcaacatcaacaaacgcctgaaaggtcgcgtcgatatgaccatggcgctggggctgtcggatattaaatcgcagatgagcgggctggtgtatcgcggcttcgtcaccggcaacggcttccgccgcctgggcgatacgctgcgctatctgcaggcgattgaaaaacggctggagaaaatggcgatcgacccgcaccgcgaccgcgtgcagatgctgaaggtggagagcgtgcagcaggcgtggcagcagtggctgaataagctaccgcccaatcgtcgccaggatgaggacgtgcaggagattcgctggatgattgaagagctgcgcgtcagcctgttcgcccagcagctcggcacgccttatccgatttccgacaagcgggtgctgcaggcaatggagcagattacggcctga

SEQ ID NO: 172361 - DNA, 606 bp, Klebsiella oxytoca
atgagcaaagtattagttctcaaatccagtattctggcagggtactcgcaatctggtcagctgtccgactattttgttgaacaatggcgtgaaaaacacgcgcaagacgttattaccgtgcgcgacctggctgcaaatccgatcccggtactggacggcgagctggttggcgccctgcgtccgagcgatgcgccgctgacgccgcgtcagcaggaagcgctggcgctgtccgacgaactgatcgctgaactgcaggcgaacgatgtgattgttattgcggcgccgatgtataacttcaacattccgactcagctgaaaaattacttcgacctggtggctcgcgctggcgtcaccttccgctacaccgagaaagggccagaaggtctggtaaaaggaaaacgtgcggtggtcgtcaccagccgcggcggtatccataaagataccccgaccgatctggtgaccccgtatctctctactttcctcggttttatcggcatcaccgacgtgaacttcgtctttgctgaaggcatcgcttacggcccggaagtcgccgcgaaagcgcagtctgatgcgaaagccgctatcgacagcgtcgttgccgcataa

SEQ ID NO: 172362 - DNA, 408 bp, Klebsiella oxytoca
atggcagaaaaattatccgctcaatgccactgcggcgcggtggcgtttaccgttgaactcagcgatggcttcaacaccgctcgacgctgcaactgttcattttgccggatgcggggagcggttacggtctccgcgccgctttcaggaatcgatatcttacgcgggcgggagaagctcacggagtatcgctttaacaccggtgaagccgtgcactttttctgctcggtatgcgggatttacactttccatcagcggcgttcaaatccgcagcagtacggggtgaatgtggcgtgcattgcaggcgtgtcgcccttcgattttccctgcttagaggtcaacgatggcgtgaatcatccaaaagatggcggcgggggcgtggtggggtatttgcgctacgagaaaaagtga

SEQ ID NO: 172363 - DNA, 597 bp, Klebsiella oxytoca
atgcccatttatcagattgacggtatgacgccggttgtaccggacgaaagctatgttcatcccaccgccgtgctgattggcgacgtgatcctcggcaaaggggtctacgtcgggcctaacgccagcctgcgcggcgattttggccgtatcgtggtgaaagatggcgctaacatccaggacaattgcgtgatgcacggttttcccggccaggatacggtcgtggaggaggagggacatatcggccacggcgcgattctgcacggctgtaccatcggccgcaacgcgctggtgggcatgagcgcggtgattattgacggtgccaggattggggagaatagcattgtcggcgcctcagcctttgtgaaagccaacgccgaaatgcccgccaaccatctgattgtcggcagtccggccaaagccatccgcgcgttaagcgaacaggagctggcctggaaaaagcagggaacgcgggagtatcagatgctggtggagcgctgcaagcagacgctgcatcaggtggaaccgctaaaagaagccgagccggacagaaagcgtctcgtctttgacgagaatttacggccaaagtcatcgtcctga

SEQ ID NO: 172364 - DNA, 936 bp, Klebsiella oxytoca
atgaatcagatgagtaaactcgatacctttattcaacaggccacggaaacgatgcccatcagtggaacctcgcttattgcttctttatacggcgacgccttgctccaacgcggtggggaggtctggctcggcagcgtagcggcgctgctggaaggactgggcttcggcgaacgattcgtgcgtactgcgctgttccgcctgaataaagaagagtggcttgacgtggtgcgcattggccgccgaagcttctaccgtctcagcgacaaaggtctgcgcttgactcgccgcgccgaacataaaatctatcgcgccagcgccccggaatgggacggcacctggctactgctactgtcggaagggcttgagaagagcacgctggcggaggtcaaaaaacagctgctgtggcagggatttggcgcgctggcgccgagcctgctggcttcaccgtcgcaaaagctggcggatgtgcaatctctgctgcacgacgcgggcgtggcggaaaatgtcatctgcttcgaagcccactccccgctggcgctctcccgggcggcgctgcgcgcccgcgttgaagagtgctggcatctcaccgaacagaacgcgatgtatgagacgtttatcaatttgtttcgtcctctgctgccgctgcttcgcgactgcgagcccgcagaactgacgcccgaacgctgctttcacattcaactactgctgattcacttctaccgccgggtggtgcttaaggatccgctactgcccgaagaactgctccctgcacactgggccgggcaaaccgcgcgccagctgtgcatcaatatttatcaacgcgttgcgcccggcgcgctggccttcgtcggcgagaagggcgaaagctcggtgggggaacttcccgcgccggggccgctctatttccagcgtttcggcggactgtcgggcgtataa

SEQ ID NO: 172365 - DNA, 1317 bp, Klebsiella oxytoca
atgacaacgataactcaattagacccgattgaaaccgcatcgcgcgacgagctacaggccctgcaaacccagcgtctgaagtggacccttaagcatgcgtatgagaacgtgccgatgtatcgccgtaaatttgatgcggcgggcgttcatcctgacgattttcacgaactgagcgatctgagtaagtttccctgtaccaccaaacaggatctgcgcgacaactatccgtttgatacttttgcggtgccgatggagcaggtggtgcgcatccatgcgtcttcgggcaccaccggcaagccgacggtggtgggctatacgcaaaacgatattgataactgggccaatattgtcgcacgctccctgcgcgcggcgggcgggacggcgaaagacaaaattcatgttgcctatggttacgggctgtttaccggcggtctcggcgctcactacggcgcggagcgtttaggcgcgacggtcattcccatgtccggcgggcaaaccgaaaaacaagctcagctaatccgcgattttcagccggatatgatcatggtcactccgtcctattgtctgaacctgattgaagagctggaacgccagatgggcggcgacgccagcggctgctccctgcgggtgggcgtgttcggcgcggagccgtggacccatgcgatgcgggcggaaatcgagcgccgactgggtatttcggcgctggatatctacggtctgtcggaggtgatggggccgggggtggcgatggagtgtctggagaccgccgacggtccgacgatctgggaagaccatttctaccctgaagtggtgaatccggacaacggtacgccgctgagggacggtgaacacggcgagctgctgttcaccaccctgaccaaagaagcgctgccggtgatccgctatcgcacccgcgacctgacgcgtctgctgccgggcaccgcccgtaccatgcgtcggatggatcgcattagcggacgcagcgacgatatgctgattattcgcggcgtaaacgtcttcccgtcgcagctggaagaggagatcctcaagttcgaacatctggcgccgcactatcagctggaagttaatcgccggggccatcttgattcactttcggtgcgcgtggagttaaaagagagcggtctggcgctgaaccacgagcagcgctgtcagatttgccatcagttgcgtcatcggatcaagtcgatggtggggatctcgaccgatatcagcatcgtcaactgcggtagcatcccgcgttccgagggcaaggcctgtcgcgtgttcgacctgcgcaaggttgccgctaacggataa

SEQ ID NO: 172366 - DNA, 1206 bp, Klebsiella oxytoca
atgcgcgacgcttatatttgtgacgggatccgcacgccgattggccgctacggcggggcgctggccagcgtgcgcgccgatgacctggccgccatcccgctgcgcgagctactgagccgtaaccctaagttcgacccggcatcgattgatgatgtgattctcggctgcgccaaccaggccggtgaagacaaccgtaacgtggcccatatggcgacgctattggcgggctatcctcacagcgtacccggtaccaccattaaccgcctgtgcggctccggtctggacgccatcggcttcgcggcccgcgccatcaaagccggagaggcggatctgatgatcgccggcggcgttgagtccatgtcgcgggcgccgttcgtgatggggaaggccagcgccccgtatcagcgccaggccgagctgtttgataccaccatcggctggcgttttgtgaacccgctcatgcagcggcaatttggcactgacagcatgccggaaacggcggagaatgtagctgaattgttaaatatcagccgcgccgatcaggacgctttcgctttccgcagccagcagcggactgcgcaggctcagcgcgacggtattctggcgcaggagatcgtgccggtcgacattatcggccggaaaggggcggtaaacgtcgtgcgtgacgacgagcatccgcgagcggacaccaccattgaacagctttcgcggctaaaaacgccgttccgccagggcggcgtagtgaccgcgggaaatgcctccggcgtcaacgacggcgccgcggcgctgattatcgcaagctcgcagcaggccatcgtccaggggctgacgccccgggcgcgcattgtggccatggcgacggcgggcgtcgagccgaaatttatggggctggggccggttccggcggtacgtaaagcgctggaacgcgccgggctgaacattaacgacatggacttgattgagctgaatgaagcctttgccgctcaggcgttgggcgtgctcagacagctggggctggcggacgatgccccccatgttaaccccaacggcggcgccatcgccttaggccatccgttgggaatgagcggcgcccggctggcattaagcgccagcctggagctacagcgccgcagcgggcgctatgcgctgtgtacgatgtgtattggcgtgggtcagggcattgccatgatccttgagcgagtgtga

SEQ ID NO: 172367 - DNA, 423 bp, Klebsiella oxytoca
atgagcaatgaagcctggcgtaacgcccgcgcgatgtatgagaacgataactgcgcgcaagcgctggggatcaagattatcgagatggatgacggctacgcgcagatgtccatggcggttaccgcgaacatgctcaatggccatcatacctgccacggcgggcagctgttttcgctcgccgataccgccttcgcttacgcctgcaacagccaggggctggcggcggtcgcgtcggcggcgagcatcgattttctgcgaccggcctttgtcggtgagctgctgaccgcgacggcgagagtcaagcatcagggcaagctgaccggggtctatgacatcgaaattgtcaatcaacagcaaaaagttgttgccttgtttcgcggtaaatcgcaccgcatcggcggcacaatcacaggagaagtctga

SEQ ID NO: 172368 - DNA, 1422 bp, Klebsiella oxytoca
atgagcaaaacgttacctaccgttgcggtaataggcagcggcaccatgggcgccggcattgccgaggtggccgccgccgccgggcatccggtactgattttcgacatcgatcctgaggcggtggttcgcgccatcgacggtattggtcaacgtctggcctcccgcgtcagccgcggcaagctggcggctggccaggctgaggcgctgctgacgcgtctgtctccggctgaggatctgagcgctttagcccgcgcggagctggttattgaagctgcctccgagcgcctggacgtgaaaaaagcgctgttcaaacagctggctgaaatctgctccccgtcaacgctgctagtcagcaacacgtcgtcgatatcgatcaccgccatcgccgctggagtcgcgcacccggagcggattgccgggctgcacttctttaacccggccccggtgatgaagctggtcgaagtggtcagcggcctggcgacctcggcggaagtcgttgaacagctctgccagcgggtctgcgcctggggaaaacagccggttcgctgccgttcgacgcccggttttatcgtcaaccgcgtggcgcgtcctttttatgccgaagcgtggcgagcgctggaggagcaggttgccgcgccggaggtgattgacgccgctctgcgcgacggcggcggttttcccatggggccgctggcgttgaccgacctgataggccaggacgttaactttgcggtgacctgttcggtgtttaacgccttctggcaggaccgccgctatctgccatcgctgctgcagcaggagctggttctggccggacggctgggcaaaaagagcgggcagggggtctactgctggcctggcgaagcgcagcctgagctggcgctggccgccgtatcagcagaacgcgcagcaaagcgcactaaaagtgacgttgtcaccgatctggacgaggtgctgctgctggaaacgaccggtgaaaccgccctggcattgagcatccagcacggccgtccggtggtggtctacgaccatagcgcgggcgaaacggtggtgctggccagcgcggaaacggcctcacaggcggcgaccgacaaagccattttctattttcagcagcagggcaaaaaagtgctgcagatcgccgactatccagggctgctggtgtggcggacggtggcgatgctggttaacgaagcgctggatgcgctgcaaaaaggcgttgccggcgccgaggatatcgataccgccatgcgcctgggcgttaactacccgcgcggtccgctggcgtggggggaatcacttggctggggccgggtactgcggctgctggagaacctacaacagcactacggcgaggagcgctatcggccctgttccctgctgcgtcagaaggcgctgatggagaaacatcatgagcaatga

SEQ ID NO: 172369 - DNA, 789 bp, Klebsiella oxytoca
gtggaagctttcattctcagcgaaacagaacagggcgtgatgacgattacccttaatcgcccggcccgactgaacagttttaacgacctgatgcaccagcagctggcggcgtgcctgaaacaggccgaacgcgacgacagcatacgctgcctgctggtgaccggtgcggggcgcggtttttgcgccgggcaggatttaaatgaccgtaacgtcgaccccagcgggccagcgccggatctcgggctctcggttgagcgtttctataacccgctggtgcgccgtctggcggcgctgccgaagccggtaatttgtgcggtgaacggggtcgcggcgggggcgggagctacgctggcgctgggctgcgatatcgtgctggcggcgcgttcggcgaaattcgtgatggcgttcagcaagcttggtctggtgccggactgcggcggcagctggtttctgccgcgcgtggcgggacgggcgagggcgatggggctggcgctgctgggcgatagcctgagcgcagagcaggccgctcagtgggggatgatctggcaggtggtggacgatgccgagctgaaagagaccggccaggcgctggcccgtcatctggccgcccagccaacttatggcctcggtctgattaagaaggcgcttcagcttgcggaaacccagactctggatcagcagctcgatcttgagcgcgattatcagcgcctggccggacgcagcgccgactatcgcgaaggcgtcagcgccttcctcgcgaagcgtccacctcaattcagcgggaaatag

SEQ ID NO: 172370 - DNA, 768 bp, Klebsiella oxytoca
atgagcgaactgttaattgctcgccacgcgcgcgtcctccagctgacgcttaatcgcccgcaggcgcgcaacgcgctgaataacgcgctgctgacgcaaattgccgacgtgctcgacgcggcggcgctggacccgacggtcggcgtctgcgtcattagcggtaatcaacgcttttttgccgcaggggctgacctgaacgaaatggcggaaaaagatctgcctgccaccctcgatgatattcgaccgcggctgtgggcgcgtatcgacgccttcaacaaaccgctgatcgcctcggtaaacggctatgccctcggcgccggatgcgaactggcgctgctctgcgacctgatagtcgccggcgataacgcccgttttggcctgccggaaatcaccctcggtattatgccgggcgcgggcgggacccagcgcctgatccgcagcgtcggtaaagcgctggccagccggatgatattgagcggcgaaagcatcgatgccaggcaggcgctgcgggcggggctggtaagcgaggtttatccgccagcgctcaccgatgaatatgcactcgctttggcagcaaccgtggcccgccactcgccgctggcgctgcgcgcggctaaacaggccttacggttgtcgcaggaggtcagcctgcaggccgggattcagcaggaacgccagctatttactttgctgagcgcgactgaagaccgtcgcgaaggcatcgacgcctttctccataaacgtactgcggaatttaaaggacgctaa

SEQ ID NO: 172371 - DNA, 1071 bp, Klebsiella oxytoca
atgacgacatttcattcgcttaccgtggcgaaagtggagccggaaacccgcgatgcggtgaccatcacctttgccattcccgacgcgctgcgaaacgcatacgccttccgtccgggccagcatctgacattaaaagcccgccttggcggggaagagctgcgtcgctgctactccatttgccgcagccgcacgccgggggaaatcagcgtggcggtcaaggccatcgacggcggacgcttctcacgctatgcccagaacgacattcaacaagggatggcgttggaggtgatggtgccgcagggccactttggctaccagccgcaggccgggcgcagcgcggactacctggcgattgccgctggctcaggtattacgccgatgatggcgattatcgacgccaccctcgccaccgaactcgacagccgtttcaccctgatttatggcaaccgcagcagccacagcatgatgttccgccaggcgctggccgacctgaaagaccgctatccgcaacgcctgcaggtggtgcatctgttcagccaggaggcgatggacagcgatctgctgcaggggcgcatcaatggcgacaagctacgcgcgctggccgcccgtctgctggatttcagccgctttgagcgcgcctttatctgcgggccggcggcgatgatggatgaagcggagatgaccctgcgcgaactgggcataccggagaaagcgattcatctggagcgctttaataccccgggcagcagcgtcaagcgggccaccggcgtccaggcggaggggcgcacggtcacaatccgtcaggacggccgcgacagaaccatcgccctcagcgcagaggatgacagcatccttgacgccgcgctacgccagggggcggatctgccgtttgcctgcaaaggcggagtctgcgccacctgtaaatgcaaagtcctgcgcggcgaggtagcgatggctgctaactacggcctcgaagccgacgaagtggcggcaggttacgtgctgagctgccagtcgctgcccaccagcggcgatgtgatcgtcgatttcgacgcgcgggggatggcatga

SEQ ID NO: 172372 - DNA, 498 bp, Klebsiella oxytoca
atgcaacgtctggttgatatcgctcccccggagatccacgccgtctgggaggtattaagcgccattcccgacccggaagttccggtgttgacgattaccgacctcggcatggtgcgcagcgtggatcgccgcggcgatggctgggtgattggctttacgccaacctactcgggctgcccggcgaccgaacatctgttgggagaaatccgcgcggcaatgacggaaaacggctacgcgccggtgcatatcgtgctgcagctggacccgccgtggactactgactggatggggccggaggcgcgtgaacgtctgcgccagtacggcatcagtccgccgcagggtcatgcctgccatgcccatatgccggaggaggtggtctgcccgcgctgcgccagccgccatacctcgctgattagcgaattcggttccacggcctgcaaagcgctgtatcgctgcgacagctgccgggaaccctttgattactttaaatgtatttga

SEQ ID NO: 172373 - DNA, 756 bp, Klebsiella oxytoca
atgaaaaacaataaccccgttgcagcttatgctctgcgcctcggcgataacggcctggtgctggcccagcgtctgggcgagtggtgcggccacgcgccggagctggagatcgatctggcgctggccaatatcggtctcgacctgctggggcaggcgcgcaatttcctcagctatgccgctgaactggctggcagcggcgatgaagacaccctggcctttggccgcgacgagcgtcagtttcgcaatttgctgctggcggagcagcccaacggcaactttgccgacacccttgctcgccagttttttatcgatgtctggcacgtagcgctgttcagccgcctggtcggcagtcgcgatacgcagctcgccgccatcgccgccaaagcgttaaaagaagtgcgctaccaccagcgctttagccgtggctggctggagcgcctgggcaacggcacggcgctttcggcgcagagaatgcaaagcgcagtcgataatctgtggcgctttaccggcgagctgttccaggccgatgagctggagattgagctgagcgcgcagggcatcgccgtcgacccacgcgaactgcagggcgaatggcagagtgcggtacatacggcgctgatcgactccggtttacagatcccgcaagaagcggccttccgcagcggcggtaaacaggggctgcacagcgagcatctcgggccgctgctggcggagatgcagtatttacagcgcgcgtatcccggccagcagtggtag

SEQ ID NO: 172374 - DNA, 288 bp, Klebsiella oxytoca
atgagcaataactattggcctttatatgaagtgttcgttcgcagcaaacagggactgtcgcaccgccacgtcggcagtctgcacgccgccgatgaccagatggcgctggaaaacgcccgcgatgcctatacccgccgcagcgaaggctgttcgatttgggtggtgaaggccagcgaaatcgttgcctcgcagcctgaagagcgcggtgaatttttcgatccggcggagagcaaagtctatcgccatcccaccttctacaccgtgcccgacggcatggaacatatgtga

SEQ ID NO: 172375 - DNA, 930 bp, Klebsiella oxytoca
gtgacagaagaacaacgctttgaccagcgcatcgcgcaggagacggccatcgaaccgcaggactggatgccggaagcctaccgcaaaacgctgatccgccagattggtcagcacgcgcattcggaaatcgtcggcatgctgccggagggcaactggataactcgcgcgccaaccctgcgccgcaaagcgattctgctggcgaaagtgcaggatgaagccgggcacggtctgtatctctacagcgccgcggaaaccctcggctgcgcccgcgaagatctgtatcagaagatgctcgacggcaagatgaagtactcctccatcttcaactacccgactctgagctgggcggacatcggcgtaatcggctggctggtggacggcgcggccatcgtcaatcaggtggcgctgtgccgtacctcctacggaccctatgcccgggcgatggtcaagatctgcaaagaggagagctttcatcagcgccagggattcgaagcctgcatggcgctggcgcagggtagcgacgcgcagcggcagatgctgcaggacgccatcaaccgtttctggtggccggcgctgatgatgttcggtccgaacgatgataactcgccaaacagcgcccgcagcatggcgtggaaaatcaagcgtcactccaacgatgagctgcgccagcgctttgtcgataacaccattccgcaggtggaaatcctcggcatgaccgtacccgacccggatttacagcgggatgaagccaccggccactaccgctttggcgccatcgactggcaggaatttaacgaggtcattgccggacgcgggatctgcaaccacgaacgtctggccgctaaacgcaaggcgtgggaagagggcgcatgggtgcgggaagccgcgctggcgcatgcgcaaaaacagcaggctcgcgacgccgcataa

SEQ ID NO: 172376 - DNA, 2046 bp, Klebsiella oxytoca
atgcagcagttagccagctacttgtccggcacgtggcagaccggccggggccacgcgcgcactatccatcacgccatcagcggcgaagcgctatgggaagtcaccagcgagggtctggatatggcgcaggcgcgacgcttcgcgattgagcgcggcggcaaagcgctggaggcgatgacctttattgagcgcagcgcaatgctgaaggcggtcgccagatatttgctggagcagaaggcggcgttgtatacaatctctgccgaaaccggcgctacccgtgccgacagctgggtggatatcgaagggggcattggcacccttttcacctacgccagccttggcagccgcgagctgccggacgataccctgtggccggaagatgagctgattccgctatcaaaacagggaggcttcgccgcccgccacgtgctgacctcgaagtccggcgtggcagtgcatatcaacgcttttaactttccctgctggggcatgctggaaaagctggcgcccacctggcttgccgggatgcccgccatcatcaaaccggctaccgctaccgcgcagctgactcaggcgatggttaaaatgattgtcgatagcggactggtgccggtgggcgcaatcagcctgatctgcggtggcgcgggcgatctgctcgaccatctcgatagccaggatgttgtcacctttaccggctcggcccataccggacagcagctgcgggtgcatcccagcctggtcgcgaagtccattcccttcaccatggaagcggattcgctaaactgttgcgtactcggtgacgacgtcacgccggagcagccggagttcgcgctgttcattcgcgaagtggtacgagaaatgacggcgaaggccgggcaaaagtgcaccgccatccgccgtattatcgtgccgcaggcacaggttaaagcggtgagcgacgcgctggttgcgcgcctgcaaaaagtggcgttcggtgacccggcgcaggaaggcgtgaagatgggcgcgttggtgaaccacgaacagcgtcaggacgtacaggataatgtaaaccgtctgatcgaagccggatgtgaagtgttgctgggtggtcgcgcggatctcaacgccgcgggcgcattcttcccgccgacgctgctgttctgcccgcagccggatgagaccccggcggtacacgccattgaagcgttcggccccgtggctactctgatgccctatcagagcgtcgagcatgcgatggccctggcgcgggccggtgaaggtagcctggcaggcacgctggtcaccgccagcggaaaactggcgcgcgcgtttattctcggcgccgcccgcgcccacgggcgtattcagatactgaacgaagagtcttccgcagagtccaccggccacggctccccgctgccgcagctggtacacggcggtccggggcgcgccggcggcggtgaagagctgggcggcctgcgggcggtgaagcactatatgcagcgcaccgcgattcagggtagcccgacgatgctcgccgccatcggccagcagtgggtgcgcggcgcgcaggtggtggaagaccgcattcacccgttccgcaaatatttcgaggagatccagccgggcgacagcctgttgactccgcgccgcacgctgaccgaggcggatatcgtcaacttcgcctgcctgagcggcgatcacttttacgcccatatggataagattgccgcggcggagtcgattttcggcgaacgcgtggtgcacggctacttcctgatttccgccgctgccgggctgtttgttgacgccggggtcggcccggtgatcgccaactacgggatggagaatctgcgcttcatcgagccggtgaagccgggcgataccatccaggtacgcctgacctgcaagcgtaaaacggtgaaacgtcagcgcaacgctgaagagaaagcgaccggcgtcgttgagtgggcggtagagatttttaatcagcaccagcaggcggtcgccctctactccattctgaccctggtggcccgccagcagggggattttgccgggtaa

SEQ ID NO: 172377 - DNA, 2259 bp, Klebsiella oxytoca
atggcgattctttccccccgcaagacggctctggcgctggctgtcgccctgttttgcgcctggcaaggcccggcgttcgcccacggcggcgaagcgcatatggtcccgatggataaaaccctgcaggatttcggcgcagacgttcagtgggatgactacgcgcagatgtataccctgatcaaagacggcgcttacgtgaaggttaaaccgggggcgaaaacggccatcgtcaatggcaaaaccctcgatttgcaggtgccggtggtgatcaaagagggtaaagcgtgggtttctgacgccttcatcaacgatgtcttccagtccggtctcgatcagacctttcaggtggaaaaaagcccgcatccgctgaattcgctgtcagcggcggaaatcagcgcagcggtcactatcgttaaagccgctgcggatttcaaacctaacactcgctttagcgaagtctccctgcgcgagcccgataaagccgccgtctgggcctttgctcttcagggcacaccggtcgatgtccctcgcgctgccgacgtgattatgctcgatggcaagcacgtcattgaagccgtagtcgatctccggaataagaaggtcctctcatggacgccgattaaagaggcccacggcatggtactgctggacgatttcgccagcgtgcagaacatcatcaatgccagcagcgaatttgccgaagtgttgaaaaaacgcggcatcgatgacccaagcaaggtggtcaccacgccgttaaccgtcggctatttcgacggcaaagatggcctcaaacaggatgcgcggctgctgaaagtggtgagctatcttgacgttggcgacggtaactactgggcgcatccgattgaaaatctggtcgcggtagtcgacctcgaacagaagaagattattaaaattgaagaaggtccgacgatcccggtaccgatggcagcccgcccctatgacgggcgcgaccgcgtggcaccgaaggttaaacccctcgatatcatcgagccggaaggcaaaaactacaccattaccggcgatgtgatccactggcaaaactgggatttccacctgcgcatgaactcccgcgttgggccgattctctccaccgtgacatataacgataacggcaagaaacgtcaggtgatgtatgaagggtcgctcggtggaatgatcgtgccctacggcgacccggacgtgggctggtactttaaggcctatctcgattccggcgactacggcatgggcaccctgacctcacctatcgtccgcggtaaagacgcgccgtccaacgcggtcctgctggatgaaaccatcgccgactataccggcacacccactacaattccgcgcgcgatcgctattttcgaacgctacgccgggccggagtataaacatcaggagatgggcaaaccgaacgtcagtaccgagcgccgcgaactggtggtgcgctggatcagtaccgtcggcaactacgactatatctttgactgggtattccacgaaaacggcacaatcggcattgacgccggagccaccggcatcgaagcggttaaaggcgtgaaagcgaagaccatgcatgacccgagcgccaaagaggacacccgctacggcacgctgattgaccataatattgtcggcaccacccaccagcatatttataacttccgcctcgatcttgacgttgacggagagaacaacacgctggtggccatggacccggaagtgaagccgaataccgccggcggcccgcgcagcagcaccatgcagatcaatcagtacacgattgatagcgagcagaaagcggcgcagaaatttgacccgggcaccatccgtctgctaagcaataccaccagggaaaaccggatgggtaatccggtgtcatatcagattatcccttacgcgggcggcacgcatccggtcgctaccggggcaaaatttgcccctgatgagtggatttaccatcgcctgagctttatggataaacagctgtgggtcacccgctatcatccgaccgaacgcttcccggaaggtaagtaccctaaccgttcaattcatgacaccggcctcggccagtacgcgaaagatgatgaatccctggacaaccacgatgatgtcgtgtggatcaccaccggtaccacccacgtggcccgcgccgaggagtggccgattatgccgaccgagtgggcgcatgcgctgctgaaaccgtggaacttctttgacgagacgccgacgcttggcgagaagaaggagtaa

SEQ ID NO: 172378 - DNA, 426 bp, Klebsiella oxytoca
atgctggcttatatcactataggtacaaataactttcagcgcgccgtggacttttatgacgctatttttaaggttcttggctactcgcgattgcctgcctggacagaaagctgggcaatgtggggagatgaaaataatccggatgaggtattcaacttctgcatctgtcctccttttgaccgccatcccgcaacggcgggaaacgggacaatgttcgcatttcatgcagataatgctgacattgtcagacgattccatgcagcaggtctccttgcgggaggggagagtgaaggcgagccaggtacacgtcccgcatacggacccgatttttatgttgcttatctgcgcgatcctgacgggcataagctggcatgcgtttatcagcgctattctcctgaagccgataagttcgtaaatgaaccttag

SEQ ID NO: 172379 - DNA, 270 bp, Klebsiella oxytoca
atgattagacaaaaagtacgcgtcatgaacagtaccggattacatgcccgacccgccgcaagcctggcccggattgtcaaaaagtaccagtcttcattgatactggttaataatgacaaagaaatccccattaaaggaatgatgagcattctgggtgccggtgtaaaaggaaatacgatgattgacctcatttgtgatggacaggatgaactggcctttatggatgaattgaaatctgcctttgctgctggttttggtgagtccgaatag

SEQ ID NO: 172380 - DNA, 861 bp, Klebsiella oxytoca
atgcctttagttaatggtaggatcctgctcaattgcattcaggaaaagcatgtgctggctggtgcatttaatacaacaaacctggagacgacaatttctattcttaatgcaatagaacgctcggggttacctaattttattcagattgcgccaactaatgcgcagctttccggttacgattacatttacgaaattgttaaacggtatgctgacaaaatggatgtcccggtgagcctgcatctggaccatggtaaaaccctggcagatgttaagcaggcggtaagagccgggtttacctcagtaatgattgatggcgcggctttaccgtttgaagaaaatattgcttttacaagagaggcggttgatttctgtaaatcatttggcgtacccgttgaagcggaacttggcgctattctgggtaaagaagacgatcacgttagcgaggctgactgcaaaaccgaacccgagaaagtccagcgcttcgttgaagaaacagggtgtgacatgctggcagtgtcaatcggcaatgtccacggactggaagatatcccacgcatcgatatcccgctactgcaacgcattgcttccgtttgcccggtccccctggttatccacggcggctctggtattgatgaagagattcttcgtagctttgttaattataaagtggcaaaggttaatattgcgagtgatttgcgcaaagcctttattactacagtcggaaaagcctgggtgaacaataataacgaggctaatcttgctcgcgtaatggcaaatgcaaaacaggcggttgaagatgatgtgtattctaaaattcagatgatgaataaactgcaccctgcatttcgcaaagcgtgttaa

SEQ ID NO: 172381 - DNA, 1509 bp, Klebsiella oxytoca
atgcctgattaccgcgccgcgcttgtcatcgatattggcacaactaactgcaaagtcagctgttattcctgtcatgacgcgtcagttttggatgtccgcaaatttcctacacctaccagggcgtcggagaaaggcggggtagatttcgatatcgaagcgctgtggcaggccctgcggcaggtaatggctgaactggtagcttctgcacctttaccggtgaaagatatcagtattgcgagtttcggtgagtctggtgttttcgttgatgagcacggtgacattcttaccccgatgctggcctggtacgatcgtcgtggtgaatcttatctgtcttcgttaagcaaatcagaggctgaagagctgtacgctattacaggacttccgcctcacagcaattattcagccttcaaaatgaaatggttgcttgataactactcattacatgaacgaagagatatttgctggttacatgcacctgaagtactgctgtggagaatgacgggtgagaaaaagacggaagtctcaatggccagcagaacgttgtgcctggatgtcagccgacagacctggtctcgtaaagctgccgggatcctcggtataccatttgatgcgctggcaccattgataaagccgggtgaagtcgcgggttggatgaccgccacgctcagacaagagcttggattctttcatgaagtcaaaatcacgattgcgggacacgatcatatggtcggagcccgggcattacagatgcaacccggtgaggtgttgaattctaccgggacgacagagggtattttgctgctggatactcagccaacactcagtgaccagtcacggagggataagctggcaaacggctgttattccgatgctgaatttttcacgctttttgcatcacttcctgttggcggttatgcgcttgaatgggtgagaaaaacgtttcgtttgacggatgaggaaattcaaacaggcctggaaaaagcacgcgagcgctatgtccagccttcctggtctgccgaagacattcccgtgttcattcctcatttgcgggggtctggttcgccaaataaaaatcggcacacgcgcggtctgatttttggtctgacggattcactttcgccagcgactctgcttgagagtgtctttatcggtctgacgatggagttttctctctgttatgagtgctttaacatccaggctggcaggagtgtaaaagtaataggccctgcggtgagaaacccgtactggctccagttgaaggctgacatccttcaatgccccattgaggccattgcttttgatgaagccgtatccgttggggcattattgatagcctgcccggagattgaccctccctctgttcctgtggccgggcgctatattcctgacgtaatacggtcggagaagttgcaaaaatatcagcagcaatggctagccttttaccgatttaaattaatgcaggaaggagtatttattggtgaggaggataatagctcagtagttcgataa

SEQ ID NO: 172382 - DNA, 1359 bp, Klebsiella oxytoca
atgaatgatatagcacacaccctctataccgttgtgcaatatgtcctggggtttggccctacggttttattaccgctggtgctgttcttcctggcattgttctttaaggtaaaaccagcaaaagcacttcgttcatcgttaattgtcggaattggttttgtcgggatttatgccatctttgacattctcaccagcaatgtgggtccggctgcgcaggcaatggttgagcgtaccggtatcagtcttccagtggtcgatttaggctggccaccgctggctgcgattacatggggttcgccgatcgctccctttgttatcccgctgactatgctcattaacgtcgccatgttggctctgaacaagacacgcactgtcgatgttgacatgtggaactactggcattttgctcttgccggaacgctggtttactacagcacggggagttttgtgttagggctctctgccgctgcaattgctgcgatagtcgtgctcaaagttgcggactggtcagcgccattagtcgctaagtactttggtctggaaggcatttcgcttcccactctgtcatctgtcgtcttcttcccgattgggctattgtttgacaaaattatcgacaaaatccctggtcttaaccgtattcatatcgatccggaaagtgtgcagaaaaggctcggaatctttggtgaaccgatgatggtggggacaattctgggtatcttgctgggtattattgccggttacgattttaaacatatcctgctgctgggtatcagcattggtggcgttatgtttattctcccgcgcatggtccgtatcttgatggaaggtttattaccgctgtcagaggctatcaagaaatatctgaatgcaaaataccccggtcgcgatgatctctttatcggtctggatatcgcagtagcagtcggtaatccagctattatctccacggccctgatcctgacccccatctctgtctttattgcatttctccttcccggcaataaagttttgccacttggcgatctggcaaatctggctgtcatggcttcaatgattgtcctggcttgtcgaggtaatattttccgggcagtgattaccgcgattccggtgatcatcgccgacctgtggattgcgactaaaattgcgccatttattaccggtatggctaaagacgttaatttcaaaatggccgaaggctcaagtggtcaggtatcaagcttcctggatggtggcaaccctttccgttactggctgcttgagatatttaacggaaatatgattgctattgggctggtcccggtaattgctctgattatttacgctatctttcgtctgacaaaaggaactgtctatgcctga

SEQ ID NO: 172383 - DNA, 288 bp, Klebsiella oxytoca
atgagtcaaatgatactgtttgtttgtgcaacgggtgttgctacttccacagccgtggcagaaaaggtaatggaatattgtaaagagaatgggcttgatgttaattactcacaaactaatgtcgcctctctcccaaataatactgatggtgcagctttagtggtatcaacaacaaaagtgccttatgaactggatatcccggttgttagtggtctgccaattattaccggaataggtgaggataaagtactggaaaaaataatttcaattcttaaaggccaggcctga

SEQ ID NO: 172384 - DNA, 474 bp, Klebsiella oxytoca
atgcaggatattaattttcggcgtcattacgtgcgacaccttccaaaggaggtcagccaacaggacattatcaggactctcgccagtccactcattaacgatggtatggtcgtgtctgattttgccgatcacgttattgagcgggaaaaaagttttccaacaggtctggctgttgaacctgtgggtgtcgctattccccataccgatcaccaacatgttcgtcagaatgcgatcagtattgggatattggcagaatgcgtcaatttcgaagatatgggcggagagccagaacctgttccagtcagggtaatattcatgcttgcattaggtgaaagcaacaagcagctcaatatcctgggctggattatggatgtcattcaggatggggattttatgcagcagttgctggtcatgaatgatgatgaaatttatcaatcaatttacatacgattatctgaaagaggtgagttatga

SEQ ID NO: 172385 - DNA, 747 bp, Klebsiella oxytoca
atgaaaacattaattaaaagttcacaaattccgctttatcagcaggttgtggagtggataagagaaagtatctatagcggggaacttgttgaggatgaccgcataccttcagagtttcaaatcatggatatgcttgaggtgagtcgcggtaccgttaagaaagcggtggaccaactggtaagagaaggtgtccttgtgcaagttcagggtaaaggcacctttgtgaaaaaggaaaatgttgcttatccgctgggtgaaggtttgctctcttttgcagaagccctggcaagccagaaaataaacttcaccaccagcgttattacttcccggctggaaccagccaatcgtttcgtggctgaaaagctcggaattcacccggggcaggatattctgtttcttgaacgccttcgctctattggtgatgaaaaagtgatgttgattgaaaatcgtatcaacattgagctttgtcccggtattgtggatgtggattttaccagggaaaatttatttccaacgattgagcgattatctcaaaagaaaataagtttctctgaaagtcgttacgctgccagactcattggtaatgaacgaggacattttctggatattggtgaagatgcgcctgttttacatttagaacagttagtgtttttctccagaggattgcccgttgagtttggaaacgtctggctaaaaggcaataaatattatcttggcaccatattgcagcgccgggatgctaactag

SEQ ID NO: 172386 - DNA, 765 bp, Klebsiella oxytoca
atgttcaatgcatcacttctgagactgaacatcctggtcagctacacttattgctgtttttcatccagagcagaaatatcctaccctattaaagggataggtttggtctttagcattttcatcaataacacacatggccctttaatgatgcaagtgatacttgttcgacacgcggaaaccgagtggaatgtgagagagattctacaaggacagagcgatagcgcattgacctcccgggggaaacgccagacatcagctttactcgcggcgtttgcagcgtgtgattaccgggtagaatgtgtctacgcttctccgcttggtcgtgcctggcaaatgggacagagcctggctgaaagcttttgttgctcactgatagctgagtctgccctgaaagaacaagcatttggtcaatttgaaggcatggcaacagtgcagctcctgaagcacagcccggacgctgcagaagcgttattcaaacttgatgccgagtattgtccgcccggaggcgagtctctctcatatgcctctcagcgtatgatgcattttttatacgctctgggaaaaaaacgccatcatcaaacgatatgtattgtgtcgcacgggcatgtcattcagggcgttctttcgattctgaaaagtggaactgtcgatgatttcccgaggtatgcacaacccaacgcgagttactcagttttcgacctgattgatggacgttgtgctgcccttagatggggaattgcaacgcatttacggctacgggattag

SEQ ID NO: 172387 - DNA, 654 bp, Klebsiella oxytoca
atggtcattggagattttgatgatggcggcattcttcgtacagcacaaggtcctaagtctaaggctttccatttttcggcacgaatgtgctctttatgcaatggctctcgtacacagcctgcagatcaggaatttgatcgatttcacactttagtttcatcgctgttatcagaaggtagggacccttctgaggtgtttaatatgccacagtataatttggactcagaagcctacctcaatgtgtttagatacttttccaaaattttatgctgccaaattgcagaagcaggcggccctcgcccattagaggcttgcgaatttgctataggaaaaacgagtaggaacattatctttctacacattgatgtagatccaatctacctgacttatcgagatacatgcggagaacatggttttgctagacatggaggacttattgtcctgtttgactcaaaaacacacaatccaacatgtttccagaccttgttaagtttgggtgctgtgaggtatcttttttgggttagatttgatgcacttgttggagctgagttacgtacatcccatcatgaattttggctcaaatgtaaggccgcgtatcaagaggctataaaaaatccactatcggatgaacagcgatatcgcttaggtatttaa

SEQ ID NO: 172388 - DNA, 981 bp, Klebsiella oxytoca
atgaagaaaatactcattattgtcccggatggcggcatgctgtttgagtccgccggtattgccgacattctgatgcaggctaaccgcctgcatccggaaggcgccagtgagatctgttaccaggtacggctggcgacgactcaaccgcatcaggtgatccatggtcagtccggtttaaatttgctggccgatcatcgcctgcatgagatagaccctcgcgagcccctcgatacgatcatcattaccggtagaggtcaaaacccgcaggaagggattgcggtggttgactggctgcgccttgccgctccccatgcccgccgcattgcctccatttgcggcggtgcgatgctgctggcgcaaaccgggctgctggacggcagacgggccactacccactggaagctgttggaaaccatgcaggcggaattcccgctggtccgcgtcgagggcggtccgctctatattcaggacgaacatatctggacctctggcggggtcagttccggctttgatcttacgctggcgctggttgaagaagattacggcttcagcctggcgcgcgatatcgcccaggacttcgtcatgtatctgcgtcgccccggaggccagctgcagtttagccgctacaaccttcggcagactaccaccctaggcccgattaacgatctgctggcatggttgctcgaaaatctcaccgccgacctcagcgtggataagctggcggaaaaagtcgccatgagtccgcgaaatttcacccgcgtgtttacccgggaaaccggcgcttcgccggcgcgttacgtcgcggaagctcgtctggccgctgcccggcagcgtctggagcagaccagcgacacgctggagcgtatcgccgaacaaacgggatttggcagtagcattaatctgcgacggctgtttgaaaaacagcttcatctcacgcccggcgaatatcgccaacggtttcacagcagcagaatggcgtaa

SEQ ID NO: 172389 - DNA, 1011 bp, Klebsiella oxytoca
atggttaaggtcggtattaacggttttggtcgtatcggacgcaacgtactgcgtgctgcactgggcaatccggatattgagattgtggcaattaacgatctgacagacagtaagacgctggcgcatctactgaaatacgactcgctgctcggtaaactcgacgccgacgtcaccgctagcgaggggcagcttgtggttgatggtaaacccattaccgtgttcagcgaacgcgatccggcaaatatcccgtggcgtcagcgtgaagtcgatatcgtgattgaagccacaggcttcttcaccgagcgcgacaaggcggcggtgcatatccacagcggtggcgcgaagcgcgtgattatctccgcccccggtaaaaacgatgatttaactatcgtgatgggcgttaacgatggcctctactccccggataagcactacgtggtcagtaacggtagctgcaccaccaacggtctggcgcctgccgcccaggttctgcaccaacattttgggatcaagcatggcctgatgaacacgacccacgcttataccaacagccaggcgctgcacgaccagccggaaaaagatctgcgtggcgcccgcgccgctgcgctgtcgatcgtaccgtactccagcggtgccgcgaaggcgctgggcaaagttattcctgcgctggagggccggctgacgggatattcgctgcgcgtccccgttccggtggtatccattgtcgacctgaccgtcacgcttgagcgagatgtgacaagcgaagaggtgaataatgcctttcgcgaagccgccgcgacggggccactgaaaggtatcctcggctatagcgatgaaccgctggtctccagcgactaccggggcgacccgcgctcatcgattatcgacggtctgtcaacgctggtgattggcggcaatatggtcaaaattctggcgtggtacgacaacgaatggggattctctaatcgcctcgtcgacctggcgctgatgatggcaagtcgtgaacgctaa

SEQ ID NO: 172390 - DNA, 984 bp, Klebsiella oxytoca
atgacgcatatctacgaatctaccaatattagtaatcaggaaacagccagacctttgcctgtcggcggggtaaatagcgcgagcgcggtatcatggggagcaatatttgcaggcgcagccgcagcggcttcgctggcgctgatgctgcttatgcttggcgcaggcttaggcctgacgtccatttctccgtgggaaaatcacggtctggcagcaggtaccatgggtattgtcgccattgcctggctgacgtttacccaaattgtggcgtcaggaatggggggatatctggccgggcgtttgcgtaccaaatgggttgatactcataccaatgaaatctattttcgcgatacagcgcatggttttctgacctgggccgttgcattgctggtatcggctgtgcttttgaccaccactgtcagctcactcatcggcggcagcgcaaaagtgattggctccgttgccgggggcgcgacggcaaccgcgatgagtaacgcgggagacgaatcttccgtgctgtcgaagtcatcgatggaatattttacccgctcgctgttccgttcgaccgcttccgctccggcagataacggcggatttccggctaattcatcaggtaatgacgcgatggcaatgaatcagcccgtaccgccaaaggccgaatctccagcgcaattagcagaggttacgggtatttttgctaacagcatttatactggcgcgcttccgcaggaagatctgacttatgtagcgcagttagtttcgcagaataccggcatcagccagcaagaggccgagcagcgggttcaggctgtttatgataaagcgcaggccaatttgaaagaggcaaaaaataaagcacagcaggccgcagatgctgccagaaaagccacgagctacgttaccctgtggtcatttatttctctgttaatcggcgcattcgttgccagcctgtgtgcaacctatggcggccgtcagcgtgacttataa

SEQ ID NO: 172391 - DNA, 480 bp, Klebsiella oxytoca
atgttagattaccgcttcccgacagctttgcagatggtccttagcgtagcgatggcggagcaatcgggcgaacgctcgacgagtgcgattctggcctacggtctgaaagccaatccgagctttatccgcaaattgatggttccgcttacgcgtgacggtatcatcgtcttaacgcttggccgcaacggctctatccatcttggtcgcccggcggaagagattaccctgcgcgatatctacgtatccgtcatcgaagataaaaagctgtgggcgtcacgtcccgacatccctgcccgctgcgtggtgagcgccaacgcgtgctggtacttcaaatctgtcgccgatgaagcagagcaggcttcgttagaggttttagctcgccataccgtggccagtgcgctggaagaagtcaaaaaagccgacaccagcggctgcgatccggttcctgaaatctgtacccagcacaacaaatcgcactaa

SEQ ID NO: 172392 - DNA, 3153 bp, Klebsiella oxytoca
atggacttttcccgcttttttatcgacaggccgatcttcgccgcggtactgtcgattctgatttttatcaccggattaatcgccattccgctgctgccgatcagcgaatatcctgacgtcgtaccgcccagcgtgcaggtgcgcgcggagtatcccggcgccaacccgaaagtgattgctgagaccgtggcgacgccgctggaagaggcgatcaacggcgttgaaaacatgatgtacatgaaatccgtcgccggctctgacggcgtactggtgactaccgttaccttccgcccgggtaccgatcccgatcaggcgcaggttcaggtgcaaaaccgggtctcgcaggccgaggctcgtctgccggaagatgtgcggcgtttaggcatcaccacgcagaaacagtcgccgactctgacgctggtggtgcatctgttttcgcccggcggtaaatacgattccctgtatatgcgcaactatgccacgctaaaagtgaaggatgagctggcgcgactgcccggcgtcgggcagattcagatttttggctcgggcgaatacgcaatgcgcgtctggctcgatcccgacaaggtagcggcgcgcgggttgaccgcctcggatgtggtgacggcgatgcaggagcaaaacgtccaggtttccgccgggcaattgggcgccgagccgctgccgcaagagagcgacttcttgatctccattaacgcccaagggcgcctgcataccgaagaagagtttggcaatattatcctgaaaacggcgcaggacggctcgctggtccgcctgcgcgatgtggcgcgtattgaaatgggttccggtagctatgcgctgcgctcccagctgaataataaagacgcggttgggattggtatcttccagtctccgggggccaacgctatcgatctgtccaacgcggtgcgcgctaaaatggacgagctggcgaagcgttttccgcaggatatgcaatgggcggctccttacgatccgacggttttcgttcgcgattccattcgcgcggtcgtgcaaacgctgctggaagcggtggtgctggtcgtgctggtggtgatcctgttcctgcaaacctggcgcgcgtcgattattccgctgatcgcggtgccggtctcggtggtggggacgttcagcatcctctatctgttaggcttttcgctaaataccctcagtttgttcggtctggtgctggctattgggatcgtggtggatgacgccattgtggtggtggaaaacgttgagcgaaatatcgaagaaggattggctccgcttgccgcagcgcatcaggcgatgcgtgaagtttccgggccgattatcgccattgcgctggtgctgtgcgcggtgttcgtgccgatggcgttcctctccggggtcaccggtcagttctacaaacaatttgcggtgacgattgcgatttccacggtgatctccgccatcaactcgctgaccctctctccggcgctggccactctgctgcttaagccgcacggtgcgccgaaagacatcccgacccggcttatcgatcgtctgttcggctggattttccgtccatttaaccgctttttccaccgcagttcgaacggctatcaagggctggtggggaaaacgctcgggcgccgcggggcggtttttgtggtctatctgctcttgctttgcgccgccggcgtcatgtttaaagccgtccctggcgggtttattcccacccaggataagctctatttgattggcggcgtgaaaatgccggaaggctcttcgctggcgcgcaccgatgcggtgatccgcaaaatgagcgaaatcggaatgaataccgaaggcgtggattatgcggtggcgtttcccggtcttaacgcgctgcagttcactaatacgccgaataccgggacggtcttttttggcctgaagccgttcgaccagcgtcaacatacggcggcggaaattaacgctgagatcaacgcaaaaattgcgcaaatccagcagggctttggcttctctattttaccgccgccgattttaggactgggccaggggtccggctattcgctctatattcaggaccgcgccggtcttggctatggcgcgctgcaaaacgcggtgaacgcgatgtccggtaccattatgcagacgccggggatgcatttccccatctcaacctaccaggctaacgttccgcagctggatgtgcaggtcgatcgcgataaggccaaagcccagggcgtgtcgctgaccgatctgttcggtacgctacaaacctatctgggatcgtcttacgtcaatgattttaaccagttcgggcggacctggcgggtgatggcgcaagccgacgggccgttccgcgaaagcgtggaagatattgccaatttgcgtacccggaataatcagggcgaaatggtaccgatcggcagtatggtgaatatccgtaccacctatgggccggacccggtgattcgctacaatggctatccggcggcggatctgattggcgatgccgatccgcgcatactctcatcctcgcaggcgatggcgcagctggaggcgatgtcgcagcagatactgccgaacggcatgaatatcgaatggacggatctgagcttccagcaggcgactcaaggcaatacggcgctgatcgtcttcccggtggcggtgctgctggctttcctcgtgctggcggcgctgtacgaaagctggacgctaccgctggcggtgatccttatcgtaccgatgaccttactctcggcgctgtttggcgtctggctgaccggcggcgataataacgtattcgtacaggtggggctggtggtgctgatggggctggcctgtaaaaatgcgattctgatcgtcgagtttgcccgcgagctggagctccagggaaaagggattatggaagcggcgctggaagcatgtcgcctgcgtttgcgcccgatcgtgatgacctccatcgcctttattgccgggacgattccgctgatactcggccacggcgcaggcgcggaagtgcgcggcgtcaccgggatcacggtgttttccggtatgctgggggttacgctgtttggtctgtttctgacgccggtgttttacgtgacgctgcgtctattcgtgacgcgcggtaaagcggtgaaggacgtgatgcctgcgtag

SEQ ID NO: 172393 - DNA, 1176 bp, Klebsiella oxytoca
atgagcatgcaaaaaaactggggtaacgttcatctggctgcgctgggcgcgatactcctctccacgctccttgtcgggtgcgatgagggggccgcgcaaaacgccgcgccgcaagcgcctgtggtgagcgccgctgacgtggttgtgaaatccattagccagtgggacagctttaatgggcggattgaagcggtggaaagcgtccagcttcgcccccgcgtttccggctacattgataaagtgaactacgtcgatggccaggaagtgaaaaagggggaggtgttgttcaccattgatgaccgtacctatcgcgccgcgctggagcaagcgcaggcgacgctggcgagagccaaaacgcaggctagcctggcgcgaagcgaggctaaccgcaccgataaattaatcaataccaacctggtctcccgcgaagagtgggagcagcgccgtgcggcggccacccaggcgcaggctgatattcgcgcggcgcaggcggcggttgacgccgcgcagcttaatctggactttactaaagtgaccgcgcctatcgatggccgcgccagccgcgcgttgatcaccagcgggaacctggtcaccgccggcgacagcgccagcgtacttaccacgctggtatcgcagaagacggtttacgtctactttgacgtggatgagtccacttaccttcactatcaacatctcgcccgcagcgggcagggcgcgtccagtaatcatctggcgctaccggtagaaattggcctggttggcgaagagggatatccccatcagggcaaagtggattttctggataatcagttaacgccgagcaccggcacgatccgtatgcgtgcgctgctggataatgcccagcgtcagttcacgcctggactgtttgcccgcgtccgcctgccgggcagcgccgaatttaacgccacgctaatcgacgataaagcggtgctgaccgatcaggatcgcaaatatgtttatgtggttgataaagatgggaaagcgcagcgtcgcgacatcacgccgggacgcctggccgccggcttacgcatcgtgcataaaggcctgaatccgggcgatagagtcatcgtcgatgggttacaaaaagtgtttatgccggggatgccggttaacgcgaaaaccgtcgccatgaccacccgcgccgcccttaactga

SEQ ID NO: 172394 - DNA, 345 bp, Klebsiella oxytoca
atgaacactggcgcattcattcacgatttactcgactggatcgacaacaatcttgatagccgcctggatattgagaccgtcgccaggcgcgccggttattcgaaatggcacctgcagcggatattcaaagagcataccggttatcctctcggcgagtatattcgcgtgcaaaagctgcaaaaatcggtcgagcgcttagcccacagcgatgaaccgattttgaacgtggcgatcgccctcggctttgactcccagcagtccttcaaccgcagcttcaagcgtcagttcggccaggcgcccggcgcatggcgacgcagcatcggcagcgcggagacgcagcgatga

SEQ ID NO: 172395 - DNA, 471 bp, Klebsiella oxytoca
atgaatatcaaagttgcaaacactggaaacgcagaggagtgctgggcgctaaggaatcaagccattcggtttggatgtaagggcagttatagtgatgaggttatcagcgcctggacgtcagatttgatgccggatggatttcgtgaattaatgaccaaagaattttttttcatcgggcaagatgatgaaggaaagatcatcgctaccgcactccttgacgtggccaccaacacactgaaagccttctacgttctccccgagctccaggggaaaggaatcgggaccagattcctctctgcacttctggatgaggcgaggaagtcaggaatgcaatttctggagttatcatctacgccaaatgctcgttttttttatgccagccggggttttgttttaatcggcgaaaaagcgtatacatcctctgtcacggggacagacctactctgttttgatatgaaaatggtgctttaa

SEQ ID NO: 172396 - DNA, 1500 bp, Klebsiella oxytoca
atgtccacatcagaggtcgcgctactcgccagcgtacagcagtttttagacaggcagcatggtttatatctcgacggcgcacagcaggcggcagagagtgaaaagcgcttaaccgtctggaacccggcaaccggccaggctatcgccagcaccgcggacgccagtgccgccgatgtcgatcgggcagtcatgtctgcctggcgcgccttcgtttcccgcagctgggcagggcgaacgcccgccgatcgcgaacgtattctgctgcgcttcgccgatctggttgagcagcatggcgaagagctggcgcagctggagacgcttgaacaggggaaatcgattaatatttcccgggccttcgaagtgggctgtaccctgaactggatgcgctataccgccgggctgaccactaaaatcagcggacggaccctggacgtgtcgattcccttcccgccgggtgcgcgctatcaggcgtggaccaaaaaagaaccggtgggggttgtcgccgggatcgtaccgtggaacttcccgctgatgatcggcatgtggaaagtgatgcccgcgctggctgcaggctgttctatcgtcattaagccgtcggaaaccacgccactgaccctgctgcgggtagcggaactggcaaccgaagccggcgtgccggacggcgtctttaacgtggtgaccggtagcgggaccgggtgcggtgcggcgctgacctctcacccacacgtcgctaaagtcagctttactggatcaacggcgacaggcaaacaaatcgcccgcgtcgccgccgaccgtctgacccgggtcacgctggagctgggcggtaagaacccggctatcgtgctgaaagatgccgatccgcaatgggttattgagggactcatgaccggtagctttctcaatcaggggcaggtatgtgccgccagttcgcgcatttatatcgaagcgccgctgttcgatacgctggtgagcggcttcgagcaggcagtgaagtcgctacaggtggggccaggcatgctggagagcagccagattaacccggtagtgtcgcaggcgcattgcgccaaagtggcggcctatcttgatgacgcccgtcagcagaaggcagaactgattagcggtaatatagggccggatacccaaggatactatattgccccaacgctggtaattaatcccgacgccgggctgcgcctcagccgggaagaggttttcggcccggtggtaaacctggtgcgcgtggccgacggcgaagaggcgctgcgcctggccaacgacagcgattttggcctgaccgccagcgtctggacccgcgacctgagccaggcgctgagctataccgatcgcctgcaggcgggaacggtgtgggttaacagccatacgctgatcgacgctaacctgccgttcggcggcatgaagcagtccggcaccggccgtgatttcggtcccgactggctggacgactggtgcgaaacgaagtcggtctgcgtgcgctactag

SEQ ID NO: 172397 - DNA, 909 bp, Klebsiella oxytoca
atgagtacggcaaatcgtggacaggattaccagcattggttagccaaaatcaatcaagtgtgcggccagttcgccgctcgcccgctggatgataattttcacggtgagatagacgccagctatgcgggcgacctgaaagtcagcacggtaaccgctcgcggcatcaacctctaccgtacccggcaggagatccagcgcgataacgacgcctggttttataccgtcttccagctctcaggtcaggcgacaatcgagcaggacggtcgccaggcgatgctggagagcggcgatatcaccctgattgatgcttctcgcccctgttcaataatctggcagcaaacctcgcgtcaggcttcgctgctgctgccaaggtcgctgctggaacagcaactgcgcggcagtgaaatcagcattgccacccggctggcaaaaaccctgccgatggtccagctcagtcagcgactgctgcatgagagcatgaacagccccgagctatcggccagcgaaagcaaagcggcgctggaggcgattgtttgcctgctgcgccccatgctgcaccatcaggaggcccagcccacccggcgcgataaacagtttcagaaaatcatggcgttaatcgatgagtcgattcaggcggaacatctgcgcccggagtggctggccagcgaaaccggtatgtcggtgcgcagtctttaccgcctgtttgcggaaaaggggctggtggtggcgcaatatatcaagaatcgtcggctcgatctctgcgcccgcgcgctggaaagcgcccatgatgatgaaaagctggcggggatcggctacagctggggtttcagcgatcatagccatttctccaccgcctttaagcagcgcttcggcgtctcgccgggggagtatcgcaagcgctgccgatag

SEQ ID NO: 172398 - DNA, 327 bp, Klebsiella oxytoca
atgatgagaaaacgatggttaatcgcgacgctggcgctggcgttgttgagcactcaggcgctggcgttaaccctaagcgaagcgcggcagcaggggcgagtcggcgaaacgctgaacggctatcttcaaccgctgcgccaggataaagaaaccctggcgctggttaaacagatcaacgccgcccgcagcgacagctatcagcaactggcggacgacaacaacctgccggtggatcaggtggcgaaaatggccgggcagaagctcgtcgccagggcgcagcctggcgagtatgtgcagggccttaacggcaaatggctgaaaaaatag

SEQ ID NO: 172399 - DNA, 186 bp, Klebsiella oxytoca
atgatcaaactattcaccgcttttctggcaaccatgctgctggcgggctgtacgccgcgtattgaaattgcggcgtcgaaagagccgatcaccatcaatatgaacgtcaaaattgaacatgagattcatatcaaagtggataaagacgttgagaatctgctgaaaacccgtagcgatctgttctga

SEQ ID NO: 172400 - DNA, 2640 bp, Klebsiella oxytoca
atgaagggtaaatataaagccgccatcgcgctattattagcactcgtgctgctaccgctggctttgctgttgacgctcacccactgggtgcccacgctggcaggcatctggctacctgcgggcacccgaatctccctcagcgagagcccgcgcctgacgcgctcttccctgcgtattccggatttacgctacctggtaggcgactgcgaaatcgcgcgtgtcgctaacgccgagctctcccgccccagccgctggcgtttacatatcactgagctggatattaacagcgcctgcctgaataaattaccgcacagcgaagccgcgccgggggcgccgaaaacccttgccgagtggcaatcgatgctgccatacagctggctgacgattgaaaatctgcgtctgtcgccgtgggagaaatggcaggggcgtctggtgatgtcgttgaccccgcagcagcaggatatcggttacgccggagaagaggtctctctccaggcgcgcctgcgcggccaggcgctgacggtcagcgacttttccgcgcgtctggtagaaggccaggcgccggtgaagctggtgggcgagtttcagatgccgctggtgccggacggtttgccggttgatggtcatctgtttagcacttttgaatttcctcagacacccggccttgtcgacgccgaactggagtggcatgagaatcgcgggcagctgttggtcacgccgcgtggtgaagtggagccgattctcgacctgccgtgggaaatcaccccggatcgtatcgctatcagcgatggccgctggcacaccgagtatgcgggcaatgcgttaagcggtcgcgttgcgctttcggtgggtaactggcaacagggcaccgaacagatgcaggtcagcgggcggttgaacgtgcttacccagggtcaggctggtaagggtaatgccgtgctcaatattggccccggtaagctgagtatggacagcagcgacatgccgctacagctgaccggcgaggccaaacttggcgatctgattttttacgccagactgcccgcgcagctgagcggtccgcttatcgcgccgatcctcaactttcatcctggggcgctgctgcgttcgcgcgggcgggtcatcgactcactgaacatcgatgaaattcgctggccgctggcgggcgtcaccgtgacgcagcagggcgtggatggccgcctgcaggccattctccgcgcccatgagcaggagatgggggattttaccctgcatctcgacggccaggccgacaattttatgcccgaccgcggccgctggcagtggcgctactggggcgatggccattttaccccgatgcaggcgcgctgggacgttaaaggcgcgggtgaatgggttgatagcgccatcgtgctcaatagcctgtcgaccggtttcgataagctgcagtatggttccatgctggtgagcacgccgcgcctcaccctggataaaccgattcactggctgcgcgatgagcagcatccgcgactgaccggcgcgctgtcgctggatgccggaaaaaccaccttcagcggcggcagcgaactgccgccgtcaacgctgaaatttaacgttgagggtcgcgatccaacctggttccagttcaatggttccctgcatgcgcaaaaaattggccccgtccgcgtcaccggacgctgggacggcgagcgcctgcgcgggcaggcgtggtggccgaaacagtcattaaccgttttccagccgctggtgccgccggaatggaagatgaacctgcgcgaaggttcactgtacgcccaggtcgcgttctctgccgccgccggtcagggctttgaggcgggggggcacggggtgctcaaaggcggcagcgcctggatgccggataaccagatcaacggcgtcgatttcgtgctgccgttccgctttagcgaaggcatctggcagcttggcacccgccatccggtttcgctgcgcattggcgaagtcgtcaaccagtttacggcgcgcaatctgacggcagatcttcagggagcctggccctggagcgaagacgctcctttacagttgagcaacgtcagcgtcgatattctcggcggcaagctaaccatgcagcagctgcggatgccgcagcacgacccggcgctgctgcgcctgcagaacatctccagcagcgaattaattagcgccattaaagtgaagcagttcgccgtttccggcccgttcaacggcgcgctgccgctgtggctggataacgataaatggatcattaaggacggctggttcagcaatccggggccgatgacgatgcgcctggataaagacaccgctgacgcgctggtggccgacaacgtctccgccggggcggccattaactggctgcgctatatggaagtggccacctcgtggacgcggatcaatctcgataacctcggcgtactgacgctgaaggcgaccatcagcggcaccagtcgggtagagggcaaaagcaacacggtgcacttaaactactcccatgaagagaatatttttgacctgtggcgcagcttgcgtttcggcgacaatctgcaggcgtggctggagcagaacgccagactgcccgcccagcgctgccaggacagtcatacctgtaaggaacaacaataa

SEQ ID NO: 172401 - DNA, 501 bp, Klebsiella oxytoca
gtggacttaattatctcgctgatggcgtacgctcagggccactattcattggtattactgatggttttcctgctgacgttcaccaaatcctgcgccgttatctcgctgctgattccgggaacttccggtctgctgctgttcggcaccctggcttcggccagcgccgggcatttcttgttaatgtggatgagcgccagcttcggcgcaatcggcggattctggctgtcatggctaaccggccgtcattaccagcatcatctgtatcgtattcgctggcttaacgccgagcgtctcgcgcgcggccagctgttcctgcgccgccacggcgcatgggcggttttttttggccgctttctttcccccctgcgcgccaccgtgccgctggtaaccggcgccagcgggacgtccttccgccgtttccagctggccaacgtcagttccggcttgctgtggccgttaatcctgctggcgccaggcgctttaagcctcaatttttggtga

SEQ ID NO: 172402 - DNA, 990 bp, Klebsiella oxytoca
atgaaaatcgctgtgtacagtacgaaacagtacgacaagaagtatctgcagcatgtcaatgatgcatacggctttgaactggaattttttgacttcctgctcaccgaaaagaccgccaaaaccgccaacggctgtgaagcggtatgcattttcgttaacgatgacggtagccgcccggtacttgaagaactgaaagcccacggcgtgaagtacatcgcgctgcgctgcgccgggttcaacaacgttgacctcgacgccgcgaaagagctgggcctgcgggtagtacgcgtcccggcctactcgccggaagcggtcgctgagcacgcaatcggcatgatgatgtcgctgaaccgccgcattcatcgcgcctatcagcgcactcgcgatgctaacttctcccttgaggggctgaccggcttcactatgcacggtaaaaccgccggcgttatcggcaccggtaagattggcgttgccgcgctgcgcatccttaaaggtttcggtatgcgcctgctggcgtttgatccctatccaagcgccgccgcgctggatatgggcgtggagtatgtcgatctggaaacgctataccgggagtccgatgttatctccctgcactgcccgctgaccgatgagaactatcatttgctgaaccatgccgcgttcgatcggatgaaagatggggtgatgatcatcaacaccagtcgcggcgcgcttatcgattcgcaggcagcgatcgatgccctgaagcaccagaaaattggcgcgctggggatggacgtgtatgagaacgaacgcgatctgttctttgaagataagtctaacgacgttattcaggacgatgtcttccgccgtctttccgcctgccacaacgttctgtttaccggtcaccaggcgtttttgaccgcagaggcgttgatcagtatctcgcagaccaccctcgacaacctgcgtcaggtggatgctggcgaaacctgccctaacgcactggtctga

SEQ ID NO: 172403 - DNA, 441 bp, Klebsiella oxytoca
atgaacaagattgctgcgctgctggcggcgggaatgttgctatcgggctgcgtttataacagcaaagtgtcgaccagagcggaacagcttcagcaccaccgttttgtgctgaccagcgtcaacggtcaaccgctgaaagccgccgataagccgctggagctgagctttggcgaaaagatgccaataacaggcaatatgtacgtttcaggcaatatgtgcaaccgctttagcggcacgggtaaagtctctgacggcgagctgaaggttgaagagctggcgatgacccgcatgctctgcacggactcgcagctgagcgcgctggacgccacgctgagcaaaatgctgcgcgacggtgcgcaggtcgacctgacggaaacgcagctgacgctggcaaccgccgaccagacgctggtgtataagctcgccgacctgatgaattaa

SEQ ID NO: 172404 - DNA, 273 bp, Klebsiella oxytoca
atgcgagctgcgtttttagtgggatgtgctgcgctgttactgtcggcgtgtagtagcaatgatgaacctgttcagcaggcaacggcggcgcacgtgtcgccagggatgcgtgccgcgatgagcagcagcgggcaggcgaactgcgccatggtcggcggctcgttatccgtagcccgccagcttgatggctccgctatcggcatgtgcgccttaccgaacggcaagcgatgcagcgagcaggcgctggcaggcggaagctgcggtaactattaa

SEQ ID NO: 172405 - DNA, 366 bp, Klebsiella oxytoca
atgcaattcatagcactgccgtgggcaactttgcaggctatctacagagcaaaaaatggtgaggttgttgaagggaaatatgtccgtgtggcagggaacttcattaacctttgggacccctctaatgaaagtgccgatcgcgtcaatattacgccggtctttcagatggtttttcgcaatcttgatgatggtgttctttatttttccgggcgtgtgatgttttttgataaagcaaaatcagagcacgatgcctatttccgtcatccgtttgatgatgtcgattcaagcgtgatgacacaagcctatgcggtaaccaatacgcaatatctggctggaacattctattctggagttgtgccaaattaa

SEQ ID NO: 172406 - DNA, 543 bp, Klebsiella oxytoca
atgaataaagatgagatttttaacgccattttggataaggagggcggctatgtaaatcatccggacgatcgaggtggcccaacaaattgggggattactcaggccactgcccgcgcgcatggttatgatggacctatgcaaaaactgccgcgccagcaggcgctggatattctcaacgcggactactggattgcgccccggttcgaccatgttgctgagatatctaccccgcttgctgaaaaactgtgtgatgccggggtcaatatgggcaccattctgccgggtaagtggcttcagcgatggctaaatgcctttaatcatcgcggagtgctgtatccggacctcatggtcgatggtgctatcggccccagaacgattaacgccttaagccagtatcttattcgcagaggcagtgaaggtgagacggtactattacgagcattaaactgtagtcaagggcaatattatctggagttggctgaaagaaacgatgctaatgaatcctttatctatggttggctcagggttcgagtaatgagttga

SEQ ID NO: 172407 - DNA, 273 bp, Klebsiella oxytoca
atggaaaatgaactgccggcgctgattaacgcaattgtctgcgctttgatcactctgaacttgatgttttatcgccgcgcgtgctaccgaagacatcggccatggatatcatacacggcatatttactggtacttacctatgccagcataccgtttcgctatctttttggcctgtatgaatcgacccattggttagtcgtcagcgtcaatttttttatacttattaccgtattcctcgtcagggggaatatcgcgcatttaatcgataaatga

SEQ ID NO: 172408 - DNA, 393 bp, Klebsiella oxytoca
atgtccgatcctgtttccggtacgtcggcaattgttactggaggattaatggcagcgagtctatttggcctgatcgcaggtattgattatggcgttgtgttcggcgcatttgctggcgccgtgttttatgtggcgaccgcagtaaatatttcacgtttcagactggctgcctattttatgacttcctttattgtcggcgtattgggcgccgggttaattggtacgaagctggcaatctggaccggatacagtgaacggtctttagacgcgttaggcgccgtactgctatccgcgctgattattaagatactcacatttctgaataatcaagatctcaccgaattgtacaaaatactcacccgcaacaatagtgaacggccaaatggaaaatga

SEQ ID NO: 172409 - DNA, 363 bp, Klebsiella oxytoca
atgtcccgtaaaaccgcgtttcatggttccgctgccggtcgtcgccgtgcgcagcgctcgcacttacaaaatccacaagccctcagttcagaacgcctccaccggcctacgccttctcgcgctcagattcaggctaagggaaagcaccatacgccagcgcgtatcgaggacgcattgcccattaactttgttgcccaggatattttttggcagcttgaggaatataaacggcaaattgcgcgtgccaccgttgtttatcagcaagaattttcacaccactatgcgcaacctgggacctggctctgtcacagggccatctatgcgctgggtttgcaaaaaagaaaaaagattacggcaaagtaa

SEQ ID NO: 172410 - DNA, 162 bp, Klebsiella oxytoca
atgcaggcgggcgatgcgccagattgccagcataaaagggcttctggacatgatttctcgcatccagcgcaggtaaacccggtgcttaaacaacttgccgggaaattttacctgctggacttgatacttaaggctggaacggagggagggtttgaacgctag

SEQ ID NO: 172411 - DNA, 702 bp, Klebsiella oxytoca
atggataaatacgaaatcagacgtcagcgcttgatctatatccgtgataatttatgcggcggtaaagctgttgatgtagcccgaacccttgggcgggagccttcttacgtttccaggatgctctacccggaaggcaagaaacaaaagaaaaggatagctgacgagatggtcgatcttattgaatcttctttcaatttgccccgcggctggatggacggcattagcggaagtattgatatcgaacgagaaccggtggaagacacacctcagatgcagtacgtcattgaggttctggacgcgcaggccagcgcgggaccaggatgtattgtctcaagcgaggttgatgaaacggtcaacagtatcacctatgacactgccggcgcgctgaggctttttggtaaccggcccgcagagcatatcaaggtgattacggtttccggcgatagcatgtccggcaccatcgagaccggtgattacatctttgttgatgtctcaaaagattactttgaaggtgacggtatctatgtcttttcgttcaaaggggcggtgttggtgaagcgtcttcaattcacggcggatggcctgcttgtgcattcagataaccgcaaatatgccgactggacgatcggcgaaagccatgaacagtatctgaaaattattggccgcgtgatctacagccatagcgttaaacggtttgtttaa

SEQ ID NO: 172412 - DNA, 3528 bp, Klebsiella oxytoca
atgatcactattgacggtaatggcgcggttgcttcagtcgcgtttcgcaccagtgaagttatcgccatctacccgatcacgcccagctccacaatggcggagcaggcggatgcctgggctggcaacgggctgaaaaacgtctggggcgatgtcccccgcgtcgtcgagatgcagtcggaggccggggcgatcggcgccgtacacggtgcgctgcagaccggtgcgctctcaacctcttttacttcatcgcagggtttactgctgatgatcccgacgctgtacaaactggcgggccagctgatgccgtttgtgctgcacgtcgccgcccgtaccgtggccacccacgcgctctctatcttcggcgatcactccgacgtgatggccgtacgtcagacaggctgcgcgatgctctgcgccagcagcgttcaggaagctcaggattttgcgctgatttcacatatcgccacgctgcaaagtcgcgtgccattcattcatttctttgatggcttccgtacctcgcacgaaatcaacaaaatcgctccactggcagacgataccattcgtagcctgctgccgcaggatagaattgaagaacatcgccagcgcgccctgaacccggaacatccggttatccgcggcacctcagctaatccggatacgtatttccagtcacgtgaagcgacgaatccgtggtacaacgcggtctatgagtgtgtcgaaacggcaatggatgattttgccgccgccaccggacgtcagtacaaaccctttgagttttacggtcatccgcaggctgagcgcgtaatcgtcattatgggctccgccatcggtacctgtgaagaagtggtcgatgagctgctgagccgcggtgaaaaagtcggcgtgctaaaagttcgtctttaccgccccttctctgccgcgcacctgcttgaagccttaccgccgagcacccaagccgtggcggtgctggaccgcaccaaagaaccggggtcccaggccgagccgctctatctcgacgtcatgaccgccctggccgaagcctttaaccgcggcgagcgagaaaccctgccgcgcaccattggcggacgctatggcctctcttcaaaagagttcggtccggagtgtgtcctggccatcttcaaggagctgagcgccgctaaacccaagccgcgctttaccgtcggcatctacgatgacgtcactaatctttccctgccgctggtcgaaaatacgctcccctcggaagcgaaactggaagccctcttctacgggctcggcagcgacggtagcgtctcggctacgaaaaacaatatcaagattatcggtaactctacgccgtggttctcgcagggctatttcgtctatgactcgaaaaaggccggcgggctgacggtttcacatctgcgcgtcagcgagaagccgattcgttcttcttatctgatttcgcaggccgactttgtcggctgtcaccagctgcagtttatcgataaatatcagatggcggaacgtctgaagcccggcggtattttcctgcttaatacgccctacagcgccgatgaagtctggtcccgtttgccacaagaagtccaggccaccctcaatcagaaaaaagcgcgtttttatatcgtcaacgcggcaaaaatcgcccgtgaatgcagcctgggggcgcgtatcaacaccgttatgcagatggcctttttccacctgacgcggatcctgccgggcgataacgcgctggcggagctacagggggccattgccaaaagctacagcagcaaaggccaggagctggtggagcgtaactggcaggcgctggcgatggcccgcgagtcgctcgcggaagtgccgctacggccggttgacggcaacagcccgaatcgcccaccggtcgtctccgacgccgcgccggatttcgtaaaaaccgtcaccgccgcgatgctggccgggctcggcgatgcgctaccggtatccgctctgccgccggatggtacctggccaatgggcactacccgctgggaaaaacgcaacatcgccgaagagatcccgatttggaaggaagagctttgcacccagtgcaaccactgcgtggccgcctgcccgcactcggcaatccgtgcgaaagtggtctccccggaggcaatggaaaatgcgccggacagcctgcattcccttgatgtcaaatcccgcgatatgcgcggtcagaaatacgttctgcaggtcgcgcctgaagattgtaccggctgtaatctctgcgtcgaagtttgtccggcaaaagacaggcagaacccggaaatcaaggctatcaatatgatgtcgcgccttgagcatgttgaagaagagaaagtgaattatgactacttcctcaacctgccggaaatggaccgcagcaagctggaacgtatcgatatccgcacctcacagctgatcagcccgctgtttgaatactccggcgcctgctccggctgcggcgaaacgccatatatcaaactgctgactcagctctacggcgatcgaatgctgattgccaacgccaccggctgttcatcgatttacggcggcaacctcccttccacgccctacaccaccgatgccaatggtcgcgggccggcctgggccaactcgctgtttgaggataacgccgaatttgggcttggcttccgacttaccgtcgatcagcatcggcagcgcgtcatgcgtctgttggcgcagttcgccgataaacttccgcccgagcttaacgatgcgctgcacgcagaagcaacgcctgagatgcgccgcgagcagatagccgagctgcgcaaggtactggcaaatgaagaaggcgcgaaggagctgttaaccgacgccgacgcgctggtggaaaaatcgatctggctgattggcggcgacggctgggcctatgatattggcttcggtggtctcgaccacgtgctgagtctgaccgaaaacgtcaatattctggtgctcgatacccagtgctactccaataccggcggtcaggcatcgaaggctacgccgctgggagccgtcacgaagtttggcgagcacggcaagcgcaaggcgcgtaaagatctcggcgtgagcatgatgatgtacggtcatgtttatgtggcgcagatttcgcttggcgcccagctgaatcagacggtaaaagccattcaggaagcggaagcttacccgggtccgtcgctgattatcgcctatagcccttgcgaagagcacggttacgatttggcgctgagccacgatcagatgcgtcagctgaccgccaccggtttctggccgctgtatcgctttgacccgcgtcgtgccgatgagggcaaactcccgctggcgctggactcccgtccgccgtcagatgccctggctgagacgctgttgaacgagcagcgcttccgtcgcctgaacgctcaacagccggaagtcgcggaacaactgtggaaggatgcaacggcagacctgcaaaaacgctacgacttcctcgcgcagctggccggtaaggcagaaaaaccgactaccgaaagctaa

SEQ ID NO: 172413 - DNA, 1107 bp, Klebsiella oxytoca
atgaaaagaaaagtactggccctcgttatcccggcattattagctgctggcgctgcacactccgctgagatttataataaagacggaaataaactggacctctatggcaaggtggacggtctgcattatttctctgacgatgcatcaaaagatggcgatcagtcatacgtccgttttggcttcaaaggcgaaactcagattaacgatcagctgactggctacggtcagtgggaatataacgtccaggcgaacaacaccgaaggcgcggacaaccaatcctggacccgtctggcgttcgcaggcctcaagttcgctgattacggttcattcgattatggccgtaactacggcgtgctgtacgacgtagaaggctggaccgatatgctgccagaattcggcggcgactcttatacccaggcggataactttatgaccggccgcgccaacggcgtagcaacctaccgcaataccgacttcttcggtctggttaatggcctgaactttgccctgcagtaccagggtaaaaacgaaaatgccggcagcggagaaggcaccaacaatggcgatcgcagcgtacgtaacgctaacggcgatggttttggtctatccacttcttatgatttcggtatgggtatcagcgccgctgccgcctacacctcctctgaccgtaccaacgatcagatgacccagaccaccgcgcagggcgataaagcggaagcctggaccaccggtctgaaatatgacgccaataacatctatctggcgaccatgtattccgaaacccgcaatatgacgccttacggcaacggtaacggcgtagccaacaaaactcagaactttgaagtgactgctcagtatcagttcgacttcggcctgcgcccggcggtctctttcctgatgtctaaaggcaaagatctgaccaataccgatggcgacaaagacctggtgaaatatgctgacattggcgcgacttattacttcaaccgcaatatgtctacctatgtcgattacaaaatcaacctgcttgacgaagacgacagcttctattccaacaacggcatctctaccgatgacgtggttgctttaggcctggtttaccagttctaa

SEQ ID NO: 172414 - DNA, 213 bp, Klebsiella oxytoca
atgcaccatcattgcgtaaaatcatcccgcatccactccatcgcctatgatgaatcctctggcattcttgaaatccgtttccgcgataaccaaacgctacagtatctcggcgtcccgccacgcatttttcgcgattttctccaggttgtttctaagggccgtttttacgacggtgtgattaaaggcaaatttaccgaacgccgccgcgcctga

SEQ ID NO: 172415 - DNA, 435 bp, Klebsiella oxytoca
atgaacagaatgattcttgtgcccatcgatatttccgatacagaattaactgaccgtgttatcaagcacgttgaggctgaagccagaatcgatgatgccgaggtgcatttcctgaccgtcattccctcccttccctattacgcttcgctgggaatggcctataccgcagagctgccggcgatggatgacctcaaagccgaatcggagtcgcggctgaaagagattgtgaaaaaatttactattccggaagaccgtgtccatttacacgtttccgagggttcgccgaaagataaaattctcgctatggcgaaatcccttcccgccgatctggtgatcatttcttcgcaccgtcccgatatcaccacctatctgctgggttctaacgccgccgccgttgtccgccatgcggaatgctcggtactggtcgtacgataa

SEQ ID NO: 172416 - DNA, 291 bp, Klebsiella oxytoca
atgaaaaagttaattatggtagttttcgccgcggccgctatttctggttgcgcccagcagagcttctcggtaaatcctggcgtcaccgttcaacctcagcaggtgaccactcaccacttctttgtcagcggcattggccagtcgaaacagattgatgcggctaaagtctgcggcggcgcggataaagtggttcgtactgaagtgcagcagacttttgtcaacggcctgctgggttttgtgaccctgggtatttatactccgcgtgaagcgcgcgtgtcttgcgctaaataa

SEQ ID NO: 172417 - DNA, 939 bp, Klebsiella oxytoca
atgaaaaaaagtaccgttgcagtaatgatgatagcggccctttcaggaacaacttatgccgaatcaatacagctaagcccaaacttttctgcagaaagttttactgtatcaacgtctgcagggatgctgagtggaaaatcacaggagagagtttatgacgcggatacagggcgaaaagtcagtcaacttgactggaaaataaagaatgtcgccattgtgaaaggcgatatctcatgggatgcctactcctttttgacgctgaccgccagaggctggacgtcaatggcttcaggctcaggacatatggatgactacgactggatgaacgataaccagtccggttggacagatcattcatcgcatcccagcactaatgtcaattatgccaatgaatacgatctcagcgtacaaggatggatttttcaggacgaaaattataaagcaggcgtcattgcgggttatcaggaaacacgtttcagctggacagctaccggtggttcttacaattatgataacggtgcgacgactggcaattttccaaccggcgagcgaggtattgggtacagccagcgattctccatgccctacattggtctggcgggtcagtatcgtatcaacgactttgaatttaatgccttgtttaagttcagtgattgggtcagagctcatgataatgacgaacactatatgcgtgagctgactttccgcgagaaatcaactaattcgcgttattacggtacaacggttgatgccggatattacatcacgcctcatgccaaagtttttgctgaattcacctacagcaaatatgaagagggcaaaggaggcactcaaattattgatacctatagcggtgaatcagcttctataggaggagatgcggctggcattgcaaataaaaactataccattacagccggtctacaatatcgattctaa

SEQ ID NO: 172418 - DNA, 936 bp, Klebsiella oxytoca
atgcttgataatcagcaagttacaaagaaagaaaaatacaatatcgacaaattgcagaagcgcttgcgccgtaacgtcggcgaggctatcgctgattttaatatgattgaagaaggtgaccgcatcatggtttgcctctccggcggtaaagacagctacaccatgctggagattttgcgcaatctgcaaaaaagcgcgccgatatccttctcactggtggcggtgaacctcgaccaaaaacagccgggcttcccggaacatatcctgccggaataccttgagcagttgggcgttgaatataagattgttgaagaaaatacctacggcatcgttaaagaaaaaattccggaaggcaaaaccacctgctctctctgttcgcgcctgcgccgcggcattctttaccgcaccgcgactgagctgggcgccaccaaaatcgcccttggccaccaccgcgacgacatcctgcagaccctgtttctgaatatgttctatggcggtaagatgaaagggatgccgccgaagctgatgagcgacgacggtaaacatatcgttattcgcccgctggcctactgccgggaaaaagatattgaacgtttctctcaggcgaaaggtttcccgattatcccgtgcaacctgtgcggttcgcagccgaacctacagcgtcaggtgattgccgatatgctgcgcgattgggacaaacgctatcccggacgcatcgaaaccatgtttagcgcgatgcagaacgtggtgccttctcatctcagcgacgttaatctgttcgacttcaaaggcattcatcacggctctgcggtcgttgacggcggcgacctggcgttcgatcgcgaagagctcccgacgcagccggccggctggcaaccggaagaagatgatgcgcagctggacgctctgcgtctgaacgtggtggaagtgaaataa

SEQ ID NO: 172419 - DNA, 1374 bp, Klebsiella oxytoca
gtgaccgctttttcaactctgaatgttttgcccgccgcccagctcactaatctgaatgaactggggtatctttcgatgaccccggttcaggcagcggctttacccgcgattcttgcgggcaaagatgtccgcgtgcaggcaaaaaccggcagcggtaaaacggcggcattcggcctcgggctactccagcacgttgacgcctcgctgttccagacccagtcactggtgttgtgtccgacccgcgagctggcggatcaggtggccggtgaactgcgtcgcctggcgcgtttcctggcgaatatcaaaatattaaccctctgcggcggccagccctttggcgctcagcgcgactcgctgcagcacgcgccgcatattatcgtcgccacgccgggacgcttgctcgatcacctgcagaagggcaccgtgtcgctggacgctctgcaaacgctggtgatggacgaagcggatcgcatgctggatatgggttttagcgatgccattgatgacgtgatccgctttgcgccggcgtcgcgccagacgctgctgttttccgccacctggccggaagcgatagcggcaatcagcggccgcgtgcagaataatccgcagactattgaaattgatgccgttgatgcgctaccggctatcgaacagcagttttttgaaacttcgcaaaagggtaaaatcgcgctgctgcaaaagctactaagccagcatcagcccgcctcctgcgtggtgttctgtaacaccaaaaaggattgccaggccgtttgcgattcgctcaacgccgccgggcagagcgcgctatcgctgcatggcgatcttgaacagcgcgaccgcgaccagacgctggtacgttttgccaatgggagcgcgcgcgttctggtggcgaccgatgtcgctgcccgcggcctggatattaaatcgctcgaactggtggtgaattatgggctggcctgggacccggaggtacacgtacatcgcattggccgtaccgctcgcgccggtgaaagcggtctggcgattagcctctgcgcgccggaagaggcgcagcgtgcgaacattcttgccgaaatgctgcaaatgaagctcaactggatggacgggccgatgaatagctcgatcacgccgctgcaggcagagatggccacgctgtgcattgatggcggtaaaaaggctaaaatgcgtccgggcgatgtgctgggagcgttgaccggtgatatcggtcttgatggtgctgacatcggaaagatcgccgttcatccggcgcatgtctacgttgccctgcgtcagagcgtagcgcataaggcattcaggcagcttcaaaacggcaaaattaaaggcaaggcctgccgggtacgtttgctgaaatag

SEQ ID NO: 172420 - DNA, 984 bp, Klebsiella oxytoca
gtggacgccataaaaggatcggaactgaacgtgccggatgccgtttttgcatgggtgttcgacgggcagggcggcgtaaagccgctggtcgacagcgataccattgataaagagcatccttgttggctgcatctcaattatacccatgttgatagcgcggaatggctggcatcgacgccgctgctgcctaataacgtacgcgatgcgctgggtggggagagcactcgtcccagagtgacgaggattggcgatggggcattaattacgctgcgctgtattaacggcagcaccgatgagcgcccggaccaactggttgcgatgcgtctttatatggacgagcggttaattgtttctacccggcagcgcaaagtgctggcgctggacgatgtgctcggcgatttgcgtgagggcaacgggccggttgacggcggcggctggctggtggaagtctgcgatgcgctgaccgatcacgccagcgaatttatcgagcagctccatgaccggattatcgatctggaagatgatttactcgatcagcaggtgccgccgcgcggctttctggcgctgttgcgtaaacagcttatcgtcatgcgccgttatatggcgccgcagcgtgatgtctatgcaaggctggccagcgagcggctgccgtggatgagcgatgaccatcggcggcggatgcaggatattgctgagcgtcttggccgcggtctggatgaaattgatagctgcatcgccagaacggcgattatgagcgatgagatcgcgcagattatgcaggagtcgttatcgcgaagaacctacacgatgtcgctcatggcgatggtttttctgcccagtacctttttaaccgggctgttcggggttaacctcggcggcattcccggcaatagctggcatatgggtttttctattttctgcataatgttagtcgttctcattgggggtgttacatggtggttgcatcgtagtaaatggttgtaa

SEQ ID NO: 172421 - DNA, 621 bp, Klebsiella oxytoca
gtgaccatgctgaatgtcatttataaaaatgataataatttttttaaattaggttttaacgctctgctggagagtttattccctgcggctatgtttagctcgtcggcagtgaataaaatatataaggggaaagataccgcaaccgatattatggtgctgagtttatgccgcggggaggagtacatttgtcatcccgagttacagcatcgccggggaggcatccttattggcctggtaggtaagcagttccgctggcgcggagggatcttgccctcatgcctgaaggagatgatatttattcagcaggatgagaaaatttaccggatgattgcgcaaattaagcgggcccggatgcaggaggcgactccctcgatgaatcaatccgatattcgctgtcatgattgtcgtcatcgcaagctctcaagacagcaggaaaaagtggccgcagcactactggcggggctttctgtcaaagagattgccggcaagctggcgctgagcgaaaaaacggttttctcccataagcgcatcatcatgtcaaaattcaaattacgccatgatgtcgacctcgtgctgttgttaaattatttgcgcagcagctcagcgggccataatgactaa

SEQ ID NO: 172422 - DNA, 519 bp, Klebsiella oxytoca
atgatcgccaaattacatgatttatgtctggttctggtattgttttccgctccgctactggccggcgatgtggtttcgttgaatatcaagggtaaaatagttgccgccccctgccagatcagcagcgatagtgttgcaagaacaatttccttgaccgattcgcagggtatccgggcgtcttctctctatacgcctggctccgcgacggagtgggtaccctttgattttgatattgaacgctgtcctgcgggaacgacaacggccacgatgcagttttccggtaatgctgataacgctggcccggacgatctttatcagaatagcggtagcgcaggcaatattgccatacagctacaaacggcagaagggcagcctttaggtaaggataaaacggtaagcgggacgattgtgaataatcaatatcgctaccgcctgcgcgcgcgggcattcagcccgcgaggtggtgttacgcccggtacgattaatgcagttgtcaccgtgacctttacctggcaataa

SEQ ID NO: 172423 - DNA, 933 bp, Klebsiella oxytoca
atgagaaagtttatatctctcattattttaatgttgagtttaaccgctggctgctgttccgcggtgacctgtgaagtattactggcgcagatcaataccgttggttttggtacggtgaatgttcaacgcgatatcccggtaggggcgactatcgcttctaccgtctccccgggctatgcgcaagctgccattacttcggataatggagagtcttgccccggaaattattccatggtgtatttgtcgggtattgaatcgccagtcagcggcgtttatcaaaccaaccttgaaggggtagggatcaaagtaaatggcatgcccggagattttagcttacctccggtaaccgcaaactacattttttacctgggatattatacggtgtcgctggtgaaaaccggaaatatcacctccggacaattaacgccagggttaattgctcaggcgtggtttggttctcctggcaattattttaccaaaatctccctggacgccagttcacaggtaaatgtgcttagctgctctatttcgagccaggtattgagttttgatctcggcagcgtaagcgcggccgagtttgggtctgctgcgggtttttcgcctccgcacacggacacgcagaatttaggacttaattgcaacgccggagcaaatatccatatacaactccaggggacgcagaatccggacgccagcgccgaccgcagcgtgctggcgttaaccggccagggcagcgagaccgttgcggatggcgttggcgttcagctgctttataacaatgcgccagtgcagctgaataatcgcctgatgctaaagcaatcctcgggcggcctggaaagtttgccgattacggctcgttattatcagaccaagccggtggttaaagccggcgaagctaacgcgaccgcaactctggatatgacttatcaatag

SEQ ID NO: 172424 - DNA, 1116 bp, Klebsiella oxytoca
atgcaggaaacgctggactcgtgggggaatcccggcgcggtgaaccaacatcggcgcaacagaatggagatgacgctgagtcaggcgctgggtgagcgcgcagggtcattaatgatgagcgcgatccgtgaagattactggcatgccagtcgctcagcctcatcgctgagcgccggttataacaacgcctggcaagggattagctacggcattaactggacgcgaagtcaaaatggcggagcatcgggtggacaaaaccgcagtacagggagcgccgaacagcttatttcactgaatatcagcgttccgttgccgcgtctggccagcaatacctgggcaaattacgccctgaatagcagcaagagcggcggtgcgacccattcagtcggaataaacggcattgccctggaaggcaattcgctgaactggagcgttcagcaggggtatggttccggaggcgacggatacagcggcagcgcgaatgcagattatcgaggcacctatggtgaactgacgagcggctacagttatgacagaaatagcgagcggctgagctatggcctggcgggcggggttctggtgcatgccgacggcatcacgttctcgcaaccgttgggtgaaacgaatgtgctggtaaaagctcctggcgcctccggcgtcgacattaataatcagaatggcgcgaagaccgattttcgcggctataccgtaacgaataatgtatcaccctatcgtaaaaacgatattggcctgaatacgacgaccttaccggagaatgtcgatttggcgattaccaataaaacggttattccgacgcggggagcggtggtccgcgccgattatattgctaatgtgggtttgcgggcgctgttaacgctaaaacagaataatcaacagccggtgccatttggcgcgctggttaatctgatgggtaatgaagggcgcagcgctatcgtcgatgaggcaggtcaggtctatttaaccggcatgccgccgcagggaaccttagacgttgcctggggccagaaaaattcgcagcgctgccaggtggattattctctggctgcagataatagcattagcggaattagcatggcgcagtttacctgtcgctaa

SEQ ID NO: 172425 - DNA, 1458 bp, Klebsiella oxytoca
atgaaagcacaaaagcgaaagccggagcattatccagcatacctggtggttggcgtcacgctgttattctccgttatgggaaatgacgcgcagggccgtgatttttttaacccggcgctgcttgaaattgataaccccgaaatgaaaggggccgacctttcagcttttgaaaacggcgctcaggcaccgggtacttatcatgtcgatgtgattataaatgacaaggtggttgatgcgcgggatatcgtcttttatgccgttgagcgccagggcggagtgccagaactaaaaccttgcctgacggtggacctgctacagagctatggggtgaaaacggcgcaatttgccgccttatccggcaccgggaaatgtgcggatctctccgctatcccgcaggcaacgtccgaatttctgtttagcacgcaaaaattgcgattaagtattccgcaagctgcgctttcaccggtagcacgaggttatgtccccccggaacgttgggacgaaggtattaacgctgtcatgctgaactatatgcttagcggagccaacgattgggggcgccatcaggacgaaaagagcagcagtcaatatgccaacctgcgtccgggcataaatttgggaccgtggcggctgcgtcactactccacctggaatcgtgatagccagggggaagagaagtgggagacgatttacagctacgcgcagcgcaatattattgcgttaaaagctcagctgacgctgggcgacagtacggcgccagcggatattttcgatagtatgccttttcgcggcggccagcttgcgtctgatgatgacatgctgccggagtcgatgcgcggctatgccccggtggttcgcgggatagcaagatcgcatgcgcagatcgttattcgccagaatggttatgttatataccaggactacgtagctcccggcgcatttgaaattaatgatatgtatcccaccggcggttccggggatctgtacgtgatcattaaagaagccgatggcagcgagcaaaattttattgttccctatgcttcgttaccgattctgcaacgcgaaggacgattaaaatatgccctaacggccggccagtaccgctcctgggaccgccgcgtcgataaaactcccttcggccagatgacgggtattttaggggcaggcggtgggttcacgctatatggcggctttcaggaatcagccaaatatcagtcaattgccggcggcttaggaagaaacctcggcgatatcggcgcgctctccagcgatgtgacgcaggcatggtcgcatcctcagggggagaagaaacaggccggacaatcgtggcgcatacgctacagcaaaaatatgctcgccaccggcacaatttcgctattgcgggatatcgctactcaaccggcggttactacgctatgcaggaaacgctggactcgtgggggaatcccggcgcggtga

SEQ ID NO: 172426 - DNA, 672 bp, Klebsiella oxytoca
atgaagttttttaccgcaatggcgacgatggcgcttttaacccttacttcaacatcttacgcgggggtgattatcggcgggacgcgggtgatctatgcgggtgataaaaaagaggcttcattgagcgtgaccaatcccgacggcctggcttatctcatccagtcctgggtcgaatcttcaataccgggtgggaataaagccccttttattattacgccgccgctttatcggctggataaaaatcagcagaacgtgatgcgtattattctggccggacagttatctcaagatcgcgaatcaatgtactggctaaacattaaatctattccgtcggtgacgcctcgggataatactttacaggtggccgtgaaaacacgaataaagctgatttatcgtcccgcggcgctgaaacaaagtagtcctgaagaacaggcggataaactcagatggcagcgaacgggcgatcgacttcaggtcaccaatcccactccgtactatatgaattttaatgaaataaaagtgggaacagtaaagatagacgatgtgacattcgtcgcgccaggtgcaacccgttcatacgctattccctcaggcggaatctctacgccagttgcatttaagctcattaatgactatggcggaattggggtaatacataacgtcatgccgtaa

SEQ ID NO: 172427 - DNA, 531 bp, Klebsiella oxytoca
atgaataataaaataatcatggcgacatttgctatcagcgccgctctgtcggcggcaggcgctcacgctgctgatggcaccattaactttaacggtgaaattcttgaccaggcctgcaccgtagatataggcagtaataatacgatgacggtcgatttgggccgcgtggcgcgcacctcattccagagtacaggagatgagtctgacgcaactaaattcacgattaagctgattaactgcccggcgagcgttaactcagcgaaggtgaaatttgatggtgtcaatgacttaaacaatagcgatcttttagctattacccaggggccggctgcggcaagcggcgtcgctattaagctgatgacggcggataaaagtttgcaagggctaaatcaggtcaatagctatagctacccgttggtcaccacggctgataacaatcttgatttttatgcctcttatcaggcgactcaggcagttgttactgccggtccggcaaatgcggttgccaactttaccgttaactacaactaa

SEQ ID NO: 172428 - DNA, 663 bp, Klebsiella oxytoca
gtgtctgatagtataaacacagtgaaaacaagtatgtatggggctttatctttcaaaccaacgtcgcatattgaaaatcttattactcacctcaagcccgggtctaacatatttgaaacacatcccagacaaaaaattaactacgagaatgatagttctcgtaaatgttacttactgctctccggcagtattgcgctttttcgcacccgggatggttttatgatgaactcagagtccgcgccttacgtttttggcctaagcaatcagctggccgcagccgactatctttatatgcaaacgatggagccttctcgtatcgccagcctgtctttatttaccgccaataccattattgccgaaaaagacctgtgggaaagcctcgcgcatttacttatttatactgccggacgcgtttacgatcactgtacccgcatttccgcaccaagctcatacgcgattatccgttcacaattatatgagctgatgcaggagtccgctgagattcggcagagcattactgcggcaaactatatccagtcgcggacatttctctctcgcagcagcattatgaaaatccttgccgaactaaaaaaaggcagttatatcaccaccgaacgcgggattttgttgcagatcaaacagggaatcccgttgaaatactga

SEQ ID NO: 172429 - DNA, 633 bp, Klebsiella oxytoca
atggctgcgcgcgatcgtcatatcgatatcaaagtaccgtcacctcatctgacgcctctgcttgccgcgataacccacgatgaggattaccgcctatggaaaaaaagcagcaaactttttttccgccgtggatcgcaacctttatgccacttcgtgcgtaaaggcagtgtgctgatcgtgcgcaatgaagatgccttctccctcggcattctttccgccccgctggcgttgggttttaccgttccactgtcggaacaccttcatttgcgtacgatggctgaatctgaaatcgctacgcttccctatgaacaggtgatggcgatagtcgaagaaaagcagatttgggacctggttgctaaacacgttatgtttgtgacaaataaaattttcatttataacgagatgctgacggcgcccaccagctttgatattttgcgttatcagttgctgatgctgattcaggaacccgacgaaatccgcgccagtacagccgcctatcagtatattcttgaccgtactcggttatcacgcagcagtattatgaaaatgctcgccgaattaaaaaaaggtcactatatccagctggaaaatggcaaactcctggccatacaccacctacctacccgattttaa

SEQ ID NO: 172430 - DNA, 783 bp, Klebsiella oxytoca
atgcgagttattgcagcattttgcggggtcataatagtgcataaaacggccagacaaaaatacctcattgatatccttagtgaaaaaggccaggtcaccatcagcgaactggttgataaactgcaggtatctgcggatacgctgcgccgcgatcttagcgaccttgaaaaacaggggcttgcccagaaaaaccacggcggcgctatcgcgcttaatctctcgataatgaatcgccagaaccgcaatacgctgctggcggataccaagcagcggatcgggaaaatggtggcggagaagatccccggcggatcgacgctgtttcttgatgcgggtagcaccgtgctggccgtcgccgcctggatacagggcccgatgacgatcatcaccacctcattggatattgcacaacacttcagcgatcgcgcggatattgagctgattttactgggtggaaaatgggaccgacagcagcgcctgtttgccggaagcgcgacggtatctctgctggaacgctatcgggcggatatcgcgatcctcggcgcctgcgcactccacgccgacctcggccttagcgccagtcaggaagcggatgctgaagtcaagcgcgccatgctggcggccagcgcagaacactggctggtcgccgatcatctgaaactgaatcactgcgagccctggctggttgccgggctcgccgacatccatcagctctttctcgaccggccatggaaagaattgcaggacaacggctcaatacaacttaatatcgctgagactaaataa

SEQ ID NO: 172431 - DNA, 1068 bp, Klebsiella oxytoca
atgagtaacgctaagactattaatattgccctgattggctacggcttcgtcggcaagactttccatgcgccgctgattcagtccgtcgaaggcatgaatctggcgattgtcgcctcgcgcgatgaagagaaagtcaaacgcgacctgccggacgtcaccgtcatcgcatcgcctgaagcggcgattcagcatccggaagtcgatctggtcgtcatcgcctcgcctaacgcgacgcacgctccccttgcccgtctggctttaaattccggtaaacatgtcgtcgtcgataaaccgtttaccctggatatgcaggaggcccgcgaactgattgcgctggcggaggaaaaacagcgggtgctgtcggtgttccataaccgtcgctgggatagcgactatctgggagtgaagcaggttatcgaacaagggcttatcggcaaagtgaaacattttgagtcccatttcgaccgattccgcccggaagtacgtgtccgctggcgggagcagaacgtaccgggaagcggcctgtggtttgatttaggtccgcacctgatcgaccagacgctacagctattcggtctgcctcagtcggtccagggaaatatcgctaccctgcgtgaaggcgcggaaatcaacgactgggcgcatgtggtcctcaactatccgcaacataaagtcgttctgcactgcagcatgctggtggcaggtggggtggcgcgctttaccgttcatggcgataaaggcagcgtcgttaaacagcgcgctgatcggcaggagagccagctgctggcgggggtgacgccggggagccaggactggggccaagacgacgatagtctggtcctgtacgatgcagacctgcagtcacgtgaaattagcgccccgcaaggggatcagcgccagtactatattcacgtccgcgacgcgctgaccggcaaaatcaacaatccggtatcgccgttagaggcgctggcggtaatggctgtgctggaagccgcggtaaaatcggccgagagcggaacgacgcaaaccttagcgctgaccgcagaggaactggcaggtctgaagtaa

SEQ ID NO: 172432 - DNA, 1266 bp, Klebsiella oxytoca
atgtttgctctggtcgatgtgaattcattttatgccagctgtgaaatggtctttcgtcctgatttacgtgggcgccccgtggtggtgttaagcaataacgacggctgcgtaatcgcgaggaatcacgaggctaaactgctggagatcccgatgggcgcgccgtatttcaaaatgaaatcacagtttgagcgtcatcaggtggcggtatttagcagcaactatgcgctttatggcgatatgtcccagcgcgttatgacccttcttgaggagctgtctcccgcggtgtatcaatattccattgatgaagcgtttgtgaatctcagcggcatccatcgcactgaggagcttgaagcattcgggcgccacgtgcgaagtacgctgctgcagtgtacaggattgacggtcggggtcgggatcgggccgacgaaaacgctggccaagctggctaattatgcggccaaaagatggccaaaattcgagggtgttgtcgatctctctttacaagccaggcagaggaaactgttggcgaaggttgccgtcggcgaaatctggggggtggggcggcgcatggcgaaaaagctgaatgatatgggaattaccacggcccttgaacttgccgaaatgcccgcttccctcatcagaaaacatttcagcgtggtgatggaacgcaccgtgcgtgagctacgaggtgagtcctgccttgaacttgaagagtatatgcccacgaaacagcaaatcattagttcgcgttcattcagtcagaaggtaagcgaatatgggccgatgcgcgaagccatatgcagccatgcggtacgcgcggcggaaaggctgcgcgcgcagcatcagtattgccgctatgtttcggtattcctgaaaaccagtcctttcgccggcaatgacgtctattacggtaacgatgccgggacagaaattcacattccgactcaggatagccgggatatcgtcgccgcggcggtaaaatgcctggagactatctggcgggagggacaccgatatcaaaagtgcggtgtgatgctgggtgatttctttagccggggcgtggcccagttaggcctgtttgatgactatcgcccgcgcgccaacagcgaacagctgatggaggtgcttgattttgtgaatcggcgtgaaaaaggtcggctctggtttgccgggcaggggattacgcgtagctgggagatgaaacggcacaggctgtctccagcctacaccacccggttcagcgacctgctgcgggtcaaactgtaa

SEQ ID NO: 172433 - DNA, 423 bp, Klebsiella oxytoca
atgatgttcagtaaaccggctgaaatgcgtgaaatcttgtcgattccgatgtttagcgaccttgtgtcgtgcggctttcccagcccggcgcaggattacatcgagaaggggatagacctcaatgagctttgtatcagccatcctgcggcaacctattttgttatggcgaccggcatgtcgatggtagatgccggcatttatgaaggtacgttgctggtggtggatcgcggcctgaaggcgaagcatggtgatatcatcattgccgctatcggcggcgaatacacggttaaacgcctgtgtacgcaccctacgatgcaactgctgccgatgaatccggattttccgccgattgtgctgcacaacgacggtgaagagctggagatttttggcgtagtcactttcagcatcaacaggctgcgctga

SEQ ID NO: 172434 - DNA, 195 bp, Klebsiella oxytoca
atgtattacacgttaggagataagactctccacttttatcgttatcagtgccgcttttatgttgcccactgggatggcggccatgtgatgacggagaagttcaagccgtttgttgcttctatcaccgagaaaacgggcattgatgcaaagaacgttgaggcggcggcgcgggactacttcaataacgttgattga

SEQ ID NO: 172435 - DNA, 192 bp, Klebsiella oxytoca
atggccatgttaaaagccagcaatctggaacaggcaaagcagctactgcagtccgacgataccgttaaaatagaactggatttcgagctcgactccgatgagttcttcaattttgctattgaatactgtacacatggagcaaagcttacgcgagttggcgatcgcttcgtaatttcacggaaattaaagtag

SEQ ID NO: 172436 - DNA, 315 bp, Klebsiella oxytoca
gtgaaaaaactactaatctgctgtctgttcggcgaaacggcaggtattattgcccgaaggatgcaaaaaatagctgatgaccgacaatgcgatctcttaatcagcgccgttggggttgaaaacttctttagcatcgcccccgcctttgatggcgttctgatcgcgccacatattcagtataaaattgccgaatttattgctgcgttgcatttacctcaagaaattgctgttattgaaagcttgccctacgctacatttgatggcgaaaagatcctcaatttcgcgctgaatacaatgccgcgtgctctggtttag

SEQ ID NO: 172437 - DNA, 564 bp, Klebsiella oxytoca
atggcgattaaagagttttttattcagacacaaccggaaaggcgccgttatggcgtagcgctatttgtcggggtggttgcagggattatgtctgcgttcgttaaatggggtgcggaagttcctttaccccctcgaaccttttccggtggcagggatgagtttaatccgccgtatcttttcttgcgcgactatctgggaattgaccccacgcatacggtatatactttttccgagcatatcattaatccggttatggtgacgcatattatattctctctggtgtttgcggtgggatattgcgttgttgctgaaatctttccgaaagtcaaattatggcagggggcgtgggcagggattgttgctaccattgccgttcactggatctcatttccgttactgggcctgacgccttccttattgaatattcctgcagatgagtatatttcggagttagtggggcatattttttggttctgggcgattgagatgattcgtcgcgaccttcgcaaccgcattactcaccagcctgacgccgaagtgcctctggatgcgcccttcagataa

SEQ ID NO: 172438 - DNA, 189 bp, Klebsiella oxytoca
atgattgaccacattcatttcaggtgcccatgctgtcatgggtcacagtacagaacatcgacttacgatgtgtctgaaaaaaatccgtttggcgcgaaatgcattttttgtaaatcggcaatgattacattcgataatatcgccccgcatattgccagaaactcggcatcgctcgagttacgcaagtaa

SEQ ID NO: 172439 - DNA, 906 bp, Klebsiella oxytoca
atggataagctggaatcaatgcaggtctatgtttgcgtggtggattcacacgggttcgccagagcggctgaagtgctggggctgccgcgctcaacggtatcgcgggtgattaaagagcttgaagcatacctgggaattcagcttttacagcgtaccacccgtaagcttagcgtgacggtagacggccacagttattatacagagtgcaaaaggcttctggctgagatcgccaccctggagtcctctttccccggtagatttgcgcagcccagaggacgctttaaagtgggtatgccgcagtcccttgcccgacattgtattatcccagggctgccggaatttctgcagcagtatcccggtctggatatcacgatttgttcaagtgatgacgtagaagatattattcaggaagggtatgactgcgcgatacgaacgggcagaatcgacgattcgaccactttggttgcccgagagcttgcaagctttcgctgggcgattctcgcttctccagactatattgccgctcatggtcggccggaaactcttgaccaactggaacagcatcgcgccgttggctacctgaaccaccgtaccggtcggagtatcgagtggcatttttcgcttgctgagggggattatgcccttcgcatgaaagagacgctggtcgtcgacgatacggatgcctacattcaggccggaatacaagggcttgggctcattcggattgccagctatctggctatgccgtacctgcgcagtggcgagctggtatcctgtctggagaacttctcttccgctttgcccctttcgctggtttatccgcaaaacagataccttcctccttcggtacgggcattctatgcgtggagcaaagcgctgttacagcaggcggtcactgacgaataa

SEQ ID NO: 172440 - DNA, 933 bp, Klebsiella oxytoca
atgagagaatctcatattcatgcaggtgaaaaggtattagtgctgggagcgggacagttgggcgcagccgtactcagctcattaatcccggcggtcaggcggcaaaatggtaccgtcgcggttatcgtgtcgccaggatcgtggggcgatcggggggagttgctttctgctagccatcaacaactggcggcggcgggggcagaatttattgcctgcgacgtagccgctggtacggttgcatcgttaacgggcccgtttgcagagtttgataccatcatcaactgcatgggctttattgctggcacaggaactcagataaagattacccgtgcggtactggaggccggagtgaagcgctattttccctggcagtttggcgtaaattacgatgtagtcggaaaaggcagcggtcaacccgtctgggacgaacagtatgatgtcagaacattattacgggaacaaatcgccacaaaatgggtgattatttcgaccggtatgtttaccagttttcttttcgagcctgccttcgacgtggtgaatttatcgcaaaatacgattaatgccctcggcagttgggataccctggttaccgtaacaacacccgcggatattggccgtctgaccaccgcgatttatttgcaacaaccgcgggtgagaaatgacgttatctttatcgccggagaaaccacttcctatagaaaactggcggacaccgttgagcgggtaactcaaaaatgcttttcaaaaaaggtactcactttgcccactctactggaacaactacgttcaaacccggacgatggaatgcttcgctatcgcgcagcttttgccaggggagacggtatgtggtggccaatgaataaaacgtggaatgcacaaaataatatacctacccaggatattgcctcatggctcaaaagtagtatttattaa

SEQ ID NO: 172441 - DNA, 981 bp, Klebsiella oxytoca
atgaaaactaaccgtatctgccagatcctgcatattgaaaaaccggtgattcagggccctctctcctggttgaccgatgcccgtctagtcgccgcagtcagcaatgccgggggacttggcgtacttggccctaatgccggattaaccgccgcgactgcggtatcaacgcccgaagaaaccgctgaaaaaatgcgcgaagagattcgtaaaactaagcaactgaccgaaaagccttttggtgtaaacctgatcccctctccagacaatgacatctggactccacccattctgcaggtaattaaagaagagggcgtcagcgctgtggtttataccggctacggtgaaggggcgatcataccgtcgttatttaatgaacttaaacaggcgggcattgctattatttatcgcgatatcaatccaacgcctgaaaatactcgtcttgctgaagaggccggcgccgatatcattgtcgcgaccggttttgatgaagggggaaccttgccgggcaccgcgctgggtactttttcaatcgtgccgctgattgccgatgcggtgaaaaatattccgctaatggctgcgggtggtattactgataaccgcaccgccagagcggcgcacgcattaggcgccgaaggggtatttgccggttcggtgttcatcggaacggaagagagcagggtaccgctgtcgattaaaaacagaattattgccgccaacggtcttgatttgctgctgttccgcacgcagccgcactactatcgctccctgccgggcaggctcgctgaaactttggtcgcaatggataaggccggcgcaagtcatgaagagctcggcagagcaatggggggattgcgtggcttgcgtattggcatgctggaggggaatgctgatgaaggctatatctcactcggtacggggatcggcactatccgcagcatcaaaagcgccgccagtgttgtgaacgagttagccgtaggctga

SEQ ID NO: 172442 - DNA, 1023 bp, Klebsiella oxytoca
gtggcgctacggcgcgggtcgtttttgctggaaggagtgtatgacgttagattatttagaaaaatagctaaaaaagttcatcactattataaaattgataacaatatctactctggcatcaggcaaaagaatccagccatgcaattaaatctctttgaatctataagaatttttattgaaattgtcgaatcaggcagctttactcaggcagcagaaaacctgcaagttcatcgccccgccgtgacgaaagccttacagctgcttgagcagcactgcggtacgcgtttgctgcagcgaaccacgcgtcgcattagcctgacgcctgacggggaaacgttttatcaccggagtaaacctttactctcccaggcggatgagctgctggagtcttttggcgccgatcgcgtactgcgcggccagctgcgggttgatatgcccatcgcttttgcaactttactggttgtccccaggcttcctgatttttatcgccagcatcctgacctcgaaatcattcttagtagctcagatcgccggagagatatgctgcgcgatggtcttgactgcctgctccgcgtcggggaactggatgacggagactatatcgcccgtaagctgggcaatattaaaatgacgacctgcgccagcccggcctatattgcccgctacggcgcgccgaacacgctggaggatttacagcagcatcaggcgatcaactggattaacagcaacagccgacaaagcatgccgtggacgtttaccacgccagaaggccccgttgaaatgacgcttcccggtaagctggtcgtggataactcagaaacctatttatctgcggggctggcaggcctgggattagtccaggggatgaacgtgtttttacagccttatctcgaccgggggctgttagtggaagtcttacccgacaatcctacccccgatcgcaaactgtcacttttgtatccgcaccgccatctttcccgcaaagttcgggtgtttaccgaatggttagagagcttattgtga

SEQ ID NO: 172443 - DNA, 543 bp, Klebsiella oxytoca
atgaagttattatctacggagcgcaccgatatctgtttactggcgcccgaccatgcacggcatttacaggattatttgctggaaaaccgttctcaccttgcgccattcgaacccttgcgaaatgacgactattttacgttagacactattgcgcaaagaatcagcagcgcgcgcagagagtatgacgaaaaacgtagcctgatgctggttttcaccctcaaaaatgaaccgcaaatcatcggcagtatcaacttcactaactttgtcttcggcgtttttcaggcatgctatctgggcttttccctcgatcgcgcctgccagggaaagggcctgatgcgcgaagcgttagagcaggcgattcggtacgtgcgtgaaaattacgggatacacaggatcatggccaatcatctgcctgataacgtgcggagcagcaatacccttaaaagtctgggttttgtgcaagagggctatgcgcactcttatctgaaaattaatggtatctggcaggatcacgtcctgaacgcattaatctttccggaatga

SEQ ID NO: 172444 - DNA, 885 bp, Klebsiella oxytoca
atggcgaggcgggaaaactataacgatctttacctgttcatgctggtggtgcgggaagggagctttaccgccgccgcgcagcggcttgggctggcgcaatccggcgtcagccgcgccgtacgcgaacttgaagaaaggctcggcgtacagcttctggtgcgcacgacccgtaaactttcacttacccaggccggcgagcagctctatcgaacggtagaagcgggctttgatgcattggattcggggctttccactctggcgtattatcgcaacacgccttccggcaccgtccgcattaacgccagccagcatgcgattgataaagtccttctgccgaagctggcggtgttcaagcagcgctatcctgatatccggctggaacttattagcgaaagtcggtttgtcgatattattgcagagcggtttgatgccggggtgcgtcttgggccggaggtcggcggcggcatggtcgcagtgcgcatttcgcccgatatggagatggccgttgtcggcacgcccgagcattttcgccgctacggtttcccgcaaacgccagcggatctggtcgtccatccctgtatcgcttaccagtttggcgacggtagcctttacgcctgggagctgaatgagcagggtaaaaaaattacccaccggcctcaggggcagtgggcttttgccgacagctatatggaagcgaaagccgcccgcctgggactgggcctggcctatgttccgcaggagctggtcgccgacgacctggagcggggcgcgcttatcagagtcctgcagcgttacagccagcggctggaaggctcttttctctattatcctcatcgcaacgtctcccccgcgctgcgggcggtgatagatacattgcgaacttga

SEQ ID NO: 172445 - DNA, 1059 bp, Klebsiella oxytoca
atgagctatgccgatacaaccaatccgaacgcgcccgtttcgctgatcgaaacctgggacaaaacctttacgaaaagcgcgaaagtcgatcaccgcaaggtgaccttccagaaccgctacgggatcaccctggtcggcgatctctacatccctaaagatcgcggcgagcgcaagctggcggcgattgccgtaagcggccccttcggcgcggtgaaagagcagtccagcgggctgtatgcccagaccctggcagaacagggctttgtcaccctcgccttcgatccttcgtacacgggggaaagcggcggtcatccgcgtaacgtcgcctcgccggatatcaatactgaggatttcagcgcggcggtggattttttaggattgcaaaacgaagtggatcgcaaccgaatcggcctgctcggcatctgcggctggggcggcatggcgctcaacgatgccgcgatggatacccgcgtcaaagcggtggccaccagcgttatgtacgatatgagccgcgcgatgggccacggcgttggcgacggtaaagatcgttataccaccgccgatcgccgcgccgtactgcaatatctgaacgcgcagcgctggaaagatgcggaaaacggtaccttcgcaccgggcggacatgacatttatgtcgatgagaaaggcaacgccagcgcgggcgatcgtatcctgccggaaatcctgcctgccaatccgaacccggtattgaaagagttctttgattattaccgcatgccgcgcggtttccacgcccgctctgtcaactcaaccggcgcgtggaacgcgaccatgccgctgtcgtttatgaatatgccgctgctgagctatgccaatgaagtcaccatcccgacgctgatcgtaaccggtgaaaatgcccactcacgctattttgccgaagacgcttttaaggctatcggcagtaaagagaaagagctggtcattgtcccaggcgcgaaccatgtcgatctgtatgataatgcggccggtaaaatcccgtttgccagatttgaacagttcttcaaaaccagcctgagataa

SEQ ID NO: 172446 - DNA, 1188 bp, Klebsiella oxytoca
atgtccatattgagtcgtaatacaccacaccctcaaccccccgcccactggggcggcgtctttgccatgacgctgtgcgtttttgtccttatcgcttccgaatttctgccggtcagcctgctgacgccgattgccagagagttaaatatcaccgaggggctggcaggccagggcattgcaatttccggcgccctggcggtgctgaccagcctgaccatctctgaccttgccggcagtctgaatcgtaaatatctcctgctggggctgacggtgctgatggcggcgtcgggaatgattgttgccctcgcccacaactatgcggtttatatggcgggaagagccctgattggcgtcgttatcggtggcttctggtccatgtcggcggccaccgctatcagactggtgccggcgcaccaggttccccgtgcgctggcgattttcaacggcggtaacgcgctggcaaccgtcgtagcggcgccgcttggcagctacctgggagccaccgtcggctggcgcggcgcttttttctgcctcgtgccgctggcgatagctgcattcatctggcagtgcgtcagcctgccagcgatggaaagcgccacagcgagtcggccacgcggtgctttgcttcgtctgttcagccgccccatcgtcgccatcggcctgctggcctgcggacttttctttatgggccagtttgccttatttacctacgtgcggccatttctggaaacggtaacccatatcagcgcctcaggtctgtcactgattctgctcgctatcggcgtcgcgggttttatcggcactctgtgcgtttcgacgctcctcaacgcccggttttatcagaccttaatcaccctcccgttgctgatggcggcgattgccgcaacgctgcttctggtcggccaccacgtctggcccgttgccgtactgttaagcttatggggaatgctggcgacggcggcgccaaccggctggtggacctggatagcgcggaccctgcccaatgatgccgaggcgggtggcggcctgatggtcgccgtcattcagctgtcgatcgcgctgggttcaactgctggaggttgggcattcgaccgcctggggtggcaaagcgcgtttggcttaagcggcattttgctgcttgccgcggtgggtatgactttgctcaccagccgtcaaccggcgaaataa

SEQ ID NO: 172447 - DNA, 345 bp, Klebsiella oxytoca
atgcatctcaaccggtgttgctggctgctactgttcttcgcagcgatcggtagcttttttacctcctggccctttgctgtctggctgctgctgattaacgtactgacgctggtgatttatggcgtggataaaatggcggcgcgcagggcctggcgtagagtgccagaggccactttactgacatttggcctgttgggcggctgggctggcgcgatagcgggccaaaggctgttccgccacaaaacgcagaagcagccgttcaggacctggttcgtcatcagtacgatggtcagcatcgcagggatggcggcgatttatgggttgtatgctttttccgctcactga

SEQ ID NO: 172448 - DNA, 729 bp, Klebsiella oxytoca
atgacctactccatcggtgaatttgcgcagctttgcggcattaacgcgaccacgcttcgcgcctggcagcgtcgctacggcctccttaagccacagcgtaccgatggcggccatcgtctgtacagcgatgacgatattcagcaggcgctcaaaattctcgactgggtcaaaaaaggggtgccggtcagccaggtcaagcccctgctggcccgtcccggcgcgcgacggacaaataactggctcaccttgcaggaaagcatgctgcagcgactgaaagagggaaaaatcgaatcactgcgccagctgatttacgacgccggtcgtgaatatccccgccccgagctggtcaccgaagtgctgcgcccgctgcgtagccaggtttccgccaatgtcccggcaatcatgacgctgcgcgaaatcctcgatggcatcattatcgcctatacctccttttgcctcgaaggggacaaaaaagcgcccggcgataactatctgatcaccggctggcacctgacggacgcctgcgaaatctggcttgaagcgctcaagcgcaccggcaagggtcaccgcatcgacgtccttcccacccctcccgcaacccttgcaccggagatcctgccagaacgcaaatggctgctggtgacgaccggtaaactctcgcctgcccggcagaggcagattgaacgctggcagcagcaggttgtctcgctggagattgtcgcgctgtaa

SEQ ID NO: 172449 - DNA, 435 bp, Klebsiella oxytoca
atgcgtccctcgtcgtccgccatcagtcgttttagcgcgtactatgccacgcttgatacccagccgccctcagcgctggccgagctgtaccatgcccatgccgtgctgatcgatccttttggccaacatcagggactggccgcaatccaggattacctttcacacctgctggctaacgtggatcactgccatttcaccctcgatgccccgctctgcgccggtcaacgctttgccgtcgcctggaccatgcactggtcgcatccgcgacttgccggcggagcggcgctagagcttgcgggatgttcaacggtcaccattgaggacgaacgcattattcatcagcgtgactactacgacgccggagagatgctgtatgaacatcttcccctgctgggatcggcggtgcgcggcgtcaagcggagggtgcagaaatga

SEQ ID NO: 172450 - DNA, 720 bp, Klebsiella oxytoca
atgatgactgttctgatcaccggcgccagctccggcattggcgccgggctcgccagatcctttgctgcggatggtcatcttgtcattgcctgcggccgcgatccgtctcgtctggcggcgctacagcagcacagccccaacatccgcgttctctcattcgatatgacggacagggatgcctgtcgccagacgctcgctaactgccgcgccgattgggtcattctctgcgccgggacctgcgaatacctcgatcgcggcatggttgatgccgggctggttgaaagagtcatcaccaccaattttctcgggccggtgaactgcctggcagcgcttcagtcgcagctgtcagccgggaatcgcgtggtgctggtgagctcgatggcgcactggctgccctttccacgggccgaggcctatggggcatcgaaagcggcgctgacctggtttgccaacagtctgcgcctggactgggagccacgagggatcgccgtcacggtcgtttcgccagggtttgttgataccccactaacgagtcagaacgatttttcaatgcctggacaggtgagcgtggagcaggcggtgaaagccattcgccgcggcctggcgaaaggtcacgatcgtatcgccttcccgactggcttttgtctgcttctgcgcctgctggccgggcttcctgaaagtcttcaacgcaagctgttacgcaggatggtacggtcatga

SEQ ID NO: 172451 - DNA, 1260 bp, Klebsiella oxytoca
atgaaaatcgcgattattggcagcgggattgccgggctgacctgcgcatggcgtcttgccgcgcaacaccaggtaaccctgttcgaagctgcatccacgccgggagggcacaccgccacggtggatatcgccacgccgcagggtacgtgggccatcgataccggattcattgtgtataacgatcgcacctatccgcactttatcggcctgctgagcgagctggggatccgcggccaaaaaacgcaaatgagcttttcggtccataacccgcagagtggcctggagtataacggtcatagcctgagttcgcttttcgcccagcgacgcaatctgcttaagccggccttctgggggctgctgagagaaatcgtccgttttaatcggctggcgaagcaggctctgggaggcgcgttcgacccggctgccacgctacagaccttcctcgagcgccaccgctttagccctttttttgcgcgccactacattctgccgatgggggccgctatctggtcttcgtcgctacaggagatgcgtcgcttcccgctggcgctgttcttacgcttctttgataatcacggcctgctggatatccgccagcgtccgcagtggtacgtggtgcccggcggctcgcgcgaatacgtccgcgccctgcttgcccggtctggcgatcgcctgagcctccgcctcaatacgccggtgcaaaacgttatccgcggtcaggatggcgtgacgttgcaactggcaacgggagaggagcatttcgatcaggcgatcttcgcctgccattcggccgatgcgctggccatgctggcggaacccaccgtcgccgaacgcgagattctgggcgatatcggctggcagcgcaacgaggtggtcctgcacagcgattcccgctggctgccggtgcgtaagcgcgcctgggccagctggaactatcgcctgagcgagcaggatcaggccagcgcctgcgtcacctacaacatgaatattcttcagggcctgcctgccgacgccccgctgttctgcgtcaccctcaatccgccgacacctgtggacccgcgcttcgtctggaagcgtatggtctatgaacatccgttgtttaatccacaaagcgggtcggctcagctgcggcgcgaggagatcaacggccgccagcggagctggttctgcggcgcgtactggtataacggcttccatgaagatggcgtgcgcagcgccctcgatgtggtcaacggcatcgccgcgacggagaatcgctga

SEQ ID NO: 172452 - DNA, 723 bp, Klebsiella oxytoca
atgaacagctgcctgtatgaaggggtattacgccaccgccgtctccagccgaaagcgcaccattttcgctatcgcatcttcatggcctggctcgatctggatgaactggacctgctcagcgaagtgggtatccgccgcaatagttttgctgccgcctctttttacgatgcggattacccgctgggtacgccgctgaaagcgcaggttctgaatcggctggaaagcctgaccggcgcgcgtccggatggccgcgttatgctgctgacccagctgcgctatctgggctttcattttaacccggtcaacttttactactgctatgacggcgcaggcgccctgcgctgggtactggcagaagtgcgcaacacgccgtggaatgaacggcattactacgctgtggacggccaacggaggcggccgctggataaggcctttcacgtctcgccgtttaacccgatggacatggtctatcactggcgattcaaccggcccggtaaaacgctgcatatgcatattgagaaccatcagacggcaaaagtcttcgatgccacgctggccctgagccgtgaacccttaacccgggccaacctgcgagggctgctgctgcgcattccgctgatgacgctgaaaaccgttctcgcgatttactggcaggcgctacggctgtggctcaagcgcgtgccgctgtacaaccatcctgtcagcaggagtgaacgctcatga

SEQ ID NO: 172453 - DNA, 1224 bp, Klebsiella oxytoca
atgaccgatcccgtttttgcgcttgagcccgatatcccgcgcaacgtgcgtatcgcgcgctggttgctctttcgtctgttgagcggcattcgtgaaggctcgctcaccgttcgcgaaggggcgcagacctttcactttggcgaccccgccgcgacgttacacgccgacgcgcaggtcctctccgcgggcgtctactggcgcttactcactggcggcagccttgccgcggcggaggcctggatggacggagaatgggagagccagcagttgacgcagttgctgcagatcctggcgcgcaacggccaggtactggggcggctggagcgcggcttccggctactgggcaagcccgtagaacgactgcgccactggacgcgccgcaactcgcgcgcgcaggcgaaggagaatatcgccgcccattacgatctgggcaacgacttttacgcccgctttcttgacgacgagctcctctactccagcgcgctgtttaccgatgacggtcaggatctcacccaggcccagcgggctaaaatggcgcgcctgtgcgagcgtctggcgcttacgcccggcgatcatttgctggagatcggtaccggctggggggcaatggccgaattcgccgctcgccattacggctgtcgggtcaccaccaccaccctgtcgcaggaacagtttcagtgggccaaagcgcggattgcccgcgccgggcttcaggatcgcgtcgacgtgctgctctgcgattaccgcgatctcaccggccagtacgacaagctgctgtcggtggagatgattgaggccgtgggccaacgctatctgccggcttttttccgcacctgtcaggcgcgcttgcgtccgggcggcaggatggcgatccaggcaatcaccatccaggaccagcgctatcgcggctacagcaaaagcgtggattttattcagcgctatatctttccgggcggatttttgcccagcattacagtgatgaacgaactgatgacgcgccataccgattttgtgatgcgcgatctgttcgatatgggcccggactacgcccgtaccctggcccactggcggcagcgttttctccacgcctggcaggatatcgagaagctcggctttgatgaacgtttccgccgcatgtggctttattacttcggctactgtgaggccggatttaacgcccgcaccatcagcgtcgtgcagctcaccgcggagcgaacatcatga

SEQ ID NO: 172454 - DNA, 534 bp, Klebsiella oxytoca
atgaaacgcattttgacccttggcctcgcgctgctgatgctggcgctggcgggctgcagcgccgaagtgaccgattatcgacagcagcagccggcgctggatatcttccactattttcagggtaaaaccgaagcatgggggatggtgcaggatcgccatggcaagcagctacgccgctttcatgttgagattgacggtgaggttgttggcgacacgctgacgctacatgaacgctttgtctacgatgatggcgaaaagcagcagcgggtatggcgcattcgccgcaccggcgacaaccgttatcaaggcaccgctggcgatattaccggcgtggcgcttggcaaggcatcgggaaacgcttttcactggcgctacagcatgaacgtaaaagccgagggtagccgctggcgactcgatttcgacgactggatgttcctgcaggacggcgcgcatctgttcaacaaaactgagttgaagaaatttggcgttaccgtcgccaccgtcacccttttcttcacccggacagcacaataa

SEQ ID NO: 172455 - DNA, 960 bp, Klebsiella oxytoca
atgagcacacaacctttgattgggatcagcggatgtttgaccggtgcggccgtgcgattcgacggcgggcataagcgaatgggattcgtgatggatgagctggcgcaatgggtcgcgtttaagcccgtctgtccggagatggcgatcggcctgcccgttccccggcctgcgctgcggctggtccaaactcgcgaaggggatatccgcatgcgcttcacccatgctccgcacgacgacgtaacggagaaaatggccgattttgccagcgcccaccttacgacgcttggcgaactgtcgggatttatcgtctgcgccaaatcaccgagctgcggtatggagcgcgtgcggctgtatgatgataaggacaatcgcggacgtaaagaaggcacagggttatttaccgccgcgctgctggataaatatccctggctaccggtagaagaggacggtcgcctgcacgatccggcgctgcgtgagaattttgtcgaaagagtttttgccctgcacgagctcaactgcttgcacaaaagtggcctgacgcgccgtgggctgctggatttccatagccgctataagcttcagctgctggctcaccatcaggcgggttaccgggaaattggcccgttcgttgcctcgctgcatgaatgggaggatctggaggctttctttgtggcgtaccgcgacaaattgatggcgatcctgaaaaagcccgcctcgcgtaaaaatcacaccaacgtactgatgcatattcagggctacttccgtaaccagctgaacagccgccagcgcggcgagttacgcgacgtgatccttaagtatcgctccggactgctgccgatcctcgcaccgctaacgctgcttaagcactatctggcggagtacccggatcgttacctgcagacgcagaactactttgatccctatccgcaggatctggccctgcgcctgacggtgaattaa

SEQ ID NO: 172456 - DNA, 429 bp, Klebsiella oxytoca
atgtacttctggaacgatgtgcattcgacctggctggaagcaagctatcagcgcgtcgagtacgatcggggcggcgagaatcacggctggaagctgacgctgtcgcaaaacatcgccattggcatgggggcggagagccacccgatgctgcgattctacgtccccggcggccaggtggacaataagcacatcgccaaagtgaacgacagcagcgtcgaacggctgcattcgttaaacgtcggcgagatgtttgaggcgtggttccaggtctgccggtatctacgcgaacaggctggcctgcgccggcctgttcgcgggttctgtagacttaattcaccgtcaggcgcagggccagatcctgcggatagggatcaaagtagttctgcgtctgcaggtaacgatccgggtactccgccagatagtgcttaa

SEQ ID NO: 172457 - DNA, 1455 bp, Klebsiella oxytoca
atgggtaaaaacataatgcaaagtcgccatgacgaatatcataaattaactcgcggggaacgtattggttatgggatgggcgactttgctcaaaacctggtttttggcacaattggcggttttcttgctctacacatgctgacggtcaataccatcagtacagcaacggcagggtttatatttctttttgtccgcatcatcaatgtcttttgggatccgatggtgggaactttcgttgataagagaacatcgaacgccgggaaataccgtccctggctgctcagagccggcgtgccgctggtgatcctttccgctttactttttgccccgatccccagcgtccgcggttcagtcccttttgcttttatcatctatctggcgctggatttagtctattcgctcgtgaatattccttatggttcacttaacgcttcactgacgcgcgacccggaatcgattgataagctcaccagtacgcgaatgatgctggccaacagcgccaacctgcttgtctatactctgttcccgatgtttatacaaatggcttcgcctaaagatcgcagcctgaaggacaccggtttttttggtattgaactcaatctgggtaactataccgatccttctgcgaactatgcctggtttggcgtttactcaatttatatgttgattggcgcggtggcgcttttcatctgctataaattcaccaaagaacgtgtggtggcgacagcggaacagacggctaacgtcaaaaccaccgatctttttcttgaactcaaacataatcgcccgctggttattctcggactgttctttatgctggcctttacgttcatgttttttatgaacacggtaaatggctttttcaatcagtacgttgttggccattcagaatggatgggcgcagttggcctggtcgcctctattccgggcattgctttccccattttctggccgcgactcaagaaaatttttggcaaaaaagggttcttccatctttttctggccatgttcattgtcggtgaattattaacctatatttggtcgcgcgagggtatgcacgatgcgctgtggcttgcttacatcgcgacatttattaaacagtggggcttaacgtcagcgaccggcttcatgtgggcgctggtgccggaagtgattgcatatggcgaactaaaatcgggcaaacgaaacgctgccatcattaacgctattatggggctcttttttaagattggctttactatcggcggcgcgattccgctatggttgctggccgtttatggcttcaatgaaaccggcgcccggcaaagtgccagcgcaatcgaggggattataatgaccgcagtttggatcccgattgctttggcgattatttcaatgatcattatccaggtttatcccatctcggacaaaaacgtgaccgatatcaatcgtcagcttgatgagatacgcgtgtag

SEQ ID NO: 172458 - DNA, 1680 bp, Klebsiella oxytoca
atgtctcttattcaaaaccctattttacgtggatttaatgccgaccccagtattatccgtgtcgaggacacttactatatcgccaactctacatttgagtggtttcctggcgttcgtttacatgagtcaaaagaccttgagcactggaatcttctccctgcgcctttgtcaacgaccaccctgctggatatgaaaggcaacccctcatccggcggtatttgggcgccggcgctctcctgggccgacggtcaattctggttagtctataccgatgtcaaagtcaccgaaggcgcctttaaagacatgactaactatctgaccaccgcgaccgatattcgcggcccctggagcgatcctgtcaagcttaacggcgtgggttttgatgcctctcttttccacgatgatgatggccgaaaatatatcgtgcagcaaacctgggatcatcgcgaatatcaccacccttttgacggcattacgttaaccgaactggataccaaaaccctgaaattaatgccaggaaccgcgcgtaccatttatcatgggactgccgttggcctcgttgaagggccacatctctataagctcaacggatattattatctttttgccgctcagggaggaaccgtatttacccaccaggaagtggttgcccgctcaaaaacgctggaagccaacagttttactaccgaaccgggagacgtcttcttaacgaatgtcgatacgccagacagctatatccaaaagcaagggcatggcgccttagtttctaccccaggaggcgaatggtactatgcctcgctctgcgctcgtccgtggaatcgccctggcgagtcggtctacgatcctcgcggctggtcaaccctcggcagagaaacgtcgatccaaaaagtgtactgggatgaagatggctggccgcgtattgcgggcggtcacggcggtaaaacgttcgtcgaggggccgaaagacgccatttataccgaaagtgcagaggatcgtagccagcacgacgactttaccacgccgacgctcgatcccaactggaatacgctgcgggtgccctttagcgagaaaatgggtactaccggagacggaaagctcaccttaatcggccaaggctctttagccaatacgcacgatctgtcgctgattgcccgacgctggcaagccttttattttgatgcccaggtaaaagtaaaatttgatccgttcaactaccagcaaatggcaggattaacgaattactataacgatcgccactggagctttgtgtttgttacctggaatgaaattaatggaagggtcattgaaataggggaaaataatcgcggaaaatatacttcctatctgaaagataatgccattaaggtgccagagcatgtcgaatatgtctggttgcgcagcaaagtcaggaaggaaacgtatagctatgaatatagctttgatggcgtcgcgttcactgaaatcccggtcaggttagatgccgctatcctttcagatgactatgtcttgcagagctatggcggtttctttaccggagcgtttgttggccttgcggcagtcgactactccggctatggcgccagcgctgagttttatcattttgattatcaggaacttggcgattcgttagttggtaatgaggtttatagctgggaagccaatgagttacgtagttattaa

SEQ ID NO: 172459 - DNA, 492 bp, Klebsiella oxytoca
atgatggggggaacttctctgtatgaaatgctctacggcaattttgccggagggactgcactggaccaggtgagcgaagaaacccaggtgattctgtcggttctggataatatgcagcgcattcttaactgtcgcgccgggacgctggcgcatcttccggattacggcctgccggatatgactaaaattctgcagggtatgccagggacggcccatgaactgatgagcatcttgtcgaccgtgttgcttaaatatgagcccaggctaaagaaagtgaaggtggttctgctggcgcaggcgatggcgggcgagctgcgctatggacttgatgctgagctgaagggtattggcctggtacgttatggtaccgtatttatgcccgagggaagggtgcttattcgtcatctgaagcagcagcattacctggaggcccgttccgcaatccaggctttgcaggctggtatcatcagatcgtccaacgctgaagcttga

SEQ ID NO: 172460 - DNA, 540 bp, Klebsiella oxytoca
gtgttgcgtatcactttgattaagcgatctaccttactacttataccgttaatgctgacggggtgtggcctgatgcagaaaattagcgacggcacctcatcggtagtgaaatcggtcttttataaaccggtaaaaaccctgcatctggacgtgactggccgggcggagctgaacaccgatgagcgggaaaatgcctcattctcccagccggtgatggtatgggtgtaccagctcagggaccgtaaggcgtttgatcaattgctctatcagcagctggcttcggaaggtgataatgcagccggaaacgaactgcttgccagccatagcctggtggtgaaacccggcgcagacgccagcctcgacatgccgatggatgaaagaacgcagtttatcgcggtggtggggctgtttcgggcgccggatatggtgaggaatgactggaagctggtactgagacgcgacgacctcgatccggacaaaccacgcgttattgaagccagccaacatcgtctgacgctgcaaccgaagaaggatgactga

SEQ ID NO: 172461 - DNA, 1086 bp, Klebsiella oxytoca
atggcaggagaaccacaaccgccgtattcccggctgagtccccggctggagcgggaaatccatcgcattaacttctaccgcttctgccagttactggaaaagcgtcacccggaagcctccccgttgggcggtactctgaacccggccagcgatccggtacgttttcggccgcatccgggaatgggcttcccggttagcgagctaaaagcggtggaatatgatgagtatcatcctgatgcgccgccgacggtgcgtacgacgtttatggggctctacggcgtcgactcacccctgcccaccgcatggctcgatgatatcgcccgacagcgggaagggcacgaagcgcaggaggcctttctcgatatctttaaccaccgcattctgacgcagttctatcgcatctggcgaaaatattcgtacccggcgacgtttgaagcgggcggcagggacagcacctcgcagagtctactgggacttatcggtctgggcataccgggtaccgcaaagcatatcgccactccgacgtcgcgttttctggcgctgctcggcatcatgcgcctgcctgcgcgtaccgaagagggcgtgcaggcgctggtacggctgctggctccccgcacgcaggcccgcgtcacgccgcactctccgcgcccgttttccatcagccatcctctggggttttacgacaatgacgattttctgcttgatggttataacgtgctgggcgatgaaacgacagaggtcagcagccagctgttgattgcgctgtatacggatgatattgccgagacgcagggatggttaccggaagggcagctatatcaggactttgtggtcctgctgcgggtctatctcgggtggcgctataaggcgcggatacagctgaccgttcctgctcagctactggctgcgccggtgctgggcgactccccttttatgctcggcatgacgggggtactgggtgtggagggggaaacgatcccgcccgatatccccgccgcttttactattgagccaggcaactataacggaatgccgtctgcaactttacaacaaggaaaccaacgtgttgcgtatcactttgattaa

SEQ ID NO: 172462 - DNA, 1761 bp, Klebsiella oxytoca
atggatgacttaactctgcgttattttgacgccgaaatgcgttacctgcgtgaagcaggtgaagaattcgcccgcgcccatcctgaccgggcagcggccttaaatctcgacaaagcgggcgcgcgcgacccgtatgtggaacgcctgtttgaaggcttcgcctttctgatgggccgcctgcgggaaaagctcgacgacgatctgccggaactgaccggcggtctggtcagcatgatctggccacattacctgcgtaccattccttcgctctccattgtcgaattcaccgcggactggcatgaactgaaagaacctctacgcatagaaaagggctttggcatactttcgcagcctattggcgaaaagcgcacccgttgccattacaccactacgcaaccgttaactctgctccccttgtcgcttgtccgggcggggatgtcgacggaagcggacgggcgctcgcttatccgcctgcgctttgagtgcagctcgctggcagactggagccgcatcgatgtaagccgcgtcccgctgtatctgaatgccgatgcgccgctggcctgcgctctgcatgaggcgctgacgctccgggtggcaaaaacgtatgttcgcctccccggcaatgccgaacgctggccgctggacgcccgttttgccgtctgcggtttcagtcaggatgaggcgctactgccggagagcggcagcttcagcggttatcagctgctgctggagtatttttccttccgggaaaaatttatgtcggtgacgctgcgcggcctggaaaatgtgaatttccctgaggttctggcgtggtttgaaattgatatcgtgctggagaaaccgtggccgcacgaatatgcgctgtcggagaaaaatctgcgcctgcactgcgcgccggtgattaatctgttccctctggagtccgatccgctgcacctggactcgttgcagaccgaatatctgctgcgcccgatgcgtatccaggatgggcataccgagatttattccgtggattcggtcacttcctcgcgccattccggccatcagacgtatgtgccctttaccagcttccgtcacaaagggggcatgctgcgccatgatgcgccggaatattactatcatacgcgggtgaagcccggtccttccgggctgcacgacacctggctgatgctcggcggcgaggcgtttgataaccacagcgtacctgagcatgaaaagctatcgctcagcctgaccggcactaatggtcaactgccgcgccgggcgctacagagcgcgctgctggatacggtggtgaaatccaccgccacgcctatccaggtgcgcaatctttgcgccccgacgctgccgtgctatccgccggatcgcgaccgatttcactggcgagtactgagtcatctcggcagcagcttcctgtggatgatggataacgccgacgtgctgcgcggcgcgctggccctctatgactggaccgataacgagatgaatcgccgccgcctggaggcgattgtcgatgtcaggcacagcgaggtggaacgttttgcgcagggccattttctgcgcggcgtacagattgaggtgaccctcgacagcagcggcttcgccgggcacggcgatatctgcctgtttggcgaaatgctgaaccgcttcttcgcgctctataccgatattcatctgttcaaccatctgattctgatactacaacctgggggagaacgtctcgaatggcaggagaaccacaaccgccgtattcccggctga

SEQ ID NO: 172463 - DNA, 183 bp, Klebsiella oxytoca
atggcgaaagggagtgacttgattcgcgttgacagaactacgtgcggcggatttatctgccggttcactatgctgggcgtaccggttgcgcgtgaaatagaccgggtaacgggtggtcaacatccgggcatatacacgatcgctggctctcttcctggagacagtcttgatggcctggggtag

SEQ ID NO: 172464 - DNA, 567 bp, Klebsiella oxytoca
gtggcaatgtcagtacccgcaatttttcttgaccgtgatggcacgattaatgtcgatcacggatacgtccatgaaatcgacaattttgaatttatcgatggcgtcattgacgcgatgcgtcaattaaaggagatgggctatgcgctggtgctggtgaccaaccagtccggtatcgcccgcggcaagtttactgaagagcagtttgaaacgctgacggagtggatggactggtcgctggccgatcgcggcgttgacctggatggcatctattattgtcctcaccatccgcagggaaccgttgaagagtttcgccagacctgcgactgccgtaaaccgcatccgggaatgctcatctcggcgcgcgactacctgcacattgatatggcggcgtcatatatggtgggcgataaaattgaagatatgcaggcggccttagcggcggaagttggcacgaaagtattggtacgcaccggtaaacccgtcactccagaagcggaaagtgctgccgattgggtgctaaacagcctggcagacctgccggatgcgattaaaaagcggcagaaatag

SEQ ID NO: 172465 - DNA, 1032 bp, Klebsiella oxytoca
atgattaaactttcgaatatcaccaaagtgttccagcaggggaaccgcagcatacaggcgctgaacgatgtcagcctgcatgttcctgccggacaaatttatggcgtcatcggcgcttccggcgcgggtaaaagtacgttaatccgctgcgtaaacctgcttgaacgtccaacgcagggcagcgtccaggtcgacggccaggagctgacggcgctttcagaaaaagagctgactcgcgctcgccgccagattggtatgattttccagcactttaacctgcttgcctcacgtaccgtgttcggtaacgtggcgttgcctctggagctcgacaatacctctaaagatgaaatcaagcgtcgggtgaccgagctgctggatctcgtcggtctgggagataaacacgatagctatccggcgaatctctccggcgggcaaaagcagcgcgtggccatcgcccgtgcgctggcgagcaatccaaaagtcctgctctgcgacgaagccaccagcgcgctggacccggccactacgcgttcgattctggaactgctgaaggatatcaaccgtcgcctgggcctgacgattttgctgattacccacgaaatggatgtcgttaaacgcatctgtgattgcgttgccgttatcagcaacggccagcttattgagcaggatacggtgagcgaggtgttctctcatcccaaaacgcctctggcgcagcagtttatccagtcaacgctgcaccttgatatcccggatgattatcaggcccgccttaaacctgaggctcttgccgatagcgtgcctatgctgcgcatggagtttaccggtcattccgtagatgccccgctgctttcggagactgcccgtcgttttaatgtgaataacaacattattagcgcgcagatggattacgcgggcggcgtcaagttcggcatcatgctgaccgagatgcacggctcgcaggaagatacccaggccgcgatcgcctggttgcaggaacatcatgtaaaagtagaggtactgggatatgtctga

SEQ ID NO: 172466 - DNA, 654 bp, Klebsiella oxytoca
atgtctgaaccaatgatctggctgctggttcgcggcgtatgggaaacgctggccatgacgtttgtctccggcttcttcggttttgttcttggcctgccggtcggcgtgctgctgtacgtcacccgtcccgggcaaattgtcgctaatgcgaagctctaccgcacgctttcggcggtggtgaacattttccgttcgattccttttattatcctgctggtgtggatgatcccattcactcgcgtgattgttggcacgtcgattggcctgcaggctgccattgtcccgctgacggttggcgccgcgccgtttatcgcccgcatggtggaaaacgccctgctggagatcccaaccggccttatcgaagcatcccgcgcgatgggcgcaacgccgatgcagatcgtgcgtaaagttcttctgccggaagcgcttccgggtctggtgaatgcggcaacgattacccttatcacgctggttggctattccgccatgggcggtgccgtcggtgccggcggcctgggacagattggctatcagtacggttatatcggctacaatgcaacggtaatgaataccgtgctggtgttgctggttattctggtttatttaattcaattctctggcgatcgtatcgtccgggctgtgactcacaaataa

SEQ ID NO: 172467 - DNA, 816 bp, Klebsiella oxytoca
atggcctttaatttcaaaacctttgcggcagtcggcgcgttaatcggttctttggcgctggtgggttgcggtcaggacgaaaaggatccaaaccacatcaaagtcggcgtgatcgtcggcgcggaacagcaggttgctgaggttgcgcagaaagtagcaaaagataaatacggcctcgatgttgaactggttaccttcaacgattacgtgctgcctaacgaagcgctgagcaaaggcgatattgacgttaatgccttccagcataaaccgtatctggaccagcagattaaagaccgcggctacaagctggtttccgtcggcaactcgtttgtctatcccattgccggttactcgaaaaaaatcaaatcgctggatgagctgcagccgggctcgcaggtcgccattcctaacgatccaaccaaccttggccgctctctgctgctgctgcagcaggttggtctgatcaaactgaaagaaggcgttggtctgctgccaacctcactggatattattgaaaacccgaaaaacctgaaaattgttgagctggaagccccgcagctgccgcgctctctggatgatgcgcagatcgccctggcggttattaataccacctacgccagccagattggcctgaccccggcaaaagacggtatttttgtcgaaggtaaagagtctccgtacgtgaacctgattgtcgctcgcgaagacaacaaagatgcggaaaatgttaagaaatttgttcaggcttaccagagtgacgaagtttacgaagcagccaacaaaatctttaacggcggtgcggtgaaaggctggtaa

SEQ ID NO: 172468 - DNA, 408 bp, Klebsiella oxytoca
atgcgtgctttaccggtctgtttgttagcactcatgttaagcggttgttccatgctaagcagatcgccagtcgaacctgtgcaaagtacggtcactcagccagccaaatcggaaccggccaaaccgaaagcgacgcgcccggccccggtaagaatctataccgatgcaacagagttggtgggtaaacctttccgcgaactgggtgaagtcaccggtgaatcatgtcaggcctctaatcaagactctccgcccaatatcccgacggctcgcaagcgtatgcagattaatgcggcaagaatgaaagccaacgctgtgctgctgcaccgctgcgaagtgaccagcggaaccccgggctgctaccgccaggccgtttgcctgggatcagcgcttaacgttacggcgcaatga

SEQ ID NO: 172469 - DNA, 708 bp, Klebsiella oxytoca
atgagtgcttttcagtttgcgcagataggcgttattcgctcgccctataaagaaaaatttgccgttccccgccagcccgggctggttaaaaacggcggcggcgaattacaccttttgcctccctataaccaggccgatgccgtacgcggcctggaaaatttcagccatctgtgggtcctgtttgtgtttcatcagaccatggaaggcggctggcgtcctaccgtccgccctccccgcctcggcggtaacgcgcgaatgggcgtattcgctacccgttcgacctttcgtcctaatccaatcggtatgtctctggtcgagctaaaaggtattcgctgccagaaagaacacgtcgtgcttgagttaggcagcctggacctggtagatggaacgccggtcgtggatatcaaaccttacctgccctttgccgaagcactgccggatgccagcgcaagctatgctcaggaggctccaggggcggaagtagcggtgagtttcacgccggatacagaagcgcaaattttaacgctggagcgacgctatcctcgtcttaagtcgtttattagcgaagttctggcgcaggatccgcgaccggcataccgcaaagaagaggagccgggaaaaacctacgccgtctggctgctggattttaacgtgcgctggcgggtgatttcgtccggttttgaagtcttttctctcgaagcacgctaa

SEQ ID NO: 172470 - DNA, 1719 bp, Klebsiella oxytoca
atgcgtactagccaatacctgctctccactctgaaggagacacctgccgacgccgaggttatcagccatcagctgatgctgcgcgccgggatgatccgcaagctggcctctgggttatatacctggctgccgaccggcgtgcgcgtcctgaaaaaagtcgaaaacatcgtgcgtgaagagatgaacaacgccggtgcaatcgaggtgttaatgccggtagttcagccctctgagctgtggcaagagagtggtcgttgggaacagtacggcccggaactgctgcgtattgctgaccgtggcgaacgtccgttcgtactcggcccgactcatgaagaagtcatcaccgacctgattcgtaatgagctgagctcttacaaacagctgccgctgaacttctatcagatccagaccaaattccgtgacgaagttcgcccgcgtttcggcgtaatgcgttcccgtgaattcctgatgaaagatgcttactctttccatacctctcaggaatcgctgcaggagacctacgacgcgatgtacgccgcgtacagcaaaatcttcagccgtatggggctggatttccgcgcggtacaggctgacaccggttctatcggcggcagcgcatctcacgaattccaggtactggcgcagagcggtgaagatgacgtcattttctctgactcttctgactacgcggccaatattgagttcgccgaagccgttgcgccgaaagagccgcgcgcggccgccacgcaggaaatgaccctggtcgatacgcctgacgctaaaaccatcgccgagctggtcgagcagttcaatctgccgattgagaaaaccgtgaaaaccctgctggtaaaagcagtagaagacagtgagtatccgctgatagccctgctggttcgcggcgatcatgaactgaacgaagtcaaagcggaaaaactgccgcaggtcgccagcccgctgaccttcgcaaccgaagaagagattcgcgcgctggtgaaagcgggtcccggttctcttggcccggttaatatgcctgttccggtgattattgaccgtaccgttgccgccatgagcgatttcgccgcgggcgcgaacattgacggtaaacactacttcggcatcaactgggatcgcgacgtcgccactcctgaagtggcagatatccgtaacgtagtggccggtgacccgagcccggacggtaaaggcacgctgttgattaaacgcggtatcgaagtgggccacatcttccagctgggtaccaagtactctgaagcgatgaaagcctccgtacagggcgaggatggccgtaatcagatcctgactatgggctgctacggtatcggggtgactcgcgtggtggcggcagccattgagcagaactttgacgagcgcgggatcttgtggccggaagctatcgccccgttccaggttgcgattctgccgatgaacatgcacaaatcctatcgcgtgcaggagctggctgagaagctgtatgctgagctaaccgcgctgggcattgaagtgctgatggatgaccgtaaagagcgtccgggcgtgatgttcgccgatatggagcttatcggaattccgcataccatcgtgctgggcgaccgtaacctcgacaacgacgatattgaatataaatatcgccgcagcggcgagaaacagctgattaaaaccggcgatatcgtgaattacctggtacaacaaattaaaggttaa

SEQ ID NO: 172471 - DNA, 822 bp, Klebsiella oxytoca
atggctaaacgacgggctaatcatgtcctgctttttcccgtatcgttcttactttctgcctgcacggtagacgtcagccggtccgtgccttccgcttccactattaagcaaccatcgcagcaatgggcgattaaacttcagcgccagagctcggtggctaataacacgctgactgaaattaacgcacaagatctgctccccggcgatctccttttctcttccagcattggcgtgacgtccctggggattcgtgctcttagcacatcctccgttagccatgtcgctatctatatcggtgataaccaggttgcagaggcaaccggcgctggggtgcaggttgtgcctctccggcaagcgatgcagcacagcgataagctgtttgccctaagagcgcctgacctcacgccgcaacaggccgctggcattaaaaatttcgcctataaaaacagaaacagcgcctataactatcgcggcattattgaatttgtgccctttatggtcaccaaacagctatgcaccctgaatcccttctcaaaagatttccgccagcagtgcgtgaacggtctggccaaagcccagctgagcgatgcagcatccggggacaaaaaaatgtggttttgttcggagtttgtcagcgatgccttcgcgaaggccggacacccgctgaccctagctcaaccgggctggattagcccatcagacctgcttcatatgcgtgagggggatgtggcaaactttaagcccgaaacacaattgcagtatatcgggcatcttaaattgggaatttatatcaagacaagccgcctcgtaggactcaattaa

SEQ ID NO: 172472 - DNA, 702 bp, Klebsiella oxytoca
gtgaagaaaatcgtattttcagtcgtggcggcctgttcgctctttgccctgttcggctgtaaccatcgtacggaaatggaaacgttacagccggcgccgatggaagagctaaaaccgatgcagcagagctggcgcggcgtgctgccgtgcgccgactgcgaagggattgaaacctcgctctttcttgagaaagacggcacctgggtgatgaatgaacgatatcagggcgttagccgcgaaccttcctcttttgcttcatatggtacctgggcgcgcacggctgataagctggtgctgaccgacagcaaaggcgagaagtcttattatcgggcgaagggcgataagctggaaatgctcgatcgcgacggtaatcccatcgagtcgacgctgaactatacgcttgaatcagtcaaagccagcctgcccatcacgccaatggcgatgcgcggaatgtacttctatatggcggatgcggcgacctttaccgattgcgcgaccggcaagcgagtggctgtcgccaataatgctcagctcgagcgtgattatgccgctgcgcgcggtacggatactcgaccggtgctgctggtggttgaggggcactttacgctggaagcgaatccggattcgggagcgccggttaaagttctggcggtggattcacccggcaagttttatcaaaaagaagactgcaattctcgttaa

SEQ ID NO: 172473 - DNA, 414 bp, Klebsiella oxytoca
atgattacgattagccgcagcgtcgcgattgcggaggacgagatttcactttccggcatacgcgcgcagggagcgggcggtcagcacgtgaataagtcctcaacggccattcatttgcgctttgatattaaagcctcgagcctgcctgactattataaggaacgtctgcttaccgccagccaccacttaatttctgccgagggtgtggttatcattaaggctcaggaatatcgcagccaggaaatgaatcgtgaagcggcaattgcgcgtctggttgccctaatacaagaattaaccgcagtgcagaagagccgccgggagacgcgaccaaccagggcctcaaaagagcgccgactggcttcaaagacgcaaaaatcctcagttaaagcgctgcgtggaaaggttcgccagtaa

SEQ ID NO: 172474 - DNA, 546 bp, Klebsiella oxytoca
atggcgctgaaagcgacgatttataaagcgacggtgaacgtagccgacctggaccgcaaccagtttctggatgccagtttgacgcttgcccagcatccgtcggaaacccaggagcgcatgatgctgcgcctgctggcgtggattaaatacgccgacgagcgtctgcagtttacccgcggtttatcttccgacgatgaagcggaactctggctgcttaacgatcatctgggcgtggatctttggattgaactggggctaccggacgagcggcgaattaaaaaagcctgctcgcgggcccagcaggtggcgctgttcgcctataatagtcgggcggcagaaatctggtggcagcaaaaccagaacaaaatggctcagttttcgaagctgacggtgtggtatttggatgatactcagctggcgcagctcagcgcttttgccgatcggaccatgtcgctgcaggcgaccatccaggacggcgctatctggttatctgacgctaagaataatctggaaattcatttaacggcctggcaaacacccgcatga

SEQ ID NO: 172475 - DNA, 201 bp, Klebsiella oxytoca
gtggaaaaatattgtgagttaatacgcaagcggtatgcggaaatagccagcggggaccttgggtatatcccggatgcgctaggttgcgtgttgaaagtattgaatgaggttgcggcggatcaggcccttgctgagtcagtcagggaaaaggccgcatatgcggcggcaaacttactggtgagcgattatgtcaatgaatga

SEQ ID NO: 172476 - DNA, 261 bp, Klebsiella oxytoca
atgtcaatgaatgatacttatcaacccatcaattgcgatgattatgacaacctcgaacttgcctgtcagcaccatctggtcctggcgctggagctcaaagatggcgaacagctgcaagcgaaggccaacgatcttatctcgcgcaaaaatatcgagtatctggtcgtagagctcgccgggaacgtccgcgaactgcgcctggataaaatcgccagcttcagccatccgcaaatcggtacggtagtcgttagcgagtcctga

SEQ ID NO: 172477 - DNA, 1308 bp, Klebsiella oxytoca
atgatgatgatcccggacattgcgcacacgcttcagccgcaccgccattttttagtggcctttagcggcgggctggattcgagcgtgcttttgtatcgcctggtgctctggcgcgagcaggatcccaccgttcgcctgagggcgatacatattcaccacgggctcagcgccaacgccgacgactgggtggcgcactgccagcaaatgtgccagcagtggcaggtgccgcttctggtagagcgggtcgcgctcgccgatgaggggttgggaattgaggctcatgcgcgccaggcgcgctaccaggcatttcgttcggcgttggcgcccggcgaaacgctggtgaccgcgcagcatcttgatgaccagtgcgaaaccttcctgttagcccttaagcggggaagcggccctaccgggctctcggcgatggccggcgagtccgattttgccgggacgaaactgctgcgcccgctgcttcacgaaagccgtgactccctccatcagtgggcgatggcccgtcagctcagctggattgaagacgaaagcaaccaggatgacgcttacgatcgcaactttctccgcctgcggattctcccgctgcttcatgctcgctggccgcactttgccgaggccgtggcgcgcagcgccagcctgtgcggcgaacaggaacagctgctggatgaaatgctggccgccgagctggcaacgctggttgctgaggacagttcgttaactatcgctccgttgacgactatgagcgcgcctcggcgggccgcgctgctgcgccgctggctggctgggctcaatgcgccaatgccttcgcgcgaggtgccggagcgtatctggcgtgaagtggcgatggcgcgcgaggatgcgtttccctgtttgcgccttggcccgtttaccgttcgccgctaccagcagcgtctgtactgggtgagatatattccaggccagagtgagacaatgctggagtggcgcgatactgccagcccgctgccgttgcctgacggtctcggcgagctgagcttactgtccggcgggccattacgcgggccgcgcgagggagaagccgttactattcgctttcgtgccagcggtaatctgcatatcgtgggtcgcaacggtggtcgcaagctgaaaaaaatctggcaggagctgggcgttgcgccctggcggcgcgatacgactccgctactgttctatggcgaaacgcttattgccgccgccgatggtctgtttattaccgtcgatgggaaagttcaggaaagtgaaggcttacagatgagatggaggaaaacgggcggctag

SEQ ID NO: 172478 - DNA, 390 bp, Klebsiella oxytoca
atgctgggtttaaaacgggttcaccatatcgctatcattgcgacggattatgcgaagagtaaagcgttttactgcgacatcctggggttcaccctgcagggggagttttatcgcgcagagcgtgattcctggaaaggcgatctggcgctgaatggtgaatatgtcattgaactgttttcattcccgtttcctccctcgcgtccgagtcgccccgaagcctgcgggttacgccatctggcgtttagcgtcgatgatgtcgatgctgctgtggctcatcttgaggcgcacggtgtgccttgtgaaggggttcgtatcgacccttttaccggtaagcgtttcaccttttttaacgatccggacgggctgccgctggagatttatcagcagtaa

SEQ ID NO: 172479 - DNA, 2172 bp, Klebsiella oxytoca
atgctttccttaggtcaattcctggaggaaagcgtgaatattattgcgatcatgggtccccacggcgtctattataaagacgaaccgatgaaagaactggaagctgccctgcaacggcaaggtttccagaccatctggccgcaaaatagcgccgaccttttgcagtttattgagcataatccgcggatctgcggagtcattttcgattgggatgagtacagcgtggatctgtgcagcgatatcaatcgtttaaatgagtatctgccgctgtacgcctttatcaacgcccattcgacgatggacgtcagcagtcaggacctgcgtatgacgctatggttctttgaatatgcgctggggctttcggaagagatcgctacccgcatcggtcaatacacccgcgaatacctcgacaacatcaccccgccgtttacccgggcgctgtttaactacgtacaggagggaaaatataccttctgtacgcctggacatatgggcggatcggcctatcaaaaaagcccggtgggttgtctgttttatgatttctttggcggtaataccttaaaggccgacgtctctatttccgtgacggagctggggtcgctgctcgatcatagcggcccgcatctggaggccgaggagtatattgcccgcgccttcggcgccgagcagagctatatggtcaccaacggaacctcgacgtcgaataaaattgttggtatgtattctgccccggcgggcagtaccctgcttatcgatcgcaactgccataaatcgttggcccatttactgatgatgagcgatgtggtgccgctatggctgaaaccgacgcgcaacgcgctagggatcctcggcggcatacccaagcgtgaatttacccgcgatagtattcaacaaaaagtcaacgccaccggcggcgccgggtggccggttcatgcggtgatcactaactccacctatgacgggctgctgtataacacgacctggatcaaagagaccctcgacgtgccgtcaatccactttgactctgcctgggtaccctacactcatttccatccgatctatcaggggaaaagcgggatgagcggcgatcgcatcccgggcaaagtgatctttgaaacgcagtcgacgcacaaaatgctggcggcgctatcgcaggcttcgctgattcatattaaaggcagctacgatgaagataccttcaatgaagccttcatgatgcatacctcgacctcaccgagctacccgatcgttgcctctattgaaacggcggcagccatgctgcggggtaattccggcaggcgactgatccagcgttcgattgagcgggcgctggattttcgtaaagaggtgcagcgattacgcgaggagtctgacggttggttctttgatatctggcagccggaagagattggtgaagcgcagtgctggccggtttcgcccggtgaacagtggcacggttttcaggatgccgatagcgaccatatgtacctcgatccggtgaaagtgacgattctgacgcccggcatggatgagcagggtaatatggataatgaaggtataccggcggcgctggtggcgaaattccttgatgagcgcggcgtggtcgtcgagaaaacgggcccgtacaacctgctgttccttttcagtatcggtatagataaaacccgagcgatgggactgttgcgcggattgactgagttcaaacgctcttacgatctcaatttgcgagtgaaaaatatgctgccggatctgtacgctgaagatccggatttttaccgcaatatgcgcattcaggatctggcgcagggtattcatcgtctgattcgccagcaccagctctcgcagctgatgcttagcgcctttgacgtcctgccggagatgaaaatgacgccgcatcaggcctggcagcggcagatcaaaggtgaagtggaaactatcgaactggaaaatctggtcgggcgtatttcagcgaatatgatcctaccgtacccgcccggcgtgccgctgttgatgcccggtgagatgatcgccgaggagagccgcgcggtgctcaatttcctgctcatgctgtgctctattggccgccactatccgggcttcgaaaccgatatccacggcgcgaaacgcgatgaagatggggtgtactgggttcgagtcttaaaaaatgactaa

SEQ ID NO: 172480 - DNA, 1791 bp, Klebsiella oxytoca
atggcattgcacaaaaccgtcgcgataagcgccgtggccgcagggatcatgttaagcctgggggccgcacaggctgcaccgctgctgggcgcaacggaagcgacaaccatgaaagcgagcgacctggccgctaaagaaaaagccttaaccgactttccgctgatggagtcggttaaatcatcaattcaaaccctgcctaacagcgaagtggagaaaatcgcaccgggcctggcgagcaacccggcgaacgttaagcgtgttgaaagcatcctttcagaacaggattgggaatatctgttcccgatgcgcgccgcagaatatacctactctaattttctgaaagctattggtaaattccctgccgtgtgcggaacctataccgacggacgcgacagcgatgccatctgccgtaaatcgctggcaaccatgtttgcccactttgctcaggagaccggcggccatgaaagctggcgtgatattcccgaatggcgtcaggcgctggtttatctgcgtgaggttggctgggttgaaggtcagaagggcggctataacggcgaatgcgatccctctatctggcaggggcagacctggccatgcggtaaagataaagacggcgactacctgagctacttcggccgcggagcgaaacagctgtcctataactacaactatggtccgttctccgatgcaatgtacgatggcgacgttcgtccgctgctggataaaccggagctggtggcggatacctggatgaacctggcgagcgccgtcttcttcttcgtttatccgcagccgccgaagccctctatgctgcacgtcatcgacggaacctgggttccaaacgatcatgataaagcaaatggcctggtcgaaggctttggggtaaccattcagattatcaacggcggcgttgagtgcggcggggcggaagagaacgcgcagtctcttaaccgtattgcttactacaaagagttcgcaaactacctcaaagtgccgattgccgacgacgaagttctcggttgtaagaatatgaagcagttcgatgaaggcggtgcgggcgcattgccgatttactgggaagaggattggggatggagtccggacaccgctgacggcaagactaacgcctgccagttggtgggctatcagacgccgtataccgcttttaaagagggcgactatgcgaagtgtgtgcagagccacttcaacgttaatatcgttgatgacagcggccagtccgaggatattacgccggtcaagcctgacgataccacacctgcgcaggagacgaacgtggcgccggtggctcgcatcgccggtccgattggcgcaattgaagctggtgccagggtttctctgagcgcggaaggttctaccgatgcgaacggcgacaagctaagctacacctggatgtctcaggacggccagacccttagcggacaggataaagccgtaattaccttcaccgcaccggaaaaagatcgcgatgcccagtatgtggttagcctgacggtaagcgacggttcgttgtccagtacggcaacttacactctgaacgtcaaggccaaagccgctgctgcggacgaaacgacggatggcaaagatagcgataccattagctatccttcctggagcagtacccagacatggaaagagggcgatatcgtcaataaccacggcgcgctgtatcagtgtaaaccgcttccggaaggagcatggtgcaacgtggcgccgacttactatgagcctggcgccggcattgcctggggcgatgcgtggaaggcgttgtaa

SEQ ID NO: 172481 - DNA, 960 bp, Klebsiella oxytoca
atgagtctgaatttccttgattttgaacagccgattgcagagctggaagcgaaaatcgattctctgactgcggttagccgtcaggatgagaaactggatattaatatcgatgaagaagtgcatcgcctgcgtgaaaagagcgtagagctgacgcgcaagatcttcgccgatcttggtgcatggcaggttgcccagctggcccgccatccacgtcgcccatacaccctggattatgtccgcctggctttcgacgaattcgacgaactggccggtgatcgcgcctacgccgatgataaagctatcgttggcgggattgcgcgtctggacgggcgtccggtgatgattatcggccaccagaaagggcgtgaaaccaaagagaaaattcgccgcaacttcggtatgccggcgccggaaggctatcgtaaagcgctgcgtctgatggaaatggccgagcgctttaaaatgccgatcattaccttcatcgacacccctggtgcttatccaggcgtcggggcggaagaacgcggccagtctgaagcgattgctcgcaacctgcgtgaaatgtcccgtctgagcgtgccggttatctgcaccgttatcggtgaaggcggctccggcggcgcgctggcgattggcgtcggtgataaagtgaatatgctgcagtacagcacctattccgttatctccccggaaggctgtgcgtccattctatggaaaagcgctgacaaagcgccgttggccgctgaagcgatgggaattgttgctccgcgtctgaaagagctgaagctcattgactccatcattcctgaaccgctgggcggcgcgcatcgtaatccggaagcgatggcagcctcactgaaagaacagctgttggccgatctggctgacctcgacgtgcttggcgaggaagaactgctgaaccgccgctaccaacgcctgatgagctacggctacgcctga

SEQ ID NO: 172482 - DNA, 3483 bp, Klebsiella oxytoca
atggctgaaccacgtttcgtacacctgcgggtgcacagcgactattccatgatcgatggtctggcgaaaaccggaccgttagtaaaaaaggcggccgcgctcggcatgcctgcgctggcgatcactgattttaccaacctctgcgggctggtgaagttctacggaacgggacacggcgccggaattaaacccatagtcggggccgatttccacgtccagagcgatctgctcggcgatgaactgagccagcttacggtattggctgcgaataatactggctatcaaaacctgacgctgctgatctccaaagcctatcagcgcggctatggcgcagcgggcccgattatcgatcgcgactggctgatcgaattaaaagaaggcttaattctgctctctggcgggcgtatgggcgacgtgggccgtagtctgctgcgcggcaatatggcactggtggatcagtgcgttgatttttatgcgcagcatttccctgattgctatttccttgagctcattcgcaccggccgccaggatgaagagtcttatctgcatgcggcggtgaagctggcggaaactcgcggcttaccggtggtggcaaccaacgacgttcgcttccttgagccgggcgacttcgatgctcatgaaatccgcgtggccatccacgacggctttaccctcgacgatccaaagcgtccgcgcaactattcgccgcagcagtatatgcgcagcgaagaagagatgtgcgagctcttttccgatatacccgaagcgctggaaaacagcgttgagatcgccaaacgctgtaacgtgaccgtgcgccttggtgaatacttcctgccgcagttcccgaccggggatatgaccaccgaagattatctgattaagaaatctaaagagggtctggaagagcgtctggcattcctgttccccgacccggatgagcgggcaaaacgccgtcctgaatatgatgagcgtctggatattgagctgcaggtgattaaccagatggggttcccgggctacttcctgatcgtgatggagtttatccagtggtccaaggataacggcgtgccggtcgggcccggccgtggttccggcgccgggtcgctggtggcctatgcgctgaaaattaccgacctcgatccgctggaattcgacctgctgttcgaacgtttccttaacccggaacgtgtctccatgcccgacttcgacgttgacttctgcatggagaaacgcgaccaggtgattgagcacgttgcggacatgtacggtcgcgatgcggtttcgcagattattacctttggtaccatggcggcgaaggcggtaatccgcgacgttggccgcgtgcttggtcacccgtacggcttcgttgaccgtatttccaagctggtgccgccagacccggggatgacgctggcgaaagcgtttgaagccgaaccgcagctgccggaaatttacgaggcggatgaagaggttaaagcgctgattgacatggcgcgtaagctcgaaggggtcacccgtaacgccggtaaacacgcgggcggggtggtgatcgcgcccaccaaaattaccgattttgccccgctatactgcgatgaagcgggccagcatccggttacccagtttgataaaaacgatgtcgaatatgccgggctggtaaagttcgacttcctcggtttgcgtacgctcaccatcattaactgggcgctggagatgatcaacgcccgccgcgagaagaatggcgaggggccgctggatatcgccgctattccgctcgacgataaaaaaagcttcgacatgctgcagcgctcggaaaccaccgccgtcttccagcttgaatcgcgcggcatgaaggatctgattaagcgtctgcagcccgactgcttcgaagatatgatcgccctggtggccctgttccgtccggggccgctgcagtcggggatggtggataactttatcgaccgtaaacacggccgtgaagagatatcgtatccggacgtacagtggcagcatgaatgtctgaaaccggtactggagccaacctatggcattatcctgtaccaggaacaggtcatgcagatcgcccaggagctttccggctataccctcggcggcgcggatatgctgcgtcgtgcgatgggtaagaaaaaaccggaagagatggccaagcagcgttctgtcttcgaagaaggcgcgaagaaaaatggcgttgacggcgagctggcgatgaaaatctttgacctggtggagaaattcgccggttatggctttaacaaatcgcactctgccgcttatgctttagtgtcctatcagacgctgtggctgaaggcgcactatccggctgaatttatggcggcggtgatgaccgcggatatggataacaccgaaaaagtcgtcggcctcgtggatgagtgctggcggatggggctgaagattctgccgccggatattaactccggcctgtaccatttccacgttaacgacgatggcgaaatcgtttatggtatcggcgcgattaaaggcgtcggcgaaggtccgattgaggcgatcattgaagcccgtaatcagggcggctatttccgcgaactgttcgatctctgcgcgcgtacagatattaaaaaactcaaccgtcgggtgctggaaaaactgatcatgtccggggcctttgaccgcctcgggccgcatcgcgcggcgttaatgaattcgctgggcgacgcgctgaaggctgccgatcagcacgcgaaagccgaagctatcggtcaggcggacatgttcggcgtgctggcggaagagccggagcaaatcgagcagtcctacgccagctgccagccgtggccggaacaggtggtgctggatggcgaaagggagaccctggggctgtacctgaccgggcacccgattaaccagtatttgaaagagatcgaacgctacgttggcggcgtacgactcaaagacatgcatccgaccgatcgtggtaaagtgaccacggcggcggggctcgttattgccgcgcgggtcatggtcaccaagcgcggcaatcgtatcggcatctgtacgctggatgaccgttccgggcgtctggaggtgatgctattcaccgacgctctggataaataccagcagctgctggaaaaagaccgcatacttatcgtcagcggacaggtcagctttgatgacttcagcggggggcttaaaatgaccgctcgtgaagtcatggacattgacgaagcccgggaaaaatatgctcgcgggcttgctatctcgctgacggacaggcaaattgatgaccagcttttaaaccgactccgtcagtctctggaaccccaccgttcgggaactattccagtacacctctattatcagagggcggatgcacgcgcgcggttgcgttttggcgcaacatggcgcgtctctccgagcgatcgtttacttaacgatctgcgtggccttatcggctcggagcaggtggaactggagtttgactaa

SEQ ID NO: 172483 - DNA, 597 bp, Klebsiella oxytoca
atgatggaattcgtgtatccgcatacccatctggttgcgggagtcgatgaagtcggacgcggtccgctggttggcgcggtggtgacggctgcggtgatactcgatccggccaaaccgattgtgggtcttaatgactcgaaaaagctcagcgaaaaacggcgcctggcgctatttgacgagatcaaagaaaaagcgctgtgctggagcctgggtcgggcggagccgcatgaaatcgatgaactgaatattttacacgcgaccatgctggccatgcagcgcgccgtcgcgggtttgcgcgtctccccggaatttgttcttattgatggtaaccgctgtccgccgctgcccgtaccttcgctggcggttgtcaaaggcgatagccgggtggcggaaatcagcgccgcatcgattctggcgaaagtgacgcgcgatgcggaaatggccgcgctggatcggcaatttccacagtacggctttgcacaacataaaggttatcccaccgcttttcatctgcaaaaactgctggaacatggcgttatcgagcaataccggcgcagttttggcccggtgaaacgcgcgctgggcctggcgtcctga

SEQ ID NO: 172484 - DNA, 1149 bp, Klebsiella oxytoca
atggctgaatcacgtcccctgacgattgccctggtcgccggagaaacctccggcgatattcttggtgccggtcttattcgcgcgctcaaagcccgtatgcctgatgctcgttttgtaggcgttgccgggccgttaatgcaggcggaaggctgcgaggcctggtacgagatggaagagctggcggtgatgggcattgttgaagtgctgggacgcctgcgtcgactgctgcacattcgcgccgatctcacccgacgttttaccgagcttaaaccagacgtgttcgtcggtattgatgcgcctgacttcaatatcaccctcgaaggtaatctgaagaagcagggtatcaaaacgatccattacgtcagcccatcggtttgggcatggcggcaaaaacgcgttttcaaaattggcagatccaccgatctggttctggcattcctgcctttcgaaaaagcgttttatgacaaatttaacgttccctgccggtttatcggccacacgatggcggatgcgatgccgctggacccggataaagacgcggcgcgcgaccgtctggggatcgcgcgtgacgtacactgcctggcgctgctgccgggtagccgtggggcagaagtcgagatgctcagcgccgacttcctgaaaacggcgcaaatcctgcgagaatattatcccgatctggaagtggtcgttcctctggtcaacgcgaagcggcgggaacagtttgagcgcatcaaggcggaaacggcgccggagctggccgtacacctactggatgggcgggctcgcgatgcaatgatcgccagcgatgctgcgctgctggcctccggcacggctgcgctggagtgtatgctggctaagtgcccgatggtagttggttatcggatgaagccctttaccttctggctggcgaaacggctggtgaagaccgactacgtgtcgttaccgaacttactggccgggcgtgaactggttaaagagctgctgcaggatgaatgccgaccacaggcgctggcggaggcgctgaagccgctgctggccgacggtaaaaccagccacgatatgcatgaaaccttccgcgcgctgcatcagcagatccgctgcaacgctgatgagcaggcggcggatgcagttctggagttagcaaaatga

SEQ ID NO: 172485 - DNA, 789 bp, Klebsiella oxytoca
gtgattgataaaaccgcctttattcatcctaccgccattgtagaagaaggcgccgttattggcgctaacgtccacattggcccgttttgtattgttggcgctaacgtcgaaatcggcgaaggcaccgtactgaaatctcacgttgtcatcaacggtcataccaaaattggccgcgacaacgagatctatcagttcgcttccatcggtgaagttaaccaggatctgaaatatgctggcgaaccgacccgcgtggaaattggcgatcgcaaccgcatccgcgaaagcgtcaccattcatcgtggcacagtacagggcggtggattaacgaaggtgggcagcgataacctgctgatgatcaacgcccatgtggcgcatgattgtacgcttggcgaccgctgtattctggctaataacgccaccctcgcaggtcatgtttcgctggatgattttgttatcatcggcggcatgactgccgtgcatcagttctgcattattggcgcgcacgtgatggtgggcggctgctccggcgtagcgcaagacgttccgccgttcgttattgctcagggcaaccacgcaacgccgtttggcgttaacatcgaagggttgaaacgtcgcggcttcagccgtgaggcgatcactgcgattcgtaacgcctataagctactgtaccgcagcggtaaaacgctggatgaagcgaaagccgagatcgccgaactggcgacacagtatcctgaagtgcagacatttaccgacttctttgctcgctccacgcgcggcctgattcgttaa

SEQ ID NO: 172486 - DNA, 456 bp, Klebsiella oxytoca
ttgactactgacactcatactctgcacattgaagagattctggaactgctgcctcaccgttacccgttcctgctggtcgatcgcgtgctggattttgaagaaggtcgttttctacgcgcagtaaaaaatgtttctgtaaatgagccgtttttccaggggcacttccctggtaagccgattttaccgggcgtactgattctggaagcgatggcccaggctaccggcattctggcattcaaaagcgttggaaaactggaaccgggcgagctgtattattttgccgggattgacgaagcgcgtttcaaacgtccggtcgtgcctggcgatcagatgattatggaagtcacttttgagaaaacccgtcgcggcctgactcgtttcaaaggcgttgcgacggtggacgggaaagtggtttgcgaagcaacgatgatgtgtgcccgtagccgggaggcctga

SEQ ID NO: 172487 - DNA, 1026 bp, Klebsiella oxytoca
atgccttcaattcgactggctgatttagcccagcagttggatgcagaattacacggtgatggcgatatcgtcatcaccggcgttgcgtccatgcagtccgcgaaagcgggccatattactttcatggtaaatcctaagtaccgtgaacacctggccgcttgccaggcatctgccgtcgtgatgacgcaggatgatttgccttttgcccacagcgctgcgctggtagtgcgtaatccctacctgacctacgcgcgcatggctcaaattcttgataccacgccgcagccggcgcaggatatcgcgccgagcgcggtcatcgatgccacggcgaagctgggtactcacgtagcgattggcccgaatgccgttattgagtcgggtgttatcctcggtgataacgtggttatcggcgccggttgcttcgttgggaaaaatacgaaaataggtgccggctcgcgtttatgggccaacgtcaccgtttaccacgacattgagatcggcgagaattgcctgattcagtccagcacggtgattggcgcagatggcttcggctacgcgaacgatcgcggcaactgggttaagatcccgcagctgggtcgcgtcattatcggcgatcgcgtggagataggcgcttgtacgaccatcgatcgcggtgcgctggacgacaccgtcattggtaacggcgtgattattgataaccagtgtcagattgcgcacaacgtggtaattggcgacaacaccgcagttgctggtggcgtgattatggcgggcagcctcaagattggccgctactgcatgatcggcggagccagcgtgatcaacggccacatggaaatctgcgataaagtcaccgtcacgggtatggggatggttatgcgaccgatcaccgagccaggcgtttattcttcaggtatcccgctgcagccgaataaggtctggcgcaagaccgctgcgctggtactgaatattgatgatatgagcaagcgtctcaaagccattgagcgcaaggttaatcaacaagattag

SEQ ID NO: 172488 - DNA, 486 bp, Klebsiella oxytoca
gtgaaaaagtggttattagctgcaggtctgggtttagcaatggtaacttccgctcaggcggcagataagattgcaatggttaacatgaacagcctgttccagcaggttgcccagaaaacaggcgtttctaacacgctggaaaacgagtttaaaggccgcgcgagcgagctgcagcgtatggaaggcgacctgcagtctaaaatgcagcgtctgcagtccatgaaagcgggctctgaccgtaccaaactggaaaaagacgtgatggctcagcgccagaccttctcccagaaagcgcagtcttttgaacaggatcgtgcacgtcgttctaacgaagagcgcggcaagctggtgactcgtatccagagcgctgtgcagagcgtcgctaaagatcagagcatcgatctggttgttgactctaatgccgttgcatacaacagcagcgatgtaaaagacatcaccgctgatgtgctgaaacaggttaaataa

SEQ ID NO: 172489 - DNA, 2430 bp, Klebsiella oxytoca
atggcgatgaaaaagttgctcatagcgtcgctgctgtttagcagcgcaaccgtatacggtgctgacgggttcgtggtgaaggacattcatttcgaaggccttcagcgtgtcgctgttggtgcggccctcctcagtatgccagtgcgtcctggcgataccgtaaccgatgatgatatcagtaataccatccgcgccctgtttgccaccggcaactttgaggacgttcgcgttctgcgcgatggtgataccctgctggtgcaggtgaaagagcgtccaacgattgccagcatcactttctccggcaacaagtcggttaaagatgacatgctcaagcaaaaccttgaggcatccggcgtacgcgtaggggaatctctcgatcgcaccacgcttgctgatatcgaaaaggggctggaggatttctactatagcgtcggtaagtatagcgccagcgttaaagctgtcgtgacgccgctgccgcgtaaccgtgtcgacctgaaactggtattccaggaaggcgtctcagcgaaaatccagcagatcaatatcgtcggcaatcatgcattcagcaccgatgaactgatttctaccttccagctgcgcgatgaagtgccgtggtggaacgtggtcggcgatcgcaaatatcagaaacagaagctggcgggagatctcgaaacgctgcgcagctactatctggatcgcggctatgctcgtttcaacattgactccacgcaggttagcctgacgccggataaaaaagggatctacatcaccatcaacattaccgaaggcgatcagtacaagctttctggcgtgcaggtgacgggagacctggcagggcattcggcagaaatcgaagcgctgactaaagttgaaccgggtgagctgtataacggcaccaaagtgaccaaaatggagaatgacattaagaaactcctcggtcgctacggttacgcctatccgcgcgttcagtcccagccggaaatcaacgatagtgataagaccgtgaagctgcacgtaaacgtcgatgcgggtaaccgctactacgtgcgtaaaattcgcttcgaaggcaacgatacctcgaaagatgccgttctgcgtcgcgaaatgcgtcagatggaaggtgcctggctgggcagcgacctggtcgaccaggggaaagatcgtctgaatcgtctgggctactttgaaacggttgataccgatacgcagcgcgtgccgggcagcccggatcaggttgacgtggtctataaagttaaagaacgcaataccggtagctttaactttggcgtgggttacggtacggaaagcggcgtaagcttccaggccggcgttcagcaggataactggctcggtaccggctattctgtgggaattaacggcaccaaaaacgattaccagacctatactgaactgtcggtgacgaacccgtactttaccgtggatggcgtcagcctcggcggtcgtgttttctataacgacttcgatgctaacgatgcggatctgtctgactataccaacaagagctatggtacagatattacgctgggcttcccggtcaacgagtacaacacgctgcgcgcgggccttggctatgtgcataacaagctgtccaatatgcagcctcaggtatccatgtggcgttacctgaattcgatgggacagtatccggacaacacgaacgacagaaactcgttcagtgctgacgacttcaccttcaactacggctggacgtataacaagctcgaccggggcttcttcccgaccgaaggttcacgcgtcaacctgaacggtaaagtgacgattccgggttcggataacgaatactacaaagcgacgctggataccgcgacctatgtaccgatcgacgacgatcataagtgggtggtattaggtcgaaccagatggggttatggtgacggtattggtagtaaagaaatgccgttctatgagaacttctatgccggtggttcaagtaccgtgcgtggcttccagtccaacactatcggtccgaaggcagtgtatttcccggccagcagccgtcatgacgatgatgacagctacgataacgaatgtaagagcagcgagtctgcaccgtgtaaatctgatgatgcggtgggcggtaacgccatggcggtggccagccttgagctgattaccccaacgccatttatcagcgataaatatgccaactcggtccgtacttccttcttctgggatatgggtaccgtgtgggatacgaattgggattcaagcgcttatggcggttacccggactatagcgatccgagcaatatccgtatgtctgcgggtatcgcggtgcagtggatgtcgccgttaggaccgttggtattctcctacgctcagccgtttaaaaagtacgatggagacaaagctgaacagttccagtttaacatcggtaaaacctggtaa

SEQ ID NO: 172490 - DNA, 1353 bp, Klebsiella oxytoca
atgctgagcgttctctggaatttggctgcttttattattgcgctgggcgtgctgatcaccgtccatgagtttggccatttctgggtagctcgccgctgcggtatccgcgttgagcgtttttctattggctttggcaaagcgctgtggcgccgttttgataagcagggaacggaatttattatcgcccttatcccattgggcggttatgtcaaaatgctcgatgagcgcgttgagccggtggcgcccgagatgcgccactgcgcgttcaacaacaaaaccgtgggtcagcgtgccgcggtaattgccgcagggccgattgccaacttcctttttgccatttttgcctggtggctggtctttatcatcggtgtccccggcgtgcgaccggtcgttgccgatatcgctcctgactctattgccgcgcaagcacaaattgcaaaaggaatggaacttaaagcgatagatggcatcgaaacgcctgattgggatgcagtacgtatggcgctggtggcaaagattggcgatcggcaaacaatagttaccgtcgcccctttcgggaccaatcaacgccaggataaaatcctcgatctgcagcgttgggcgtttgagccggataaacaagatccggttgcttcgttaggcattcagccccgcagcgcgcagattgataccgtcctggctgaagtacaatctaactcggcggcgcagaaggcgggtttgcaagcgggcgacaggatcgttaaagtcgatggtcaaccgttaacgcagtggatgacgtttgttaatctggtgcgtgataatccgggtaaggcgttagttctggacatcgagcggcagggtagccccctgtcggtaaccttgacgccggatacgaagtctaccaaaggtaaagctgaggggtttgcaggggtcgtacctaaggtcatcccgctgcctgatgaatataagacagtgcgtcagtacgggccgtttgccgccatcgctgaagccacggataaaacctggcagctgatgtcgttaacggtcaagatgctgggcaaattgataaccggtgatgtcaaactgaacaacctcagcgggccgatttctatcgcccagggggctgggatgtcagcggagtttgggctgatttattatctgatgtttcttgcgctcatcagcgtgaacctcggaataatcaacctgttcccgcttcccgttcttgacgggggacatctgctgtttttggcgattgaaaagctgaaaggcggaccggtatccgagcgagttcaagactttagttatcgcattggctcaatattgctggtgctgttaatggggcttgcacttttcaatgatttctctcggttgtaa

SEQ ID NO: 172491 - DNA, 858 bp, Klebsiella oxytoca
ttgctgaagtatcgcctgatttctgctttcgtcttaatccccgtcgttattgcggcgctttttctattgccgcctgcgggctttgccatcgtcacgctggtggtctgtatgctcgccgcgtgggagtgggggcaatttagcggtttcacttcaacgacgcagcgagtctggctgtcggtgctttgcggtctgctgctggcgctgatgctattcctgatgccggaataccattatgacgttcatcaaccgctggttgagggagcgctgtgggcatcattcggctggtggatagtcgcgctgcttctggttctgacttaccccgcttctgcggccttctggcgcaattcaaaaacgctccgtctgatattcggcatcctgaccattgtcccgtttttttggggcatgctggcgctgcgagcgtggcactacgccgacgatcattacagcggtgcgctgtggttactttacgtgatgattctggtctggggcgcggattccggcgcctatatgttcgggaaaatgttcggtaagcataagctggcgccgaaggtttctccgggtaaaacctggcaggggtttttcggcgggctgttaacggctgcggttatctcctgggcttacggctggtgggcccatctggacgtgacgccgacggtcctgctggtgtgttcggttgtggcggctctggcctcggtactgggcgatctgaccgaaagcatgtttaaacgcgaagctggcatcaaagatagcggaaatctgattcccggacacggcggtatcctcgatcgtatcgatagcctgacggctgcggtacccgtgtttgcttgtctactcttgttggttttcaggacgatttga

SEQ ID NO: 172492 - DNA, 759 bp, Klebsiella oxytoca
atgttgtctgctaatcaaactgtcagcgaaatgttgcctgcgcatggctgtcgtcatgtcgccattattatggacggcaacggtcgctgggctaaacggcaaggaaaaatccgcgcctttggccataaagccggcgcgaagtctgttcgtcgcgccgtctcattcgcggctaataatggtattgaagcgttgacgttatacgcgttcagcagtgaaaactggaatcgcccggcgcaggaagtcagcgcgctgatggagctgtttgtctgggcactggatagcgaagtaaaaagtctgcacaggcacaatgtgcgcctgcgtatcatcggcgagaccacgcgattcaatgcgcgtttacaggaacgtattcgcaaagcggaagcgcttactgagaacaacaccggtttgactctgaacattgccgccaattacggcggccgctgggatatcgttcagggcgttcgtcatctggccaaacaggtacaagacgggttactccagcccgaacaaatcacggaagagatgctgagccagcaggtgtgcatgcatgaactggctcccgtagatttagttattaggaccgggggagagcaccgcattagtaactttttgatttggcaaattgcctatgccgaactttactttacggatgttctttggcccgatttcgctgaacaggactttgaaggtgcactccatgcctttgttaatcgagagcgtcgtttcggcggcactgagccgggtggcagcaatgcctga

SEQ ID NO: 172493 - DNA, 1200 bp, Klebsiella oxytoca
atgaagcaattaaccgttctcggttcgaccggttctatcggctgcagcacgctggacgtggtgcgccataatccagatagtttttctgtcactgcgctggtcgccgggaaaaatgtcgaccgtatggttgaacaatgtctggaattctcccctcgttacgcggtaatggatgatgcgcgcagcgctgaactgctgctgtcaaaactgcgcgagcagggtagccggactgaggtcatgagcggccagcaggctgccgcggaagtggcagcgctcgacgacgttgaccaggtcatggcggcgattgtcggcgcagcgggcctggtaccgacgctttcagctattcgcgcgagtaaaacggtgttgctggcgaacaaagagtcgctggtgacctgcggccgtctgtttatggaggccgtgcagagatacggagcgcgtttgttaccggtagatagcgagcacaatgcgatttttcagagtatgccggaaacagttcaacaggatctggggtacgctgatttaacccaaaacggcgtgtcgtcgattctgctaacgggctccggtggtcctttccgcgaaacggcgatttcggaactggcggcgatgacccccgatcgggcatgtaagcatccaaactggtccatggggcgcaagatttctgtcgactccgccaccatgatgaacaaggggctggagtatatcgaagcccgctggttgtttaatgcatctgcgcagcagatggaagttctgattcatccgcaatcggtgattcattcgatggtgcgctatcaggatgggagcgtgctggcgcagctcggcgagccggatatgcggacgccgattgcccatacgatgggctggccaaagcgtctcaactcaggagcaaaaccgttggatttttgtcaactgagcaacctgagcttctccgcgccggactatgcgcgttatccctgcctgaagctggcaatggacgcgtttgatgtggggcaggcggcgacaaccgcgctgaatgcggcaaacgaagtctcggtcgcggcattcctcaacggtgatattcgctttaccgatattgcggcaatcaatcagtcggtcttggatcaacagacgctaaatgaaccgcaaagtattgatgaagtactggctattgacgctatggcccgggcaagcgcaggtcggctgctagcggcgcagcgcaaattctga

SEQ ID NO: 172494 - DNA, 558 bp, Klebsiella oxytoca
gtgattagcgatatcagaaaagatgctgaagtacgcatggagaaatgcgtcgaagcgttcaaaacccaaatcagcaaaatacgcacgggtcgtgcttctcccagcctgctggatggcattatcgtggaatactacggcacgccgaccccgctgcgccagctggctagcgtaacggtagaagactcccgcacgctgaagatcaacgttttcgatcgctctatgagcccggccgttgaaaaagcgattatggcttccgacctcggtctgaacccaagctccgcgggaagcgatatccgcgttccgctgccgccgctgaccgaagaacgtcgtaaagatctgaccaaaatcgtgcgtggtgaagctgaacaggcgcgcgttgccgtacgtaatgttcgtcgcgatgccaacgacaaagtaaaagcactgctgaaagagaaagagatcagcgaagatgacgatcgccgttctcaggaagatgtgcagaaaatgactgatgctgctatcaaaaaagttgatgcggcgctggcggataaagaagcggaactgatgcagttctga

SEQ ID NO: 172495 - DNA, 726 bp, Klebsiella oxytoca
atggctaccaatgcaaaacccgtctacaaacgtattctgcttaagttaagtggcgaagctctgcaaggctcagaaggcttcggtattgatgcgagcatacttgaccgcatggctcaggaaattaaagaactggttgagctgggtattcaggttggcgtagtgattggtggcggtaaccttttccgtggtgctggtctggcgaaagcaggtatgaaccgcgttgtgggcgaccacatgggcatgctggcaacggtcatgaacggccttgcaatgcgtgatgcacttcatcgcgcctatgtgaacgcccgcctgatgtcagcgattccgctgaacggcgtgtgtgataactacagctgggcagaagcaattagcctgctgcgtaacaaccgcgtagtgattctttccgcgggtaccggtaacccattctttactaccgattccgctgcctgcctgcgcggtattgaaattgaagccgatgtggtgctgaaagcgaccaaagtcgacggggtctttaccgccgatccggccaaggatccttctgcaaccatgtacgatcagctgacctacagcgaagtgctggataaagagctgaaagtgatggatcttgctgcctttaccctggcccgcgaccacaaattgccgattcgcgtattcaatatgaataagcctggcgcgctgcgtcgcgtggtgatgggcgaaaaagaaggcacattaattacggagtaa

SEQ ID NO: 172496 - DNA, 852 bp, Klebsiella oxytoca
atggctgaaattaccgcatccctggtaaaagagctgcgcgagcgtactggcgcaggcatgatggattgcaaaaaagcgctgactgaagcgaacggcgacatcgagctggcaatcgaaaacatgcgtaaatccggtgctattaaagcagcgaaaaaagcaggcaacgttgcagctgacggcgtcatcattaccaaaatcgatggcacctacggcatcattctggaagttaactgccagactgacttcgttgctaaagatggtggcttccaggcatttgctaacaaagttctggatgctgcagttgctggcaaaatcaccgacgttgaagttctgaaagcacagttcgaagaagaacgcgttgcgctggttgctaaaatcggtgagaacatcaacatccgtcgcgtgtcttccctggaaggcgaagtactgggttcttaccagcacggcgcgcgtatcggtgttctggttgctgctaaaggcgcgaacgaagagctggttaaacagctggctatgcacatcgctgcaagcaagcctgaattcgttaagccggaagacgtttccgctgaagtggtagaaaaagagtaccaggttcagctggatatcgccatgcagtctggcaagccgaaagaaatcgcagagaaaatggttgaaggccgcatgaagaaattcaccggcgaagtttctctgaccggtcagccgttcgttatggatccgagcaaatctgttgctcagctgctgaaagagcataacgctgacgtgactggcttcatccgctttgaagtgggcgaaggcattgagaaagttgagactgactttgcagcagaagttgctgcgatgtccaagcagtcttaa

SEQ ID NO: 172497 - DNA, 726 bp, Klebsiella oxytoca
atggcaactgtttccatgcgcgacatgctcaaggctggtgttcactttggtcaccagacccgttactggaacccgaaaatgaagcctttcatcttcggcgcgcgtaacaaagttcacatcatcaaccttgagaaaactgtaccgatgttcaacgaagcgctggctgaactgaacaagatctcttctcgtaaaggtaaaatccttttcgttggtactaagcgcgctgcaagcgaagcggtaaaagacgctgctaacagctgcgaccagttcttcgtgaaccatcgctggctgggcggtatgctgactaactggaaaaccgttcgtcagtctatcaaacgtctgaaagacctggaaactcagtcccaggacggtactttcgacaagctgaccaagaaagaagcgctgatgcgcactcgtgagctggacaagctggaaaacagcctgggcggtatcaaagacatgggcggcctgccggacgcgctgttcgttatcgacgctgaccacgagcacatcgcaatcaaagaagcaaacaacctgggtattccggtatttgctatcgttgatactaactccgatccggacggcgttgacttcgttatcccgggtaacgacgacgcaatccgtgcagttagcctgtacctgagcgctgttgctgctaccgttcgtgaaggccgttctcaggatctggcttctcaggcggaagaaagcttcgtagaagctgaataa

SEQ ID NO: 172498 - DNA, 795 bp, Klebsiella oxytoca
atggctatttctattaagacatctgaagacatcgaaaaaatgcgcgttgccggccgcctggccgctgaagtgctggaaatgatcgagccctacgtgaaaccgggcgtcagcaccggcgaactggaccgcatctgcaacgattacatcgttaacgagcaaaaagccgtttctgcctgcctgggctatcacggttttcccaaatccgtctgcatctctattaatgaagtggtgtgccacgggatcccggacgacggcaagctgctgaaagatggcgatatcgtcaacattgacgtcaccgtcattaaagatgatttccacggcgatacgtcaaagatgtttatcgtcggcaagccgacaattcttggcgagcgcctgtgccgcattacccaggaaagcctctatctggccctcaaaatggtcaaaccgggaatcaatctgcgcaccatcggcgcagctattcagaaatacgttgaagccgaaggtttctccgtggtgcgcgagtattgcggacacggtatcggccgcggttttcatgaagagccgcaggtgttgcactacgattctccggaaaccaacgtggtgctcaagccaggcatgacctttaccattgagccgatggtcaacgccggcaaaaaagagatccgcagcatgaaagacggctggacggtaaaaaccaaagaccggagcttgtctgcgcagtatgagcatactattgtggtgacagacaacggctgtgaaatactgacgttacgcaaggatgacaccatcccggcgataatctcgcacaacgattga

SEQ ID NO: 172499 - DNA, 2664 bp, Klebsiella oxytoca
atgagcaactctttatctgatactgtctccccttccctggccggacagcccgctaatccgggccgctggccgcagagtgatttcaactgcgcggctatcaagacgcatatcgacgctttccagcgctggctgggcgaggcttttgaccagggcatcgtcgcagagaagttgattgaggcgcggaccgaatttatcgatcagctgctccagcggctgtggattgagtacggtttcgggtcaattaacgacatcgcgctggtcgccgtcggcggttacggtcgcggcgaactccacccgctgtcagatatcgatctgcttatcctgagtcgtaaaaagctgcccgatgagcaggcccagaaggtcggcgagctgctgacgctgctgtgggatattaaactggaagttggccacagcgtgcgcaccctcgaagagtgcctgcttgaggggctatcagacctcagcgtcgctaccaacttgatcgaatcgcgtctgcttataggcgacgtcgcgctgttccttgaactgcaaaaacacatcttcagcgacggcttctggccatcggaaaaattctttgcggcaaaagttgaagaacagaatgtccgccatcagcgctatcacggaaccagctataacctggagccggatgtgaaaagcagccccggcggcctgcgcgatattcatactctgcagtggatcgcgcgccgccatttcggcgccacctcgcttgatgaaatggtcggtttcggcttcctgaccgaagccgagcgcaacgagcttaatgaatgcctgcatcagctgtggcggattcgttttgcgcttcatcttgagctcaaccgctacgataaccgcctgctgttcgacaggcaattcagcgtcgcccgtcgcctgcgctatgaaggcgaaggcaaccagccgatcgaacatatgatgaaggatttcttccgcgtcactcgtcgggtcagcgagctgaaccaaatgctgatccagctgtttgaagaagcgattctggcgctcaccgaagatgagaaaccgcggccgattgatgatgattttcaactgcgcggcacgcttatcgatctgcgcgacgacacgctgtttatccgcgaaccgcaggcgattctgcgcatgttctttatgatggtgcgcaacagcagcatcaccggtatctactccactacgcttcgccatctgcgccacgcccggcgccatctgacgcaaccgctttgctatattcccgaagcgcggaccctgttcctcagtatgctgcgccatcagggcgcggttagccggggactgctgccgatgcaccgccatagcgtgctgtgggcctatatgccgcaatggtcgcatattgttggtcagatgcagtttgacctgtttcacgcctataccgtcgatgaacacactatccgcgtactgctcaagctggagagcttcgccaaagaagagatccgcagccgtcacccgctgtgcgttgagctgtggccgcgcctgacgcatccggagctgatctttatcgccgccctcttccacgatatcgccaaagggcgcggcggcgaccattcaattctcggcgcgcaggatgtgttgaaattcgccgagctccacggtcttaactctcgcgaaacccagctggtcgcctggctggtgcgccatcatctgctgatgtcggtcaccgcccagcgccgcgatatccaggatccggaagtgatcaagcagtttgccgaagaggtacagacggagaatcgtctgcactatctggtctgcctgaccgttgccgatatctgcgccaccaacgaaaacctgtggaatagctggaagcaaagcctgctgcgcgagctctatttcgccaccgaaaagcagctgcgccggggaatgcaaaatacgccggatatgcgcgagcgggtgcgtcatcaccagctacaggcgctggcgctgctgcgaatggaaaatattaatgaacaggcgctgcatcaaatatggaaccgctgccgcgcgaactacttcgtgcgccatacgccaaaccagctcgcctggcatgcgcgcaatctgctgcagcacgatctcagtaagccgatgatcctgctcagttcccacgcctcgcgcggcggcaccgagatttttatctggagtccggaccgcccttatctctttgccgccgtttgcggcgagctggatcgacgtaatcttagcgttcacgatgcgcagatctttactacccgcgacggtatggcgatggatacctttattgttcttgagccggacggaagtccgctttccgccgacaggcacgaaatgatccgcgtgggcctggaacagaccatcacccagcgcagctggcagccgccggctccccgccgtcaggcggcaaaactgaggcatttctccgtcccaacggaggttaatttcctgccgacgcataccgaccgcaaatcttttctggaactgattgctctcgatcagccgggtctgttagcgcgcgttggtcaggtgtttgccgacctcggaatttcgctccacggcgcgcgaattacgacaattggtgagcgagtagaagatttatttataatcgccaccgcagaccggcgtgcccttaataatgagctgcagcaagaagtgcaacaacggttgacagaggccctcaatccaaacgataaagggtaa

SEQ ID NO: 172500 - DNA, 825 bp, Klebsiella oxytoca
atgcagcaattacagaacgttattgagtccgcctttgagcgtcgcgccgacatcacgccggcaaacgtggataccgtaacccgcgaagcggttaaccaggtgatttctctgcttgattccggcgcgctgcgtgtcgctgaaaaagtcgacggccagtgggtcacccatcaatggctgaagaaagcggttctgctctctttccgtattaacgataaccaggttatcgatggtgcggagagccgctacttcgataaagtcccaatgaagttcgcggattatgatgaagcgcgctttcagaaagaaggcttccgcgtcgttccgccagcggccgttcgccagggggcgtttatcgctcgcaacacggttctgatgccgtcctatgtgaacatcggcgcatacgttgacgaaggtaccatggttgatacctgggcgaccgtcggctcctgcgcgcagatcggtaaaaacgttcacctgtccggcggcgtcggcatcggcggcgtgctggagccgctgcaggctaaccctactattatcgaagataactgctttatcggcgcgcgttctgaagtggttgaaggcgtgatcgttgaagagggttccgtgatctccatgggcgtctatctcggccagagcaccaaaatttacgatcgcgaaaccggtgaagtcttctacggccgcgtgccggcaggctccgttgtcgtctccggcaacctgccgtcgaaagatggcaagtacagcctgtactgcgcggtcatcgtgaagaaagttgatgccaaaacccgcggcaaggtcggaatcaacgaacttctgcgtactatcgactaa

SEQ ID NO: 172501 - DNA, 390 bp, Klebsiella oxytoca
atgtacgataatctgaaaagtcttggtattaccaatcctgatgaaatcgatcgctatagcctgcggcaggaagccaataacgatattctgaaaatctactttcagaaggataaaggcgagttcttcgccaagagcgtcaagtttaaatatccgcgtcagcgtaaaaccgtggtcgccgacggcgtgggccagggctataaagaagttcaggagattagccctaacctacgctatatcatcgacgagctggatcaaatctgtcagcgcgatcgcaccgaaatcgatctgaaacgtaagatcctggacgacctgcgtcacctggaaagcgttgtcacgaataagatcagcgaaattgaatccgatctggaaaaactgacgcgaaataaataa

SEQ ID NO: 172502 - DNA, 3012 bp, Klebsiella oxytoca
atgttcagtttccacctgaaaggaggtcatacgatgacactggaaattgaacaaacatgttataccctgcaatctgcgccctggctggataatgccggttttgaaaaaggacgccggcacgatcgtcagccgctgggctttattctgcccgccaatacggtgctgcaaatccgccagccggatatgagtaacggtaatgcgacgctgcgcctgctctgcgatgataccgcggcagaaaaaacctgtacgctggccaccggctggaaaacggtcagcgcagccgttgataccgtcccttttatcgatacgttgtttaccgaccagccctgcgagttcaccgtcatctatcagcaacccgcggcaactaaacccctaccctgctggaaagcgggccaatctgaggatgaatttttccttaactgggaaaaaaatagatcgtcattcgcgctgcttgatttggatgttatcaatctgctgctgccctatgccgaccgcgataatgcgatgaaagctggcttacccgcgttacacgcttattacactcacctttttaaatgctataacgactgggctgggttaagcgataagccggattctccgttgaatcaggatattgccacccgctattttgtaagagccgataaacatggcgtcggtgcggcttattacgataccggatggtgcgggcatacttccgcaaccatcggcgaaggctggctggataacgtcaccacacagtgggtgatcctgcacgagattggccacggctatcagggcaaatttatgcaggacacaacgctgcccgtcaacgaagtgtggaacaacatttacgcttctttctaccagcagctcacgctgagccaggacgatcatctctatattgatggttggctctatgactatggtcagcaggccgtgcaggaagttcagctgatgacctgtattaaagaccagacgcccgtcgcccgctggggcctgcgtccgcgtctgcaatttctgatgctgatgctgctcaaagcgggaactaaagccttccgcgccttcaaccagaactatcgtgtactggccaatagcaatggcttccagccatccgatcaccagcttgccgatatgctggctaccgctattgctaccgccgcagggtatgatgtcactccgttcattgcgctaggcggtctccccctggaaaacgccactcgggaatatatcgctacgctggcggcaaaaccgctttatccgctatatcttcttctgccacaaaatgaatgggatagcgcacgtcgtcagctggggctggactctttcgtctggctggtggataacagcgaactggcggctttaggtaaaacaggtacgctatcgctgacgctcaatatcgaccagccggatcaaatctatggtcggacgctgactattaaggataattgcggtacgcgttattcactgatagtcgatgataacaccttgaccctgaatgaccttcccatcggcatttaccagatcgatccaccgaaaggccgttcacaaaaatatcgtccggacatcagccatatcgtcgtcaaagaaggcatcaatacggctaccgtcaactacacccgacaaagcgataccagcgtgcgtaacgtcacgatgagctttttaggtcttggcgatgcgccatttgcgcgccttgatatcgactatgaaaatcagcaacttattctaaacgttatcagcgccacgccgcatagctactatcccgatacgctctatgctggcgtatgcgtcctttccgccagcggcgaaaaggtatttgagcgcaaaatgaacggcacgaactgcgccaccggtaaggagattattcccttcggtcctcactatcacttatatattactcacgtcgagccgggacggctgaaagcctctccgggatatttaacgctggtcgcaggtgagaaattccagctgatgcgcattgatgataatgggctttataactttatcctcgacaataatccggcggatgacttacaggctattttcgaacacaacgctcagacgatacgtagccagccttcactgctggcgcaggaagagagcgtaagtaaaaacgatctcttcctgctgctctctcgtatggaagagcctcggcgcagcaaattgctcaaagagtatgccgacgtcctgcctcaggataatagcgaaccgggcgaactgacgggcaaaagcgttaccctcaatctcagagggcaaggcaataaagatttttgccagatcgttatcgataatcagcagcacacaatgacggtcgccacgcgtaccggcgcgccgcacccgtattatgtttcccatacctatgccagcattacggtaaccggagcagacgaaacggtggtttatcaccgcagctatgccggagcgaccaataacctggtaaacagcgagactatcgcgctcgctgaaaacatgatcattgaggttttccatgatgagccattccgctccagcgcctgcaatgatacgactcatcgcgcagttacgctgaagcaacacaaccgctggcgggttgtgaaggatgggctgacgacctgttcgcttatacccgaagagcaggatgaggaaacccctgatgctgaggagggggcaacagagctttacggcgatctcttcacctggcagctgctcggcgaaaataatacccgtttcgcgacgatggagatggatattggcggcggcgcgctgacctttaccgccagccctggggtgccgaataagcaatttacgacgacctatgccacggtaaatgtctacaatacgcgcggctcggtggtttatcgccagtccattaaaggctcatcgcagcttggcgattatatagatacggcaatactcgatgagggctatatcgtcgaagtctttcatgccgaagccggagatcgctccgtcatcatcaatccgttaaatggtcattcctgggcacagcctaataccgtctcctggcaagtcacggcccgcggactgcagcgcctgtaa

SEQ ID NO: 172503 - DNA, 1158 bp, Klebsiella oxytoca
atggctggctggcatcttgataccaaaatggcgcaggatatcgtggcgcgcacgatgcgcatcattgataccaatattaacgtgatggatgcccgagggcgcattatcggcagcggtgaccgcgagcgaattggtgaattgcacgaaggggcgctgctggtgctttctcagggacgggttgtcgacattgatgatgccgttgcccgccacctgcacggcgtgcgtcaggggatcaatctgccgctgcgtctggaaggggagatcgttggcgtaatcggtctgaccggagaaccggagtcgctgcgcaaatacggggaactggtttgtatgaccgccgagatgatgctggaacaatcgcggctgatgcatctcctggcccaggatagccgtttgcgcgaagagctggtcatgaacctgattcaggcggaagagaacacgccggcgctgactgagtgggcgcagcgtctggggatcgatctcaatcaaccgcgcgtcgtggcgatgattgaagtggatagcggccagctgggcgttgatagcgcgatggcggaactgcagcagctgcaaaccgcgctgaccacgccggatcgtaataatctggtggccattgtctcgctgaccgagatggtggtgctgaagcccgcgctgaatgcctttgggcgctgggatgcagaagatcactgcaaacgcgttgagcagctaattagccggatgaaagagaacggtcagctgcgttttcgcgtggcgctgggcaatttctttaccgggccgggcagcattgctcgctcgtaccgcaccgcccggaccacgatgatggtcggcaagcagcggatgcccgaaagccgtagctatttctaccaggatttgatgctgccggtcctgctggatagcctgcgcggtggctggcaggccaatgagctggcgcgcccgctggttcgcctgaaggcgatggataacaacggcctgctgcgccgtactttacaggcctggtttcgtcataacgtgcagccgttggcgacctccaaagcgctatttatccatcgtaatacgctggaatatcgcttgaaccgtatttctgaactgacggggctggatttgggaaattttgacgatcgtctgctgctgtatattgcgctccagctggatgagcagcgttaa

SEQ ID NO: 172504 - DNA, 1440 bp, Klebsiella oxytoca
atgaaaaaaaccacgttagcaatgagtgccctggctctgagtttaggtctggcgttgtcccctctctctgcgagcgcggcggaaacagcttcttcggcaactaatgcgcagcagatgccaagcctggcgccgatgctggaaaaagtgatgccgtcggtcgtgagcattaacgttgaggggagcaccaccgttaatacgccgcggatgccgcgaaacttccagcagttctttggcgataattcaccattctgccaggatggttcaccgttccagagctctccgttctgtcagggcggcggacaaggcggcgcgccgggcggtaacggcggacagcagcagaaatttatggccctcggttccggggtcatcattgatgccgctaaaggctatgtcgtcaccaacaaccacgtcgtggataacgcgacaaccattaaagttcagctgagcgatggccgtaagttcgacgcgaaagtcgtcggcaaagacccgcgttctgatattgcgctgattcaaattcaggatccgaaaaacctgagcgcgattaaactggcggactctgacgctctgcgcgtcggcgattacaccgtagcgatcggtaacccgtttggtctgggcgaaaccgtgacctcggggatcgtctccgcgttaggtcgtagcggcctgaacgttgaaaactatgagaactttatccagaccgatgcggctattaaccgcggtaactccggcggcgcgctggttaacctgaacggcgagctgatcggtatcaacactgcgattctggcgccggacggcggcaacattggtatcggcttcgctattccgagcaatatggtgaaaaacctgaccgatcagatggttaagtttggccaggtgaagcgcggtgagctgggtatcatgggtaccgagctgaattccgagctggcgaaagcgatgaaagttgatgcgcagcgcggcgcgttcgtcagccaggtcatgccaaactcggccgccgctaaggcgggcattaaagccggcgatgtgattaccacgctgaacggtaaatcgatcagcagcttcgccgctctgcgtgcccaagtgggtaccatgccgatcggcagcaaagtcgagcttggcctgctgcgcgacggtaagccggtgacggtgaccgttgagctgcagcagagcaaccagaatcaggttgattccagcacgatcttcaacggtattgaaggtgcggaaatgagcaacaaaggccaggacaaaggcgtcgtggtgagcaacgtgaaagcgggcactccggcggcgcagattggcctgaaaaaaggcgatatcatcgttggcgctaaccagcaaccggtgaaaaatattgccgacctgcgcaaaatctttgatgccaagccctctgttctggcgctgaacattcagcgcggcgatgcgactatttatctgctgatgcagtaa

SEQ ID NO: 172505 - DNA, 1557 bp, Klebsiella oxytoca
atgcgcttagaaggaaacgttattgctcgctcgggggagatcatggctaagatcgattttcgcaacaagattaactggcgtcgccgctaccgttcaccgcagggcgttgagacggagcgagaaatcctgcgaattttcgaaagcgatcgcgggcgcatcattaactcgccggcgatccgccggctgcagcaaaaaactcaggttttcccactggagcgcaacgctgcggtgcgtacgcggttgacccactccctggaagttcagcaggtgggccgctatatcgctaaagaggtgctgagccggctgaaagagcagaagctgctcgaacgctacgggctggatgagctcaccgggccgtttgagagcattgttgaaatggcctgcctgatgcacgatatcggcaatccgccatttggtcattttggcgaggcggcgattaacgattggttcagccagcggctttttcccggcgatgcggccagccagccgttaaccgacgatcgctgcgtggttgcggcgttgcgcctgcaggaaggcgatagccaactgaatgagcttcgccgtaaggttcgtcaggatttgtgctggtttgagggaaatgcgcagggcattcggttagtgcatacgctgatgcgaatgaatctgacctgggcgcaggtgggctgtattttaaaatatacccgtccggcatggtggcgcggggaaccgccggccagccacaattatttaatgaagaaacctggttattatttagccgaagaaggctatgttgcgaggttgcgtaaagaactggatctggctccttacaatcgattcccattaacgtggattatggaagccgcggatgatatctcatattgcgttgccgaccttgaggatgcggtagaaaaacgcatcttcagcgtagagcagctttatcagcatctctatgaggcctggggggttcacgaaaaaggctccttgtttaatcaagttgtcgaaaacgcctgggagaaatcgcgtgcgaattctctgagtcgcagcactgaagatcagttttttatgtatttacgggtgaatacgctcaataggctggtaccgtacgcggcgcgtcggtttattgataacctggagaagattttcagcggcgattttaatcacgcgctgcttgaagacgatagcgattgcagtcagctgcttgaactatacaaaaatgttgcggtaaaacatgtgtttagccatcctgacgttgagcagctggaactgcaaggttatcgcgtgattagtggtttgttagatatataccagccgttgctaaaattatcgctcgatgagtttagtctgctggtggaaaaagagcgggtgcggagtttaccgattgcttcgcgtctgttccagaaactttcgactcgccatcggctggcttacgtcgaggccgtaaataagatttcacgcagtaatccggaatttccggtgatggaatattattatcgctgtcgtctcattcaggactatatcagcggaatgaccgacttgtatgcatgggatgaatatcgtcgcctgatggccgtagaataa

SEQ ID NO: 172506 - DNA, 699 bp, Klebsiella oxytoca
atgaaaatcggcattattggcgcaatggaagaggaagttacccttctgcgcgacaaaatcgacaaccgccagactatcactatcggcggcagcgaaatctacaccggccagcttcagggtattgacgtcgctctgttgaaatcgggtatcggcaaagttgccgccgccatgggcgcgaccctgttgatggaacactgtaagccggatgtgattatcaacaccggttctgcgggcggtctggcatcaaccctgaaggtcggcgacatcgtcgtttccgacgaaacgcgctatcacgatgcggacgttaccgcgtttggctatgagtatggtcagctgccgggctgtccggccggtttcaaagccgatgagaagctgattgccgccgcagagacctgcatcaaagcgctcaaccttaacgcggtacgcgggctcatcgtcagcggcgatgctttcatcaatggttccattggtctcgcaaaaatccgtcacaacttcccgcaggccgtcgcggtagaaatggaagccacggccatcgcgcacgtctgccacaactatggcgtaccttttgtagtcgttcgcgccatctccgatgttgccgatcagcagtcgcatctcagcttcgacgagtttctcgccgttgccgcgaaacaatccaccctgatggtggaaaacctggtgcagcacctggcccgtggctaa

SEQ ID NO: 172507 - DNA, 801 bp, Klebsiella oxytoca
gtggctaagtcgtttataacggcgcttgccgccctgctgctgctcgccccggcgtggcttttcgccgcgccgcgggtggtgacgctctctcccgccaatacagaactggcgtttgccgccggcattacgccagttggcgtcagcagttattccgattatccccctgaagccgcaaagatagagcaggtctccagctggcaggggatgaatctggaacgtatcgtcgccctcaagcccgacctggtgctggcctggcgcggcggtaacgctgagcggcaggtcaatcagctaagctcgctcgggataaaagtcatctgggtcgaaacgtcgaccattgaagacattatcgcgacgcttcgccagctggcgcagtggagcccgcagccggaaaaggcgcagcaggcggcgcagaatatgcaaagtgagtaccagaagctgaaagcccgctatgccaacgtgccgaaaaaacgcgtttttttacagttcggcgccaaccctctctttacgaccagcaaaggctcgattcaggatcaggttctgacgctgtgcgggggagaaaacatttttgccgccagccgggttccctggccgcaggttagccgtgaacaggtgctggcaaggcagccgcaggctatcgttatcgccggcgatgccagtaaacttcccgccgttgagcgctattggcagaatcagctaaaaatttcttttattgcgctacatggcgactggtttgaacgcgcgagcccacgtattatcctcgccgcaaaacaactctgtactgcgctcgaacaggtaaaataa

SEQ ID NO: 172508 - DNA, 624 bp, Klebsiella oxytoca
atgcttgtctattggctggatattattggcaccgccgtgtttgccatctctggcgtcctgctggctggaaagctgcgcatggaccctttcggcgtgctggtattaggcgtggtgaccgcagtgggcggcggaaccattcgtgatatggcccttgctaacggcccggtattttgggttaaagatcctaccgatctggtagtggccatggtcaccagcatgctgactatcctgctggtgcgccagccgcgtcggttacctaaatgggtgttgccggtactggacgccgtcggcctggcagtatttgtcgggatcggcgtcaacaaagccttccttgctcatagcggaccgctggtggccatctgcatgggcgtcgtcaccggcgtcggcggagggattattcgcgacgtgctggcgcgcgaaatcccgatgattctgcgtacggaaatctacgcgaccgcctgcatcgttggcggtatcgtacacgcaacggcgcactacaccttccaggttccgttagaaaacgcggcgatgtcagggatggtggttacgctggtgattcggctggcggcaatccgctggcacctgaagctgccaacgtttgcacttgatgagaatggacggtaa

SEQ ID NO: 172509 - DNA, 345 bp, Klebsiella oxytoca
atgagtgatgacgtagcgttgccgctggagtttaccgaagccgcagcgattaaagtaaaagacctgattgcggatgaagacaatccgaacctgaaactgcgcgtgtacatcaccggcggtggctgcagcggtttccagtacggcttcacctttgacgatcaggttaacgaaggcgatatgactatcgagaagcagggcgtcggcctggtggttgacccaatgagcctgcagtatctggtcggcggcgccgtcgattataccgagggactggaaggttcgcgttttatcgtgaccaacccgaatgcgaaaagcacctgcggctgcggctcctcattcagcgtctaa

SEQ ID NO: 172510 - DNA, 1512 bp, Klebsiella oxytoca
atgggggcgcagcgcatttttttgacgacggagcctgtccggttggctagaatgcccttctttctatttgtattactaatcattgataatggcatgaaagcagaaaatccctcttcttcagcacatcagttcgtacgcgttcgccgcagcgatgccgtgcgtcggttgattcagcgtgataaaacgccgttggcggtgttattgatggcggccgttgtcggaacgctggcggggctggttggcgtcgcgtttgagaaaagcgtcaactgggtgcaaaacgtgcgcattggcgcgctggtagaggtggcagaccactggtttctggtctggccgctggcttttatcctctccgctttgctggcgatggtgggctatttcctcgtccgtcgttttgcgccggaagcaggcggctccgggatcccggaaattgaaggcgcgctggaggaattgcgtcccgttcgctggtggcgcgtgctgccggtgaagtttatcggcggcatgggcacgttgggcgcggggatggtgctggggcgcgaagggccgatggtgcagcttgggggcaatcttgggcgcatggtggtggacgtcttccgcatgcgcagtccggaagcgcgtcatacgcttctggcgaccggcgccgccgcggggctctccgccgcttttaacgcgccgctggccgggattctgtttattattgaagagatgcgcccgcagtttcgctacaacctgatctccattaaagccgtgtttaccggcgtgattatggcaaccatcgttttccgtatcttcaatggcgataaagcggttatcgaggtcggtaagctcagcaatgcgccggtcaacacgctgtggctgtatttgatccttgggatgatttttggctgcgtgggtccgttatttaatacgctggtgctgcgtacccaggatatgttccagcggattcacggcggcaacatcaagaaatgggtgctgattggcggcctgatcggcggtagctgcggcgtgctgggactgattcagccggcagcgtccggcggcggatttaacctgatccccatcgccgcggcgggcaatttttccgttggcctgctgctatttatttttatcgcgagggtgattaccacgctgctctgcttctcttccggcgcgccgggcggaatttttgccccgatgctggctctggggacgctgctgggtacggcgtttggtatggcagcgacgccgctgtttccggcgtatcatctggatgcgggaacctttgccattgccggtatgggggcgctgcttgccgcctcggtccgggcgccgttgaccggtatcgtgctggtgctggagatgaccgataattatcagctcattttgccaatgattattacctgcctcggcgcaacactattggcacaattcctcggcggtaagcctttatactcgactattctgcagcgtactctcgcaaaacaaaaagcggaacaggaagccagggcgcagcctgtcggcggggagaatacttga

SEQ ID NO: 172511 - DNA, 1281 bp, Klebsiella oxytoca
atgagcaaatctgaaaatctgtataatactgcgcgtgaacttatccccggcggcgtgaactctccggtacgcgccttcaccggcgtcggcggcacaccgctgtttattgagcgcgccgacggcgcatatctctacgacgtcgatggtaaagcgtatatcgattatgtcggctcctggggcccaatggtgctgggccataaccatccggcaatccgcaatgcggttattgaagctgctgagcgcggcctgagctttggcgcgccaacggagatggaagttaaaatggcggcgctggtcaccgaactggtcccgaccatggatatggtccggatggtgaactccggtaccgaagctactatgagcgccatccgcctggcgcgtggctttaccggtcgcgacaaaattatcaagttcgaaggctgctaccacggtcacgccgactgtctgctggtgaaagccggttcaggcgcgctgacgcttggccagccgaactcgccgggcgtgccggcggatttcgccaaacacaccctgacctgcacctataacgatctggcctcggtccgcgctgcgttcgaacagtatccacaggatattgcctgcatcatcgttgagccggtggccggtaatatgaactgtattccaccgctgccggagtttctgccgggcctgcgcgcgctgtgcgacgaattcggcgcgctgctgattattgatgaagtcatgaccggcttccgcgtggcgctggcgggcgcgcaggattactacggcgtggtgccggatttgacctgccttggcaaaatcatcggcggcggtatgccggttggcgcattcggcggtcgccgcgaggtaatggatgccctggctccgaccggcccggtttaccaggcaggtaccctctccggcaaccccatcgccatggcggcaggtttcgcctgcttaagcgaagtggcgcagcccggcgtacatgagatcctaactgaactcaccaaccagctggctcagggcctgctggacgccgctcgcgataccggtattccgctggtggtgaataacgtcggcggcatgttcggcattttctttaccgatgcgccaagcgtgacctgctaccaggacgtggtgaagtgcgatgtagaacggtttaaacgcttcttccacctgatgctggaagagggcgtctacctggcgccgtcggcgtttgaagcgggctttatgtctattgctcatagcgaagaggatatcgacaataccgtcgccgcagcgcgtaacgccttcgcgaagctgtaa

SEQ ID NO: 172512 - DNA, 930 bp, Klebsiella oxytoca
atgacaacgcaatcttctcccaccccgcatgatgctatcttcaaacagctactggcgcataccgacacagccagagactttatcgatatccatcttccggcagatctgcgcgcgcagtgcgatctcaatacgctacagctggaatcaggtaattttattgaggaagacctgcgcgcctactattccgacgtgctgtactctttgaaaatcaataataagaccggctatatccacgtacttattgagcatcaaagctcgccggacaaacagatggcgtttcgcctgatgcgctatgccgtcgccgcaatgcagcgccatctggaagcgggaaatacgcatcttccactggtggttcccattcttttttatcagggcaaaacctcgccctatcccttcacgatgaactggtacagcctgttcgactcgccggagtgggcaaaaataatctataaccgcccttttccgctggtcgatatcacggtgatccctgacgacgcgattatgcagcaccggcgcattgcgatactggagctcctgcagaaacatattcggcaacgggatctcatgctgctgctggagcaattgggggccctgctgaacacgggatatactaccgccgaacagctaaaagtgttatttagctacatggggcagcgcggttataccgcaaaccctaaggcttttttcaatggactggtaagtcatataccgcaggaggagtcaatggaaacgctgaacgaatggctggaaaaaaacggcaaagagctttttattgaatggggcattgaaaaaggtgaagcaaaggcccgactaaaaattgctaaccggatgctggaaaacggaatggaacagtcgctggtcatccagctcaccgaattaacggaaagcgaaatcaaacagctgcaggacgccgctataaatccggcctga

SEQ ID NO: 172513 - DNA, 1983 bp, Klebsiella oxytoca
gtgagatcgcgtatttcgcctttggcgacatctctgctgttaactctgcttatcgtcgctgctgcgctgacgctgttcaacctcaacgtggtgctgccgcgaagcgaatgggggcaggcgctgtggcagcctaatatcgataatatcgctcagatgctgttccactacagcctgctgccgcggctggttatatcgttgctcgtcggcgccgggctggggctggtgggcgtattgttccagcaggtgctacgtaacccgttggcggaaccgacgacgctcggcgtagcgaccggggcgcagctgggcatgacggtcaccacgctgtgggcgatccctggcgtgctggcgtcgcagttcgccgcgcttgccggggcgtgcattgtcggcgcgctggtgtttggtgtgtcgtggggcaaacgcctctcgccggtgacgttgattctggctgggctggtagtcagcctgtactgcggcgcgcttaatcaactgatggcgatcttccatcacgatcagctgcaaagtatgttcctgtggagcaccggaaccctgacccagaccgactggagcgtggcacagcgactgtggccgcagctgctgggcggagccattttaacgctgctgctgctgcgtccgctgaccttgatggggctggacgacggcgtggcgcgcaacctcggactggcgctctcgctggcacggctgggggcgttgactctggcgattgtcatcagcgccctgttggtgaatgcggtggggattattggctttatcggcctgttcgcgccactgctggcgaagatgctgggcgctcgtcgtctgctatcgcgcctgctgttggcggcgctgattggcgcgctgctgctgtggctctccgatcaggttatcctctggctggcccgggtgtggatggaagtctccaccggttcggtaaccgccctgattggcgcgccgctgctgctatggctgctgccgcgcctgcgcagcattagcgcgccggtgatgaacggcggcgccagggtgcaggctgaacggcaacatgtgctgtggttcgcgctgggcgggctggcgctgctgctgctggccatcgtcgctgcgctggctttcggccgcgatgcgcagggctggcactgggccagcggtacgctactggatgagctaatgccctggcgctggccgcgcattctggcggcgctgttcgctggcgtaatgctggcggtagcgggctgcattatccagcgtttgaccggtaatccgatggccagtccggaagtgctcggcatcagctcaggcgcggcgtttggcgtggtggtgatgctgttctttgtgccggggaatgcctttggctggctgctgcccgccggtagcctcggagcggcggcgacgctgctgatcatcctgattgccgccgggcgcggcgggttctcgccgcatcgcatgctgctggcagggatggcgctgagcacggcgtttaccatgctgctgatgatgctgcaggccagcggcgatccgcgaatggcgcaaatcctgacgtggatttccggctcaacctacagcgccacgccggaactcgtgatgcgcagcggcgcggtgatgcttgttctgcttacgctgacgccattttgccgtcgctggctgacgattctgccgctgggcggcgaggcggcgagggcggtcggcatggcgctgacgccgtcacgtatcgcgctactgctgctggcggcatgtttgaccgcggccgcaacgctaacgattggccccctcagcttcgtggggttaatggcaccgcatattgcgcgtatgatgggattccggcgtacgatgccgcatatggcgatttccggcctgattggcggggtgctgctggtgttcgccgactggtgcggccggatgctgatgtttccgtatcagatcccggcgggattgctgtcgacgtttatcggcgcgccgtactttatctatctgttgagaaagcagagtcggtag

SEQ ID NO: 172514 - DNA, 891 bp, Klebsiella oxytoca
atggaaaacctcacactcatcacgcggcggcgcctgctgaccgcgatggcgctgtcgccgctgctgtggcagatgcgcggcgcgcgggcggcggaagttgatccgcagcgtattgtcgcgctcgaatggctgccggtagagctgctgctggcgttgggcgtcacgccctacggcgttgccgatatccctaactacaggctgtgggtcaatgaaccggcgctgcctgattcggtgattgatgttgggctgcgcaccgaacccaatctggagctgctgacgcagatgaagccgtcgtttctggtctggtcggcagggtacggcccggcggcggaaaagctggcgcgtattgcgcccggacgaggattcaccttcagcgacggcaagcgtccgctgatgatggctcagcagtcgcttagcgaaatggctgacctgatcggcaggcagcaggaagcgaagcgccatctggcggaatttgacgcgctgatggagagcctgcgtccgcgctttgcccgccgcggcgatcgcccgctgctgatgattaccctgcttgatacccgccacgtgctggtctttgcgcagaactgtctgttccaggaagtgctcgagcgctttgccatcaaaaatgcctggcagggcgagaccaccttctggggcagcgtcaccgtcggtattgaccggctggcggcctacagagatgccgacgttatctgcttcgatcacggcaatgcgcgggagatggcgcagctcacggcgacgccgctgtggcaagcgatgccgtttgttcgcgcagggcgttttcagcgcgtcccggcggtgtggttctatggcgcgacgctatcggcgatgcattttgcccgcgtgctggccgacgctcaggggggcccggtgtga

SEQ ID NO: 172515 - DNA, 798 bp, Klebsiella oxytoca
atgcaggaaaacattccgcactccgatacgacgttttcactggaccgcgtgaccttccgcgtgcccggccgaacgctgctgcatcctctgtcgttaaccttcccggcgggaaaagtcacgggcctgattggccataacggctccggcaaatcgacgctgctgaaaatgcttggccgccatcagccgccttcggacggggaggttttgcttgacggtcagccgctcgatagctggggcagtaaagcctttgcccgcaaggtggcttatctgccgcagcagttgcccccggcggaaggcatgacggtgcgcgaactggtggctatcggccgctacccgtggcacggggctctggggcgttttggcgcggcggaccgggaaaaagtggaagaggcgattgcgctggtcgggctaaaaccgctggcccatcggctggtggacagtctctccggcggcgaacgccagcgcgcgtggattgccatgctggtggcccaggatagccgctgcctgctgctcgatgaacccacctcggcgctggatatcgcccaccaggtggatgtgctggcgctggttcatcgcctgagccagcagcgcgggctgacggtgatcgccgtactgcatgatatcaatatggcggcgcgctactgcgactatctggttgcgctgcgcggcggtgaaatgatcgctcagggaacgcccgcggagctgatgcgcagcgaaactctggaacaaatttacggtatcccgatggggatcctgccgcatccggctggcgcagcgccggtaagttttgtctattga

SEQ ID NO: 172516 - DNA, 2250 bp, Klebsiella oxytoca
atggcgcgtcttaaaactgctcagccaaatcactcgctgcgtaaaatcgcagctgtagtagccacggcggttagcggcatgtctgtttatgcacaggcggcagttgaaccgaaagaagaaaccattaccgtaaccgccgctccggctccgcaggagagcgcctggggaccggcagcgaccatcgcggcgcgacaatcggccaccggtaccaaaacagatactcctattcaaaaggtgccacagtctatttccgtggtgaccgctgaggaaatggcgctacatcaaccaaagtccgttaaagaagcattgagctatacacctggtgttgccgtgggaacgcgtggcgcctctaatacttacgactatctgatcatccgcggtttcgctgctgatggccaaagccagaataactttctgaatggcctgaaaatgcaggggaacttctataatgacgcggtgattgatccctatatgctggagcgtgcggaagtcatgcgcggtccgatttccgtactttacggaaagagcagcccgggtggtttgctgaatatggtcagcaagcgtcctacaacggagccgctaaaagaagtccagtttaaaatgggtaccgataacctatggcagaccggatttgacttcagcgatgcgattgacgaggacggcgtttattcttatcgcctgactgggttggcgcgctctgccaatgctcagcagaaaggcgctgaggagcaacgttacgcgattgcacccgcttttagctggcgcccggatgataaaaccaactttacgttcctctcctattttcagaatgaaccggagaccgggtactacggctggttgccgaaagagggaacggtgtcaccgttaccgaacggtaatcgtctcccaaccgacttcaacgaaggcgccaacaacaacacttactcgcgtaatgagaaaatggttggctatagctttgaccacgaattcaacgatacctttaccgtgcgccagaacctacgttacgcgcaaaataaagtttcgcagaacagtgtctacggctatgggatgtgttctgacccgctttattcgagcaacccagccaccagcccttgcgccagtgttcctcagtcacaatggggccatacgctgacccgacagtacgtaattgataatgaaaaattacagaatttctctgtcgatacccagttgcaaagcaagttcgcgaccggctcagtagatcatatcctgctgactggcgttgatttcatgcggatgcgtaacgatatcgattcctggtttggctatgcgggttcagtgacgccatccgatatctataatcttgatcgcagcgattttgattttggttcgcaccctgggccatcaggtgcttatcaagtgctgaataaacagaaacagactggtctttacgtacaagaccaggcgcagtgggaaaaagtgctggttactctgggggggcgttatgactgggcgaagcaggattcgctcaaccgtgttaccgcgacgcagagttccagaaatgataaacaatttacctggcgcggtggtgttaactacctgttcgataatggtataacgccttatttcagctatagcgaatcgtttgagccagcctcgcagaccggtgcaagcggtgatgtttttgctccatctaaaggcaaacagtacgaagctggtgtgaaatacgtacccaacgatcgtcctattgtcattaccggtgccctttatcagttgaccaaaaccaataacctgatggccgatcctgcaggttcgttcttctcggttgaaggtggtgaaattcgctcgcgcggcgtagagattgaagccaaagctgcgctttccgctagcgtcaacgttgtcggttcttatacctataccgatgcacaatacactacggatacctcctacaaaggtaatacgccggctcaagtgccaaagcatatggcatccctgtggggggactacactttatttaacggcccgctatctggactgacattgggtactggcgcacgtttcactggctccagctatggcgatccagcgaactccttcaaggtgggtagttacacggttgttgatgcattagtccgttatgacctggcccgcttgggtatggcaggttctaacgtggcgcttcacgtgaacaacttgtttgaccgagagtatgtggcaagctgctttaatacttatggctgcttctggggcgctgagcgtcaggttgtggcgaccgcgactttccgtttctaa

SEQ ID NO: 172517 - DNA, 2553 bp, Klebsiella oxytoca
atggcgggagatgaccgcgagccgatcggacgtaaggggagaccctcgcgcccggcaaaacaaaaggtaactcgccgtcgggttcgggaagaggactacgacgacgattacgatgatgactatgaggatgaaaaaccgatgccgaggaaaggaaaaggcaaaggcggtaaaccccctcgtcgtaaacgcacctggctgtggctgctgattaaaattggggtcgtctgtgcggtattgattgccgcctatggcgtctaccttgaccagaaaatccgcagccgcattgacgggaaagtctgggatctgcccgcggcggtttatggccggatggtcaaccttgagccggatatgcagatcagcaaaaacgaaatggtgcgcctgctcaacgcgacgcagtatcgccaggtgagcgcgatgacgcgtccgggggaatatacggtacaggccaacagtatcgagatgatccgccgtccgttcgatttcccggacagtaaagaaggccaggtgcgcgcgcgtctgacctttaatggcgatcgtctcgacaccatcgagaacatggataataaccgccagttcggtttcttccgtctcgatccgcgcctgatcactatgctgcaatcggctaacggcgaacagcgtctgtttgtgaagcgcaacggcttcccggatctgctggtggatactctgctggcgacggaagaccgccatttttacgaacacgacggcatcagcctttactccattggccgtgcggtgctggctaacctgaccgccggtcgtacggtgcagggggcgagtacgctgacccagcagctggtgaagaacctgttcctctccagcgaacgttcgtactggcgcaagattaacgaagcctatatggcgctgatcgtcgatgcccgctacagcaaggatcgtatccttgagctgtacatgaacgaggtgtacctcggtcagagcggcgataacgagatccgcggcttcccgctggcgagcctctattactttggtcgtccggtggaagagctcagcctcgatcagcaggcgctgctggtggggatggtaaaaggcgcgtcggtttacaacccgtggcgtaacccgaagctggcgctggagcgacgcaacctcgtgctgcgtcttctgcagcagcagcaggttatcgatcaggagctgtatgacatgctcagcgcgcgtccgctgggcgtacagccgcgcggtggggtgatctctccgcagccggcgtttatgcagatggtgcgtcaggagctgcaggcgaaactgggcgataaagtcaaagatctctccggcgtgaagatctttaccaccttcgattccgtggcgcaggatgcggcggaaaaagcggcgatagagggtattccggcgctgaagaaacagcgtaagctaccggatctggaaaccgcgatggtggttgtcgaccgcttcaccggagaagtacgggcgatggtcggcggggcggagccgcagtttgctggctataaccgcgcaatgcaggcgcgccgttcgattggctcgctggcaaaaccggcgacctatctgaccgcgctaagtcagccgaatcagtatcgtctcaatacctggatcgccgatgcgcctatctcgattcgtctgtctaacggccagacatggtcgccgcagaacgacgatcgtcgctacagcgagagcgggaaggtgatgctggttgacgcgctgacgcgttcaatgaacgtgccgacggtgaatctcgggatggcgctgggcctgccggcggtggttgatacctggactaaactgggcgcgcccaggaatcagctgaatgcggttccttctatgctgctgggggcgctgaacctgacgccgattgaagtggcgcaggcgttccagaccattgccagcggtggcaaccgcgcgccgctgtcagcgctgcgttcggtgatcgctgaagatggtaccgtactctatcaaagctatccgcaggcggaacgggcggtaccggcgcaggcggcttatatgacgctctggactatgcagcaggtggtgcagcgcggtaccggtcgtcagctgggcgcgaagtatccgggcctgcatctggcgggtaaaaccgggaccaccaacaacaacgttgatacctggtttgccggtattgacggcggtcaggtgaccattacctgggtgggacgcgataataaccagccgactaagctgtacggcgccagcggcgcaatgtcgatttaccagcgctatctggctaaccagacgccgactccgctggtcctgactccgccggaagatgtggtggatatgggcgtcgatagcagcggtaactttgtctgcagcggcggcatgcgttcgcttccggtatggacgacctcgccggacgcgctttgtcgccagggcgaactgattcaacagcagcagctccagcagcagcaggcgaataatccgttcaatcagtccgggcaacagccgcaacagcagcaaaatcagcagcaaccgccgaagcaggagaagagcgatggcgtagcgggctggattaaagatatgttcggcggtaattaa

SEQ ID NO: 172518 - DNA, 378 bp, Klebsiella oxytoca
atgcgcaactttattatatttccgcttatggcggttgccctgatctcaggctgtcagcaaaatcgtcagacaaccctgagtcctgcggttagcggtgaggctcagcttgagcagcttgcctccgtcgccgccggggcgcgctatctgaagaataaatgcaaccgcagcgatctgcctgccgatgacgcaattaaccgtgcggcaataaacgtcggtaaaaaacgcggatgggcaaatattgatgataatctgctgagccagcgcagcgcgcagctatatcaacagctccagcaggatagtaccccggaagccacaaaatgcagccagtttaatcgccagctggcgccatttattgatagcctgcgcggcaataaatag

SEQ ID NO: 172519 - DNA, 525 bp, Klebsiella oxytoca
gtgcttgttcgtgagcaagaaccgtacccgccgtccagtcccccggcggggggcgggaaaatggtgcaaattccctgcgtgaccgtaccgctgtatgccgcgctgctgattgcgctcggctggtttggcggcgagcagtggcggaataaacccgtcccgcagccgataacgcagccggtagcccatgcggcgttagtgccgctgaatcaaccggcggtcgaaactgccgtcaagccggttaaagccgggccagaaacgcaggccgttgcggaggcgccgatcgatgaagatcatctgccgcctctgcgctacagcgcgcacgtctacgccaccctggcggagaaacgcagcattgtattaaacggacaatcctggaaggagggcgactcgccgctggcgaatctggttatcgagcagatccagcaggatctcaccgtctttagctttaacggtaaaacgtttaccctcgcggcgctggatgactggccgggcgggacgattgaggagagtccgcagggagaataa

SEQ ID NO: 172520 - DNA, 3273 bp, Klebsiella oxytoca
atgctcagatatacccgtaatgccctggttctgggatcgctggttttacttagcggctgcgataacggatcctcttcttcttcctctggaaatcccgacactcctggtaatcaggatgtggttgtacgtttacctgacgttgccgtacccggcgaagcggccacggcggcagaaaaccaggcggtcatccacctggtggatattgccggcatcaccagcaacaacgcggcggactacagcagcaaaaacctctatctgtggaataacgaaacctgcgatgcgctcagcgcgccggtagcggactggaatgacgtcagcaccaccccgagtggcagcgataaatatggcccgtactgggtgattccgctcaacaaagagagcggttgtatcaacgtcatcgttcgcgacggcaccaataaactgatcgatagcgatctgcgggtggcgtttggcgacttcaccgatcgtacggtatcggtgatcgccggtaacagcgcggtctatgactcccgcgccgacgctttccgcgccgcttttggcgtcgcgctggccgaagcccactgggtcgataaaaatacgctgctgtggccgggcggacaggacaagcccatcgtgcgcctctactacagccacagcagtaaagtggcggcggatggcgaaggcaaatttaccgaccgttacctgaaactgacgccgactacggtcaatcagcaggtcagcatgcgtttcccgcatctttccagctatgcggcttttaagctgccggacaatgcgaacgttgacgagctgctgcagggcgaaacggtcgccattgccgccgcagaggacgggatcctgatttccgccacccaggtgcagacggcgggcgtcctggatgacacctatgccgaagcggcggaagcgctgagctacggcgcgcagttgaccgacggcggcgtcaccttccgcgtctggacgccgactgctcagcaggtggatgtggtggtctacagcgcggacaaaaaagtgattggcagccatcctatgacccgcgacagcgcttctggggcgtggtcgtggcaggggggcagcgatctgaaaggcgcgttctaccgctatgcgatgacggtttatcacccgcagtcgcgcaaggttgaacagtatgaagtcaccgacccgtatgcgcatagcctgtcgaccaactcggagtacagccaggtggtcgatctcaacgacagcgccctgaagcctgacggctgggatagcctgacgatgccgcatgcccagaagacaaaagcggatttagcgaagatgacgatccatgaatcgcatattcgcgatctctccgcctgggaccagaccgttccggccgaactgcgcggtaaatatctcgcgctgaccgccggcgacagcaatatggtacagcatctgaagaagctctccgcctcaggcgtcacgcacgtcgagctgctgccggtcttcgatctggcgacggtgaacgagttcagtgacaaagtcgccgatattcagcagccgttcagccgcctgtgcgaagtgaacagcgcggtgaaaagcagcgagttcgccggatactgcgacagcggctccaccgtggaggaggtgctgaaccagctcaggcagagcgatagccaggataatccgcaggtacaggcgctgaatacgctggtggcgcagaccgactcctataactggggctacgatccgttccactacacggttccggaaggatcctacgcgaccgatccggaaggcacgacgcgcatcaaagagttccgtaccatgattcaggcgatcaagcaggatctggggatgaacgtgatcatggacgtggtatataaccacaccaatgccgcgggtccgaccgaccgcacgtcggtgctggataagatcgtgccctggtactatcagcgtctgaatgaaaccaccggcagcgttgaatccgccacctgctgttccgactctgcgccggagcatcggatgttcgccaggctgatcgccgactcgctggcggtgtggaccaaggattataaaatcgatggtttccgcttcgatctgatgggctatcacccgaaagcgcaaattctctcggcgtgggagcgcattaaagccctgaatccggatatctacttctttggtgaaggctgggattcaaaccagagcgaccgctttgaaatcgcctcgcagatcaatctgaaaggctccggtatcgggacgttctccgatcgtctgcgcgactccgtgcgcggcggcggcccgtttgattccggcgatgcgctgcgtcaaaaccagggcgttggcagcggcgctggcgtattaccaaacgagctcaccagcctgaacgatgatcaggtccgtcatctggccgatctgacccgtctggggatggccggtaaccttgctgactttgtgatgatcgacaaagacggcgcggtgaagaaaggcagcgaaattgactataacggcgcgcctggcggctatgccgcagatccgacggaagtcgtcaactatgtttcgaagcacgacaaccagacgctgtgggatatgatcagctataaagcgtcccaggaagccgacctggcgacccgcgttcgcatgcaggccgtttcgctggcgacggtgatgctcgggcaggggatcgctttcgaccagcagggttctgaactgctgcgctcgaaatcctttacccgcgactcctacgactccggcgactggtttaaccgtgtggattattccctgcaggacaataactacaacgttggtatgccgcgcatcagcgatgatggcagtaactatgacgtgatttcgcgcgtcaaagatatggttgccgctccgggcgaagcggagctgaagcagatgaccgccttctaccaggagctgaccgagctgcgtaaatcctcgccgctgttcaccttaggtaagggcagcgcggtgatgaagcgcgttgatttccgtaataccggttcagaccagcaggccggcctgctgattatgaccgtggatgacggggtgaaagcgggcgccagtctggatagccgtcttgacggcctggtggtggcgatcaacgctgcgccggaaagccgtacgctgaatgagtttgccggtgagacgctgcagctgagcgcgatccagcaggcggcgggcgaaaattcgctggctcacggcgtgcagattgccgcagacggcacggtcaccctgccggcatggtcggtggcggtgctggaaatgccgcagggcgatgctcagggtgcggggctgccggtcagcagcaagtaa

SEQ ID NO: 172521 - DNA, 840 bp, Klebsiella oxytoca
atgcctaattccgtgatgagattaacaatatcaaataaaaaaataattaattacgtgcctcatattgtgacgttcatcatattattttttatctgccagcagctcgcccaattaacctggaaaataattctcccggtaaactttacggataacgcattaagctctgccgatacgactgtgcccgccgcgccctccccggaaacggcgctgccgcgctttacgctatttggcgtggcggagaaaacgccctcctccgcaaacggcgacaacctcgagcaggcgcccgtttcggcgctcaaactgcgcgtaaccggcctgctcgccagtaccgatccctctcgcgccattgctatcatgatgcagggtaatcaacaggttagcctcgggattggcgataatacgccgggcggagaggcgaaaattgtcgccattttccccgaccgcctgattgttaattaccgcggcacaaatgaggctatcccgctgtttaacgacccgcccgccgccggcaaaaatagcgccgtgccgccagccggccaattggcgcaggagctccgcgcgcagccgcaaaatattcttcattacctcaatatttcgccggtcatggtcaacgacaagctcagcggatatcgcctgaatgcgggaaaaaaaccggcgttatttcgccaggcgggtctcaaggaaaacgatctggcgattgccctgaacggcctggatctccgcgataaagaacagtctcgccaggcattagctcagctaccggaattaaccgaaataacccttaccgttgaacgcgacggccagaaacaagatatttctctagatctgagggatgaataa

SEQ ID NO: 172522 - DNA, 1983 bp, Klebsiella oxytoca
ttgatcatcaccaacgttacccgcccatttttcctgacgctgctgatattcgccgcgctgatattcaaaccggccgcggcggaagagttttccgccaactttaagggcaccgatattcaggaatttatcaatacggtcagtaaaaacctgaataaaacggtcattatcgatcccagcgtacgcggcaccattaccgtacgtagctacgatatgctcaacgaagagcaatattatcaatttttcctcagcgtcctcgatgtctatggcttcgcggtgattaatatgaataacggcgtcctgaaagtcgttcgttcgaaggatgcgaaaaccgccgcggtgcctgtggcgagcgatgccgcaccgggtactggcgatgaggtcgtcacccgcgtcgtgccgctgactaacgtcgccgcccgcgatctggcgccgctgctgcgccagcttaacgataacgccggcgcgggcagcgtggtgcactatgaaccctccaacgtcctgctgatgaccggccgcgcggcggtgatcaagcgtctgttgaccatcgtcgaacgcgtcgataacgccggagaccgcagcgtggtgacagttcccctctcatgggcctccgccgccgatgtggtcaagctggtgactgaactcaacaaagataccagcaaatcggccctgcccggctcgatggtcgccaacgtggtggccgacgagcgcaccaacgcggtgctggtcagcggcgagcccaactcgcgccagcggatcgtcgccatgattaagcagctcgaccgccagcaggcgacgcagggcaacaccaaagtgatctatctgaaatacgccaaagccgccgatctggtcgaagtgctgaccggcatcagcagcacgatgcagagcgaaaagcaggccgcgaagccggtggcggcgctggataaaaatattattatcaaagcgcacggacagaccaacgccctgattgtcaccgccgcccctgacgtgatgaacgatcttgaacgggtaatcgatcagttggatatccgccgtccacaggtgctggtggaggcgatcatcgccgaagtgcaggacgctgacggtcttaacctcggcatccagtgggccaataaaaacgccgggatgacccagttcaccaacagcggtctgccaatatctacggccatcgccggggccaaccagtacaacaaagacggcaccgtcagcagctccctggccagcgcccttagctccttcaacggcattgccgccggcttctaccagggcaactgggcaatgctgctcaccgcactctcaagcagcaccaagaacgatattctcgccacgccgagcattgtcaccctcgacaacatggaggccacctttaacgtcggccaggaagtcccggtgctgaccggctcgcaaaccacctccggcgataacatcttcaataccgtcgagcgtaaaaccgtcggcatcaagctgaaggtaaagccgcaaattaacgaaggcgattcggtcctgctggagatcgaacaggaggtatcgagcgtggcggatgccgcctccagcaccagttcggatctcggcgcgaccttcaatacccgtacggtgaataacgccgtactggtcggcagcggcgaaacggtggtcgtcggcggcctgctggataaaagcgtctccgacaccgccgataaagtccctctgctcggcgatatcccggtgattggcgcgctgttccgctccaccagcaaaaaggtctccaagcgcaacctgatgctgttcattcgtccaacggtgatccgcgaccgagacgagtaccgtcaggcttcatccgggcagtacgccgcgtttaacgacgcccagagcaaacagcgcggcaaagagaacaacgacgcgatgctgagtaacgatctgctggagatctacccgcgccaggataccgccgcgttccgccaggtcagcgccgccatcgacgcgttcaatctgggaggcaatctatga

SEQ ID NO: 172523 - DNA, 1494 bp, Klebsiella oxytoca
atgatgcccgccgctgaacgacgtccgctgctccccttcagctacgcccgcgcgcacaacgtgatgctcctgagcaacggcgcaagctgcgaggttttctgccttgccgccaccgcgccgcaggcgctgctggaagctcgccgggtggccgggatgccgttcagcctggaacgactggaagcagaggcgttcgaaaagctgctggtgctgagctatcagcgcgactccgccgaggcgcggcgcatgatggcggatatcggcaacgagctggatctgtacacccttgccgaagagctgccggacaccgacgatcttctggatagcgaagacgacgcgccgattatccgcctgattaacgccatgctcaccgaggctatcaaagagaaagcgtcggatattcatatcgaaacctatgaacgccacctgcaaattcgctttcgcgtcgacggcgtactgcgcgaaatcctgcgcccccagcgccgcctcgccgcgctgctgatctcgcgcattaaggtgatggcgagccttgatatcgccgaaaaacgcattcctcaggatgggcgcatggcgctgcgtattggcggacgcgccgtcgatgtccgcgtctccaccctgccgtcgagctacggcgaacgcgtggtgctgcgtctgctcgataaaaacagcgttaatctcgacctgctgaccctcgggatgccgcccgcgctgctccagcaggtagatggactgatcgcccgcccgcacggcatcgtgctggtgaccgggccgaccggctcgggaaaaagcaccaccctctacgccgcgctaagccgcctcgatgcccgcgagcgcaacatcatgaccattgaagatcctatcgaatatgagctggagggcatcggtcagactcaggttaacgcgaaagtcgatatgacctttgcccgcgggctgcgcgccattttgcgccaggaccctgacgtggtgctggtgggcgaaatccgcgacggcgaaacggcgcaaatcgccgttcaggcctcgctaaccggccatctggtgctctcaacgctgcataccaatagcgcgctgggcgccatctcgcgcctgcaggatatgggcgtcgagccttttctgctctccacctcgctgctggcggtgatgtcgcagcggctggtgcgacggctctgcccgcactgccgccagcaggagccggccaatgccgataccgcccgccagatggagatcgcccccggcacggcgctctggcagccccggggctgcgccgagtgcggctttaccggctatcgcggacgtaccggcattcacgaactattgctggtggacgatcgcgtgcgcatggctatccaccgcggcgaaaacgaggtgacgctgatccaacagctgggaacggactatgtcaccctacgccatgccgggcgggaaaaggcgctggcggggatcaccagctggcaagaggtcctgcgggtcaccgaacagcagatcgcggaggcctcctga

SEQ ID NO: 172524 - DNA, 1206 bp, Klebsiella oxytoca
atggcgctttttcgctatcaggccgttgatgaaaacggtaaaacccggcgcggcgtccagcaggcggactccgcccgccacgctcgccagctgctgcgggaaaagggctggctggcgctggacatcgccccggcagccggcagcggcggacaaccgcgctttatccgccgcaccagcgcccgcgatctcgccctcgtcacccgccagctggcgacgctggtcgccgccgccatcccgctggaaaaagcgctcgacgcggtggcccagcagtgtgagaaaccgcagctgaaaaccctgattgccggcgtgcgcggcaaagtgctggaaggccacgcgctggcggaagcgatgcgcggctaccctggctgcttcgacgcgctctactgcgcgatggtcgccgccggcgaagcttccggccatcttgatggcgtactgaaccggctggcggactataccgaacagcgccagcagctgcgcgcccggctgctgcaggcgatgatttaccccatcgtgctaaccctggtggcggtcagcgtgatcgtcattctgctgtcgacggtggtgccgaaggttgtcgagcagtttatccaccttaagcaggcgctgccgttttctacccgtctgctgatggcgatgagcgatatgctgcgcgccgccggtccgtggctgctgctcgccgccatgctcatggctctgctgctgcgctacctgctgcggcagccggcaaagcggctggcctggcacagactgctgctgcgcctgccgttgattggccgggtcgcgcgcagcgttaacagcgcccgctacgcccgtaccctgagcattctcaacgccagcgccgttccgctgctgctggcgatgcgcatcagcgcggaagtattaagcaacgcctgggctaagcgccagctcgaagccgccagcgacgcggtacgcgaaggcgtcagcctgcatcgcgcgctcgaaatgacccagcttttcccgccgatgatgcgctatatggtcgccagcggcgaacagagcggcgagctcaacgacatgctggcgcgcgcggcagataaccaggaccgggatctgagcgcgcaaattcagctggccctcagcctgtttgaacccctgctggtagtggcgatggccggcatggtgctgtttatcgtcctcgccattctgcaaccgatactgcaactcaataccctgatgagtatgtaa

SEQ ID NO: 172525 - DNA, 423 bp, Klebsiella oxytoca
atgcaacgacagcgcggcttcaccttactggaaatcatggtggtgattgttatcctcggcgtactcgccagcctcgtggtgcccaatctgatgggcaacaaagaaaaggccgatcggcaaaaagtggtcagcgatcttgtggcgctcgagggggcgctggacatgtacaaactggacaacagccgctatcccactaccgagcaggggctgcaggcgctggtcagcgcgccatcggccgagccgcacgcgcgcaactatcccgaaggcggctatattcgccgtctgccacaggatccctggggcaacgattaccagctgctaagccccggccagcatgaacaggtcgatattttcagcctcgggccggacggcgtgccggagagcaatgacgatatcggcaactggacgattgggaaaaaatag

SEQ ID NO: 172526 - DNA, 513 bp, Klebsiella oxytoca
gtgcgacagcgcggctttacgttgctggaaatgatgctcattttgctgctgatgggcgtcagcgcaggcatggtgctgctggcctttcccgcctcgcgcgatgatagcgcggcgcagaccctggcgcgctttgaggcgcagctgcgctttgtccagcagcgaggtctacaaaccggtcagttttttggcgtctcggtgcatcccgatagatggcagtttctggttctgcaagcccgcgaaagccatgagcccccctctgtcggcaacgactggaacggctatcgttggctgccgctaagcgccggacgcgtcgccacttcgggcagcgtcgtcggggacaagctacgcctcgcttttccgcagggcgaggcctggacgccgggcgacaaccccgatgtgctgatctttcccggcggggagatgaccccctttcggctgaccgtcggcgaagccacgggtatcgcgtttaatgcgcgcggcgaaagccagcctcaaccgcaggaggcgccatga

SEQ ID NO: 172527 - DNA, 366 bp, Klebsiella oxytoca
atgaaaaaacaggccggcatgacgctaatagaagtgatggtcgcgctggtggtcttcgcccttgccgggctggcggtggtgcaggccacgctccagcaaacccgccagctggggcgaatggaggagaaaattctggccggctggctggcggataatcagctggtgcagctacggctggaaaatcgctggcccgcgctgagctggtcggaaaccacggtgcagacggcgggcgtcagctggcacattcgctggcagggcgtggaaaccgacctcccgcagctgcgggcgctggacgtcgaggtccgccatgccaaaagcgaaaagatgcccgtctcttcgctgcgcacctacgtgacgccgccatga

SEQ ID NO: 172528 - DNA, 597 bp, Klebsiella oxytoca
atgatccagcgcgctcgcggatttaccctcgttgaaatgctgctggcgttggccatcctcgccgcgctcagcgtcgctgcggtcacggtgctgcaaaatgtgatgcgcgccgatacgctcacccgcgataaaggcgagcgcatccagatgctgcagcaaacgttcagccagatggcggcggactttagccaaatcattccccgccgcagccgcgacagcgcgagcctgttttttgccggacgctttcagctcggcagcgacgactgggcgatcgcttttagccgcaacggttggcccaaccctctggggcttctgccgcgttcggaaattcagaacgtcagctaccgcctgcgcggcagccacctggagcgcctgagctacgaccagcaggacccgctgccaggtagtctgcctacggtgaccgttatgcagcgcaacgtgcaggcgtttcgtctgcgcttttacgccagcggccgctggctggatgaatggcagcagccgcagaggttgccccaggggctggaggtcaccctgacgctggagccatacggcgagatccgaaggctgtttctgcttacgccgggaggcagccaatga

SEQ ID NO: 172529 - DNA, 981 bp, Klebsiella oxytoca
atgaatacccgccagcgcggcgtcgccctgcttatggtgctgctgatcctcgctctgatgatggtgctggcgagcgccatgaccgagcgcagcgcgcggatgtatcagcaaaccgcgacgaccctcgataacctgcaggccaaatggtacgcgctgggggcggaaaccctggcggcggcgttgctacaacgggacgagctcgactcgccgaaccaaacccatctggcgcagaactgggcccagcaggggcgacgttttacgctcaatgacggcgagatctacgccacgattaccgacgctcaggcctgcttcaacctcaacgccattaaccagctcagcggcgacgaaagcgttgaaatcccttatcccgcacaggtttttacccgactgctggagaacctcggcagcgagccgctgcgcgccttacagctgaccgccgccctgcgcgactgggtggacagcgatcgccagccgctgctgaacggcgcggaagatgaagtctatatggcgcaatcccccggctatctgagcggcaatcagccgctgcaggatatcagcgaactgcgcctgctggccgggatggacgcgacgctctatcagcgtctgctgccctacgtctgcgcgcctccggacgatgcgctgcaggtgaacgtcaataccctgcagcccgctcaggccgcgctactgtcggcgctcttcccggctgaactcacccttgccgaagcccggcagctgctgcaggcgcgcgcggccactggctggagcagcgtcgccgctttcctgtcgcagccgatactacaaaaaaccgataccgccgccgcgcgtccgtggctgacggtgcgcagcgagcgttttatcgccaccttcagcgtagtgatgggcagcgcccgctatcagcaacgtagcctcctgcaaaagcaggggcgaaccttcggcgtcgtccagcggcgctatggaatctattgggtagccgatgaataa

SEQ ID NO: 172530 - DNA, 1191 bp, Klebsiella oxytoca
atgaataaccaccatacatcttccgccaccgtgctgattattcgcctcaatcccgatgccacgacggcgatatggcggctggccgcgccgggcgacgaggcgcagagcggagaatggcatcctgacgctggcgatccgacgctcagcctgctggcgcagcgttatccggcctgggtgctggtgcccgccagcgactgcgcgtttcatcgcgttactctgcccgccggcgtgcgccgaaatgcgcagcaggccctggcgtttttactcgaagaacagctggcaacagaggtcgaggagagccattttgccctgctccaccgggataaaagcgattgtgccgtggcggtggtcgggcgggagaagatgcgcgcctggcaggcctggtgcgaacaactcggactcaacgtgctggcactgacgccggatgccctaaccctgccgcacaacccaaccggctggagcgccgtacgctgcggcgagcagtggctgtttcgccacgattcggagagcggtatggcggtggaaacctcatggctcggcgaactgctggttcactggcctgacctcgcgcccatcgcctgctactcgccgccgccggatattgccgcaccgtggcaacctctgccgacgcaggatttgctggagctggcggcgagcaacccgcaggcgcgtaaaacctgcttatgccagggcgattttgcccctgaacgccgccgggcgccgacgccccgacgctggcgcccggctctcgccgctgcgctggcgctactgctgctgtggagcgggaatcgcctccacgaccatctcgcgctggcgcgccaggccgacgccgcggtacaggccagccgtgacttttaccgccagtggttcaaaagcgaaaaaaacctcgtcaatccacgtctgcaaatgcagcaacatctgcgtcggctggcaagcgcccggccggcgctcatctcgcagctcggcgctctgcagcaaatcattgctgaaacgccgggcatccgcctgcgaaccctgagctatgatgccgggcgcaacgcgctgcagctggagatatccgccatctcatcgcaggctctggagcagttcagccagcgggcgcgggccggcttccgcgtgcagagcggggaaatgaaaccgcacgcagagggtattgaagggcgtctgacgctggaggataacgatgcataa

SEQ ID NO: 172531 - DNA, 486 bp, Klebsiella oxytoca
atgcataacctgatgaccttatggcaacagcgtacgcgccgcgaacggcatctgctgctgggcatgggcgtgatgctgattatcggcctggtctattacgctttatggcagccctggcaaagtcgcgagacgcagtggcggcaaacgctgacccgggagcaggccagtctgcagtggatgcgccagcagactccccttctgcagcagcttcgccagcagaaatcgcctgccgcgccgcaagagccaacaacggtgattatgcgcgaagccgcccgccacgggatcgccatcgttcgcctgcagccgcagggagctcgcctgggccttagcgtgcagcccgccgattttcaggcgctgatggcatggctcgacgcgctggggcaggcggggatgaccaccgttacgctgacggtggccgccgtggcgcagcagcccggccgggtcaccgtcactacgctggtgctggagcgcagcgatgaaaaatag

SEQ ID NO: 172532 - DNA, 759 bp, Klebsiella oxytoca
atgaaaaatagactcactatcggcctgctgctggcggcggtctatctcttctggctgctgcttagcgcgccggcgagactgctggccctggcgctgccggaaggcgcgcggctcggcgaaaccacgggcaccctgtggcaaggagaagcccgtcaggccagctggcgcggttttgacatcgcccatttacgctgggagtttggcttttcgtcgtggcttcccggctggcatatcgcgtttagcgccccctccggtctgcgcggccaggcctggctgcacggcctgaacgagtttgtggtgcgcgagggccgactcgtgattccggcccggacgatcggccagcggctgacgctcgggataccgctggaagctcgtggccaggtgatgctgacgctaccggaagcccgttttaacgctggcggctgccgacagataagcgcgggcgccgtgcagtggcaggatgcggcgctcacctcccccgccggttcgctcgaactggcccaggttagcggcaaactaagctgcaccccggcgggcgcgctggctatcgccctgacccaggattcccatcagcttagcctcaccggacagggcgttctgacgcccgacgggcgctatacgtttaacggcatgctgcaaacccgtcaggcggctccggcgctgctgacgctgctggtagcgcaaaccggccgtaaagataagcaggggcgcacgccgtggcagtggcagggacagtggctatccgaggagaaaaaatag

SEQ ID NO: 172533 - DNA, 798 bp, Klebsiella oxytoca
gtggaaaacatcgcattgttatccgagttcgccgcacaattcccgttaatctggggcggttttttattcttgtccggactggcgttcggcagcttttttaacgtcgttatccatcgtttaccgctgatgatggagtacgcagagggagtgaatctctgcttccccgcatcgttctgtccgcagtgccgtcagcccatcgcctggcgggacaatatcccgctgctgagctttttatggctcaaggggcgttcgcgctgctgcgggcgaccgatttcacgtcgctatccgctgatggagctggcgaccggcgcgctgtttatgctggtcgggtacctgatccctgcgggcatgccgctgctgggcgggttaattttattgtcgctgctgctgatcctcgccgccatcgacgcgcaaacgcagctgctgcctgacaggctgactctgccgctgctgtgggccgggctgctgttcaatcttaccgatctcttcgcgccgctggcggaggcggtcgttggcgcgatggccgggtatctatcgctgtggtcagtgtactgggtgttccgtctgctgaccggtaaagaggcgctgggctacggtgatttcaagctgctggcggcgctcggcgcgtggctcggctggcaggcgctgccgcatacgctgctgctggcttccgccagcggcctgatctggacgctgctgcagcgcctggtaacccgtcgctcgctcgaacagcctctggccttcggcccctggctggcgctggcgggcggcggcatctttttgtggggccaggtataa

SEQ ID NO: 172534 - DNA, 2430 bp, Klebsiella oxytoca
gtgtcctcattgccggttgccgccgtcctccctgaacttctctctgccctgcagcatgcgccgcaggttttgcttaacgcgccaaccggcgccgggaaatccacctggctgccgctgcaaattctcgccgaaggtaaaatcaacggacgcataatcctgctggagccgcggcggctggccgcgcgtaacgtggcgcagcggctggcggaactgctgggagaaaagcccggcgagacggtgggctatcgcatgcgcgcggagagctgcgtcgggccgaacacgcgtctcgaagtggtgaccgaaggtattttaacgcggatgatccagcgcgatcctgagctgagcggcgtggggctggcgatccttgatgaattccacgaacgcagcctgcaggcggatctggcgctggcgctgttgctcgacgtccagcagggactgcgcgacgatcttaagctgctgattatgtcggcgacgctggacaatgaacgcctgcagaagctgctgccggaggcgccggttatcgtttccgaagggcgcgcgtttccggttgaacggcgttttttgccgttgccgactcatcagcgttttgacgaggcggtggcgatagccgccgcagagctgctgcgtagcgagaacggctcaatgctgctgtttctgcccggggtaggagaaattcagcgcgtgcaggagcggctggcggagcgggtggcgagcgatgttgtgctgtgcccgctgtacggcgcgttgccgctgagcgagcagcgtaaggcgatactgcctgcgccagccgggatgcgcaaagtggtgctggcaaccaacatcgccgaaaccagtctgaccatcgaggggattcggctggtggtggatagcgctcaggagcgagtcgcgcgctttgacgcccgcaccgggctcacgcgcctggtgacgcagcgcatcagccaggcctcaatgacccagcgcgccggtcgagccgggcgtctggagccgggtatctgcctgcatctgctggcaaaggagcaggccgagcgcgcggcggcgcaggacgacccggaaatcctgcaaagcgatttgtcgtcgctgctgctggagctattgcagtggggatgtcaggacccggcccagctcagctggctggatctgccgcctgcgaccaacctggcggcggcccggcgtctgctcactgacctttctgcgctggaaggtgaccggctgtcggcgcacgggcgcaaaatggcggcgttaggtaacgatccgcgtctggcggcaatgctgacggccgcggaggatgccgatggcgccgccacggcggctaagctggcggcgatccttgaagagccgccgcgcggcggcaatagcgatctcagcgcggcgtttgcccgtcagcagggcaactggcagcagcgggcgcagcagctgatgaaaaggctggcggttcgcggcggtcagcccgacgccgacagcatcgcggcgctgctggcctccgcttttgccgaccgtatcgcccatcgtcgcggtcaggaggggcgctaccagctggctaacgggatgggggcgatgcttgacgccgatgatgccctgagccgccacgaatggctgattgcgccgctgctgctgcaggggagcgcatcgccagatgcgcggatcctgctggcgctgccagtcgatattcacgcgctgattgagcagtgtccggcgctggtccggcgttccgatatcgtcgagtgggatgaggcgccaggcacgctgaaggcctggcggcgcacctgtatcggacgcctggtcatcaagacccagccgctggcgaagccagcggaagaggagctgcatcaggcgatgcttaacgggatccgcgagaaggggctgaacgtgctcaactggacgccggaggcggagcaactacgtctgcggctgcactgcgcggcgcagtggctgccggaggaggcgtggccggccgttgatgaggcgtcgctgctggcctcgcttgaacggtggctgctgccgcagatggcgggcgtccattcgctgcgggctctgaaggcgctggacgtgcgtcaggcgctgcaaaactggctgccgtggccgctgcgccagaagctggacagcgagctgcccacgcattatacggtgccgaccggtagccgcattgcgattcgctatcacgatgaaaacccgccggcgctggcggtgcgaatgcaggagatgtttggcgaggcgaccactccgactatcgcccaggggcgggtgccgctggtgctggagctgctttcgccggcgcagcgcccgctgcagatcacccgtgatttaggcgcgttctggcaggggagctaccgcgaggtacaaaaagagatgaaagggcgctatccgaagcacgtctggcccgacgatccggccaataccgccccgacccgccgcaccaaaaagtattcgtag

SEQ ID NO: 172535 - DNA, 537 bp, Klebsiella oxytoca
atgtccgagccgaaaaggctgtttttcgccattgaacttcctggagaagttcagcagcagatcgttcactggcgcgccgccagctttcccgaggatgcgggtcgaccggtggcggcggctaacctccatctgacgctggcctttcttggcgaagtgagcgcggacaagcagcgggcgctgtctgcaatggccggacggatccgccagccgggctttaccctgacgcttaacgatgccgggcagtggctacgttcgcgggtggtgtggctgggtactcgtcagccgccgcgcggggttttgcaattagcgaatatgctgcgcgcccaggccgcccgcagcggctgctatcagagcccgcagccgtttcatccgcatatcaccctgctgcgcgacgcgcgccacgcggtgcctattccgccgcccggatttcgctgggcgtttgcggtcaacgaatttgttctctaccaatccagctttagccgcggacgcacgcgctatcaggcgctggaacgttaccctttcgacaaggaaagctga

SEQ ID NO: 172536 - DNA, 717 bp, Klebsiella oxytoca
atgctgttcactcctcccctgcagtccgccatcctgattaaacgttacaaacggtttctcgccgacgtcatgaccccggatggacgcgagcttaccctgcactgccccaataccggcgccatgaccggctgcgccgcgccgggcgacaccgtctggtattccacctcagataatcctaaacgcaaatatgctcacacatgggaattaactgaaaccgtcgaaggcgcgacaatttgtgttaatactctacgtgctaatacgttggcgaaagaggcgattctggcaggtaaaattcccgagcttgtaggctacaacacgctgaaaagcgaagtgaagtatggtgatgaaagcagccgtattgatattctgttacaagcagatgaccgacaaaactgctatattgaagtgaaatcggttacgttggcggaaaaggaatacggttatttccccgatgcggtcaccgagcgcggccagaagcacctgcgggagctgatgagcgtggcggcggcgggcgatcgggcggtgatactgttcgcggtgcttcattccgcgatcgaccgtttctctcccgcgcatcatattgatgccagatacgcacagctattgattgaggcgcaaaacaagggggtggaaattctcgcgtacaaggcggaactttctaccgagatgatgactctgaataagccaattaccgtggtgttaacccccggtaaataa

SEQ ID NO: 172537 - DNA, 456 bp, Klebsiella oxytoca
atgcaagaagggcaaaaccgtaaaacatcgtccctgagtattctctccatcgctggggtggagccgtaccaagtgaagccgggcgaagagtatatgaacgaagcccagctggcgcacttcaagcgcattcttgaagcgtggcgtaatcaacttagggatgaagtggatcgcaccgtaacgcatatgcaggatgaagctgctaacttcccggacccggtagaccgtgccgctcaggaagaagagttcagcctggagctgcgtaaccgcgaccgcgaacgtaaactgatcaaaaagatcgagaaaacgctgaaaaaagtcgaagacgaagatttcggcttctgtgaatcttgtggcgtcgagattggtatccgtcgtctggaagcgcgcccgaccgccgacctgtgcattgattgcaaaacgctggcggaaattcgcgaaaaacagatggcaggctaa

SEQ ID NO: 172538 - DNA, 882 bp, Klebsiella oxytoca
atgaaagattcacactatatcgggcgctttgccccctcaccctccggtgaactccacttcggctcattaattgccgcgcttggcagctatctgcaggctcgggcgcagaacggtatctggcgcgtgcgcattgaagatatcgatccgccgcgtgaagtccccggcgccgctgaaactatccttcgtcaattagaccactacggcctgcactgggacggagaggtactctggcagtcaaaacgtcacgaagcctatcgcgagcgcctggcctggctgcgcgagcagggcctctgctactactgcacctgcacccgcgcgcgtatccacggtatgggcggcatctacgacggtcactgccgggatttacgcctcggcgcggaaaacgccgctctgcgtctgcggcaaactcgtccagtccttgaattttatgaccagctgcgcggcaccatcgttgccgacgagccgctggcgcgcgaagattttattatccatcgccgcgatgggctgttcgcctataatctggcggtggtggtggacgatcattttcagggcgtcagcgaaatcgtccgcggcgccgatcttatcgaaccaacggtacggcagatttctctctatcagcattttggctggcaggcgccggattatatccatttaccgctggccctcaacgcgcagggcaataaactgtcgaagcaaaaccacgctccggcgctgtctgagggcgacccgcggccagaaattgtgcgggcgctaacgtttcttaatcaggatgtcattcaggaatggcagacgctgagcattgaggatttactcaagtacgcgatagcgaactggcggccggaacaaatccagcattctcaaatgcgttccgctgagctatga

SEQ ID NO: 172539 - DNA, 1365 bp, Klebsiella oxytoca
gtgctaagccgtgaagagcgcgaggcagaagccgccgtcgaacaactacatatgacggttatcccgcgtgagcagcatgcaatttcccgcaaagatatcagtgaaaatgccctcaaggtcatgtacagactcaacaaggcgggctacgaatcgtggctggtcggcggcggcgtacgcgacctgctgctgggcaaaaaacccaaagattttgacgtcaccaccaacgcgaccccggaacaggtgcgtaagctgttccgcaactgccgtctggtcggccgtcgcttccgcctggcgcacgtgatgttcgggccggaaattatcgaagtcgcgaccttccgcggtcatcatgaaggccacaccaccgatcgcatcacctcccagcgcggccagaacggcatgctgctgcgcgacaacatcttcggttcgattgaagaagacgcccagcgtcgcgactttaccatcaacagcctctattacagcgtggcggattttaccgtccgcgactacgtcggcggcatgaaagatctgcaggatggcgttatccgcctgatcggcgatccggagacccgctatcgtgaagatccggtgcggatgctgcgcgcggtacggtttgcggcgaagctcggcatgagcatcagcgaagagaccgccgagccgatcccacgcctggcgacgctgctgcacgatgtaccgccggcgcgtctgtttgaagaagtcctgaagctgctgcaggccggcgacggatatcaaacctatatcctgctgcgcgaatataatctgttccagccgctgttcccgaccattacccgctacttcaccgagcgcggcgatagtccgatggagcgtatcatcagccaggtgctgaagaataccgataaccgtattcgcaacgacatgcgcgttaatccggcgttcctgttcgcggtgatgttctggtacccgctgctggaaaccgcgcagaaaatcgctcaggagagcgggctggcctactacgatgccttcgcgctggcgatgaacgacgtgctggacgaagcctgccgtacgctggcgatcccgaaacgcatcaccactctggtgcgcgatatctggcagcttcagctgcggatgtcccgccgtcagggcaaacgcgcgtggaagctgatggagcatccaaaattccgcgccgcatacgatctgctggagctgcgcgccggcgccgagaacaatggcgaactgcagcgcctgaccaaatggtggggcgagttccaggtcgctgcgccgccggctcagaaaaatatgctggatgatttgggtgacgatccggctccacgtcgtcgcaaccgccgtccgcgtaaacgcgcgccgcgtcgcgaaggtagcgcatga

SEQ ID NO: 172540 - DNA, 480 bp, Klebsiella oxytoca
atgacgcttgcttatatcgctatcggcagcaatctggcctctccgctggagcaggttaacgctgccgtcaacgcgctggcggagattcctgacagccgggtgataagcgtttcctctttctaccgtacaccgccgctggggccgcaggatcagcctgactacctcaacgccgccgtggcgctggaaacctctctcgccccagaggcgctgctcgaccacactcagcgcatcgagctgcagcagggccgtacccgtaaagctgaacgctggggcccccgcacgctggatctcgatatcatgctgttcggcgaggaagtgttgaatactccgcgcctgaccgtgccgcactacgatatgaaaaaccgcggctttatgctgtggccgctgtttgaaattgcgcctgagctacgtttccccgacggtttggcattgcgcgatgttctggccactctcggcgcagaaaaacccgctagctggtaa

SEQ ID NO: 172541 - DNA, 792 bp, Klebsiella oxytoca
atgaaaccgaccactatcgccctgctgcagaaatgcaaacaggagaagaaacgcttcgccactatcaccgcctatgactacagctttgcaaagctgtttgccgatgagggtatcaacgtgatgctggtcggcgattcgctgggcatgacggtacagggccacgactccaccctgccggtgaccgtagaagatatcgcctaccatacccgcgcggtgcgccggggcgcgccaaactgcctgctgctcgccgatctgccgtttatggcttacgccacgccggaacaaaccttcgagaacgccgccatcgtgatgcgcgcgggggccaatatggtcaaaatcgagggcggcgcatggctggcggatacggtgaaaatgctcgccgagcgcgcggtacccgtatgcggacacctcgggctgactccccagtcggtgaacgtcttcggcggttataaaattcaggggcgcggcgatgccgggcaagttctgctggatgatgcgctggcgttagaagcggcgggcgcacagctgctggtcctggagtgcgtgccggtcgagctggcgaaacgcgtcaccgaggcgctcaccatcccggtaatcggcatcggcgcgggcaacgtcaccgatggacagatcctcgtgatgcatgatgcctttggtatcaccggtggtcacattcccaaatttgccaaaaatttcctgagcacagcgggcgacatgcgcgccgcggtacggcaatatgttgccgaagtggagtccggtgaatatccgggcgaagaacacagtttccattaa

SEQ ID NO: 172542 - DNA, 855 bp, Klebsiella oxytoca
gtgctgattattgaaaccctgccgctgctgcgccagcatattcgccgtttacgtcaggaaggcaagcgcattgcgctggttcccaccatgggcaacctgcacgatggtcatatgaagctggtcgatgcggcaaaagccagcgcggatgtggtggtagccagtattttcgtcaatccgatgcagtttgaccgcccggacgatctggcgcgctatccgcgaaccctgcaggacgattgcgagaagctgaacaaacgcaaagtcgatttagtttttgcccctgcagcggcggaaatttatccgcacggcatcgaaaatcagacttacgtcgatgttccaggattgtcgacgatgctcgaaggcgccagccgtcctggtcacttccgcggcgtttcgaccatcgtcagcaagctgtttaacctggtacagccggatgtcgcctgcttcggcgaaaaagatttccagcagctggcgctcatccgcaagatggtggccgatatgggctatgacatcgagattatcggcgtgccgattatgcgcgctaaagatgggctggcgctgagctcgcgcaacggttatctcagcgctgagcagcgcaaaattgcgccgggactgcataaggtgatgaatagcgtggcggagaaactggcggccggcgaacgtaatcttgacgaggttatcgcgattgccgctcaggagctgaacgaaaaaggcttccgcgccgatgatattcagatccgcgatgccgatacgctgctcgacctgacggaaaccagtaagcgagcggtgatcctgatggcggcctggctcggcgaagcgcgtttgatcgacaatcagatcgtcgcactcgctggctag

SEQ ID NO: 172543 - DNA, 381 bp, Klebsiella oxytoca
atgattcgtaatatgctgcagggcaaactccaccgcgttaaagtcacgcaggccgacctgcactatgaaggctcctgcgctattgatcaggatttcctcgatgcgtccggcatccttgaaaacgaggctattcatatctggaacgtgaccaacggtaatcgtttcaccacctacgccatcgccgcagagcgcgggtcgcgaattatctccgttaacggcgcggcggcacactgcgccaacgtcggcgatattttgattatcgccagtttcgtcaccatgcctgatgaagaagcccgcacctggcagccgaaagtcgcctatttcgagggcgaaaacgaaatgaagcgccaggcaaaagccattccggtacaggttgcctga

SEQ ID NO: 172544 - DNA, 1248 bp, Klebsiella oxytoca
atgcttgcccgaatgtttgttttactccttctgcttacggcgtgcagcgcttccgccagcctgttaagccagcagggcacccccgcgcgctatatgcaaacgaccgaagatgcggatatctgggcgcaggttggcaaccaggtagtgagcgtcggcaacgtacgggcagggcaaatactggcggtagtgccgaccgcagccgattactacgagtttaattttggctttgcgaccggctttatcgataaaggccacctagggccagtgcagggcaagcagcgggttgaggatagcctcggcgacctgcataagcctctgagcaaccagaatctcattacctggaaagatacgcccgtctatgatggcccctccgctggcagcgcgccgttcggcaccctggcgaataatttgcgctatccgattatcagcaagctccgggatcggttgaatcaaacctggtttcagatacgcatcggtaaccgcctggcgtgggtgagcagtctggatgcgcaggaagataacggcatccccatactcacttatcaccatattctgcgtgacgaagaaaacacccggtttcgtcatacctcgaccacgacttccgttcgcgccttcagcaaccagatgacctggctacgcgaccagggctatgccacgctgagcatgtatcaactggaaggttatctgcgtaataaagtgaatcttccggcgcgttcggtggtgatcacttttgacgatggtctgaaatcggtcaaccgctatgcgtacccgattcttaagcaatatggctttcacgctacggcttttattatttcatcgcgcatcaagcgccatccgcagaaatgggcgccgaactcgctgcagtttatgagcatttccgagttaaaacagattcatgatgtcttcgacgtgcagtcgcatacccatttcctgcatcgggttgatgcccggcgtcatccgattctgctcagccgcagctatcacaatattctgtttgattttgaacattcgcggcgggcgctggcgcagtttaatccccatgtgctctatctttcttatccgtttggcggctataacgctaaggcggttcaggcggcgaacgacgccggttttcatctggcggtgactaccgtgagaggtaaggtaaagccgggcgacaatccgttcttattaaaaaggctatatattctcagaacggattcgctggagacgatgtcgcggctgataagcaatcagccgcaggggtag

SEQ ID NO: 172545 - DNA, 441 bp, Klebsiella oxytoca
atgttaggttgggtgattacctgtcatgatgagctggcgcaggagatgctggatcgtctggagaaaaagtttgggccgttgacgcagtgccgggcggtcaactactggcgcaatctcagcagcaacatgctgagccgtatgatgtgcgatgcgctacatgagacggacagcggcgaaggcgttattttcctgaccgataaatccggcgcggcgccttatcgcgtggcggcgctgatgagccataagcacacccactgtgaagtgatttccgggatcgactattcattactggaaagtatgtatttgctgcgacagagcctgagcagcgaagccttccgacacgccattgtcagcgccggaggcccggcggtgagcagtctctggcatcagcagcaaaagaatccacccttccggctgctgcatgagccgtacgggaattaa

SEQ ID NO: 172546 - DNA, 771 bp, Klebsiella oxytoca
atgatgcagctttattgggtcgcgctgaaaagcatctggaccaaagagatccatcggtttatgcgtatctgggtccagacgctggtgccgccggtgataaccatgaccctctactttgtcatttttggcaatctgatcggttcgcgcatcggtgagatgcacggttttacctatatgcagtttatcgtgccgggtctgatcatgatggcggtgatcaccaacgcctatgccaacgtggcgtcctctttcttcagcgccaaattccagcgcaatattgaagaactgctggtcgcgccggtccccacgcacgtggtgatcgccggctatgtgggcggcggagttgcccgcggtctgtgcgtcgggattctggtgacggcgatttcgctattttttgttccgttccaggtccactcgtgggtatttgtcgctctgaccctgatactgaccgccgtgctattctcgctggccggcctgctgaacgcggtgtttgctaaaacctttgacgatatcagccttattccgaccttcgtgctgacgccgttgacctacctcggcggggttttttattccctgaccctgctgccgcccttctggcaagggctgtcgcatctcaatccgatcgtctatatgatcagcggcttccgctacggcttcctcggaattaacgatgttccgctggcgacgaccttcggcgtgctggtcgtgtttatcgtcgcgttttatctcctgtgctggtatctgatccagcgcggacgcgggctgcgcagctaa

SEQ ID NO: 172547 - DNA, 927 bp, Klebsiella oxytoca
atgaccattgctctggaactaaaacagctcaagaaaacctaccccggtggagttcaggcgctgcgcggaatcgatctgcaggtcgaagcgggcgatttttacgcgctcctggggcctaacggcgcggggaaatcgaccactatcggcatcatcagttcgctggtaaataaaacctccggcgaggtgaatgtttttggctacgatctgcaaaaggatgtggtgaacgccaaacgccagctcggtctggtgccgcaggagttcaacttcaacccgtttgaaaccgtgcagcagattgtggtcaaccaggcgggctactacggcgttgagcgcaaagaagcgattgtccgcagtgaaaagtacctcaaacagctcgacctatgggaaaagcgcaacgagcgcgcgcggatgctctccggcggcatgaagcgccgtctgatgatcgcccgcgcgttgatgcatgaaccgaagctgctgatcctcgatgagcccacggcgggagtggatattgagcttcgtcgctcaatgtggggattcctgaaagatctcaacgataaaggcacgacgattatcctgactacccactatctggaagaggccgaaatgctgtgccgcaatatcggcattattcagcgcggcgagctggtggaaaacacatcgatgaaagcgctgctggccaagctgaaatcagaaacttttattctcgacctggctcccaaaagcccgctgccggtgctggaaggctatcagtatcgtctggtcgatacgtcgactctggaggtagaagtgctgcgcgagcaggggattaacagcgtgttcactcagctgagcgcgcagggaatacaggtattaagtatgcgtaataaagcaaaccggcttgaagagctgtttgtcacgctggtgcatgaccggaaaggagaatcagcatga

SEQ ID NO: 172548 - DNA, 663 bp, Klebsiella oxytoca
atgaacgatatagatacactcatcagcaacaatgcactatggtcaaaaatgctggtggaggaagaccccggtttctttgagaagctggcacaagcgcaaaaaccgcgctttctgtggattggatgttccgatagccgcgtccccgccgaacgtttgaccggcctggaacccggcgagctgtttgtacaccgtaacgttgcaaacctggtgattcataccgacctgaactgtctttccgtggtgcagtacgcggttgatgtactggaagtcgagcacatcatcatctgcggccactacggctgcggcggcgtgcaggcggcaattgaaaataccgagcttggcctgatcgacaactggctgctgcatatccgcgatatctggtttaagcacagctcattactgggtgagatgcccgaagagcgtcgccttgatacgctgtgtgaattgaatgtgatggagcaggtttacaacctgggtcactcaacgattatgcagtcggcgtggaagcgcggacagaaagtgaccatccacggctgggcttacggcattcacgacggcatgttacgcgaccttgacgtgaccgccgtcagccgcgaaacgctggaacagcgctatcgccagggtatttccaaccttaaaagcaagcacgtcaatcacaagtaa

SEQ ID NO: 172549 - DNA, 570 bp, Klebsiella oxytoca
atgatttacattaagaatcaaatggttagttttatgaaacatactgtagaagtgatgatcccggaaactgagatcaaagcccgtattgctgagctcggtcgtcaaattaatgaacattaccaggatagcggcagcgaaatggtgctggtggggctattgcgcggttcatttatgtttatggccgacctgtgccgtgaagttcaggtaccccatgaagtcgatttcatgaccgcatccagctacggcagcggcatgtccaccacccgcgacgtcaaaatcctcaaagatctggatgaagacatccgcggtaaagatgtgctgatcgtggaagacatcattgactccggcaacacactgtcaaaagtgcgtgaaattcttagcctacgtgaacctaaatccctggcgatttgtaccctgctcgataagccaagccgtcgtgaagttaacgtgccggtagagttcgtcggttttgcgatcccggatgaattcgtcgtgggctacggcattgactatgctcagcgctaccgtcacctgccctatatcggcaaagtgaccctgctcgacgaataa

SEQ ID NO: 172550 - DNA, 2391 bp, Klebsiella oxytoca
atggcagaaacaaaatctcaacaatcacggctgctcgtgacgctgacggctctttttgcagcgttctgtggcctctatcttttagcgggcggagcctggctggtcgccctcggcggctcctggtactaccctatcgcaggtctggtgatgctgggcgtcaccgtcctcctgttccgcggtaagcgctctgcgctttggctctacgccgcgctgctgcttgccacgatgatttggggcgtctgggaggttggttttgacttctgggcgctgaccccacgcagcgacattctggtcttcttcggcatctggctgattcttccttttgtctggcgtcgcctgccgactccctccgctggcgccgttgccgggctggtcgtcgccctgctgattagcggcggcatcctcacctgggccggcttcaacgacccgcaggaagtcaacggtacgctgagagcggatgcaacgccagcagcgcctatttccgacgttgccgatggcgactggtcggcgtatggccgtaatcaggaaggacagcgttactcgccgctgaagcagatcaacgccgataacgtgaagaatctgaaagaagcctgggtcttccgtacaggcgatctcaagcagcctaacgatccgggcgaaattaccaacgaagttacgccgattaaagtgggcgacacgctctatctgtgtactgcccaccagcgcctgttcgcgcttgatgcggccaccggtaaagaaaaatggcatttcgatccgcagctcaacgccgatccctctttccagcacgtgacctgccgcggcgtttcatatcatgaagccagagcggacaatgcgccggcagatgtggttgccgactgcccgcgtcgtatcattctaccggtcaacgatggccgcctgttcgccatcaatgccgaaaccggtaagctgtgtgaatcctttgctaataaaggcattctcaatctgcaaaccaacatgcctgtcactacgccgggtatgtacgaaccaacttcaccgccgattattactgataaaacgatcgttatcgccggcgccgtgaccgataacttctcgacccgcgagccgtctggcgttatccgcggctttgatgtgaataccggtaagctgctgtgggcctttgatccgggtgcgaaagatcccaacgcgattccgagtgatgaacatcatttcacactgaattcacctaactcctgggcgccagcagcctatgacgcgaagctggatttggtctacctgcctatgggcgtgaccaccccggatatctggggcggcaaccgtacgccagaacaggaacgctatgccagctccatcgtggcgctaaacgccaccaccggtaaactggcgtggagctaccagaccgtgcaccacgatctgtgggatatggatatgccgtcgcagccgacgctggcggacatcgatgtcaacggtaaaaccgtaccggtaatttacgctccggcaaaaaccggtaatatttttgtcctcgatcgccgtaacggtgagctggttgtcccggcaccggaaaaaccggttccgcaaggggcggcgaaaggtgactacgtctcaaaaactcagcctttctccgatctgagcttccgcccgaaaaaagacctgagcggcgcggatatgtggggcgccaccatgtttgaccagctggtgtgccgggttatcttccatcagctgcgctatgaaggcatcttcaccccgccgtcagaacaaggaactctggtgttcccgggtaacctggggatgttcgaatggggcggtatctccgtcgatccgaaccgccaggtggcgattgctaacccaatggcgctgccgtttgtgtcaaaactgatcccgcgcggccccggcaacccgatggagcagccgaaagacgccaaaggttccggtactgaagccggtattcagccacagtacggcgttccctacggcgttacgctaaacccgttcctgtcaccgtttggtctgccttgcaaacagccggcctggggctatatctccgcgctggatttaaaaaccaacgaagtggtgtggaaaaaacgtatcggtaccccgcaggatagcctgccgttcccgatgccgattaaacttccgttcaccatgggtatgccgatgctgggcggccctatttctacggcaggcaatgtgctgtttatcggcgcgaccgcagataactacctgcgcgcgtacaatatgagcaacggtgaaaaattatggcaggcccgtctgccggcgggcggccaggcgacgccgatgacctatgaagtgaatggcaagcagtacgttgtcatctctgcgggcggtcacggttcgtttggcacgaagatgggcgactatatcgtcgcttacgctctgccggacgacgcgaagtaa

SEQ ID NO: 172551 - DNA, 525 bp, Klebsiella oxytoca
atggatatttaccgcaaagtgattgccgcatcgctggcgctatttgttacgctttccgcacatgccgggatgacgatggaacgcaaggacatacccgatttaaagcttagtgttgaaatccccgaggggctgacgccaatgtctgaagagatggcaaagctcaaatacccttctgaaaaccgtccacaggtcatttatggcgatgagaaaggcaaagcatcgctgggggttaccgcagggcgcaatccgttaccagcggagaagctcgatgcatttaaagagatgatgcttaagatgctggagagtttaaaaccgcaggccgaggccgttaccgttgatggtcataaggggtggttactcaccttctattcgcaggctgcggatacggaaattctcaatatgatgttaatcacatcgcaggataataaggcggtgcagatgacgtttaatatgaccaaagatttagttgaacagtatcaggaagcggcaaaagcctctttgctttccctgcagttcgcgaagtaa

SEQ ID NO: 172552 - DNA, 1605 bp, Klebsiella oxytoca
atgcaacgtcgtgaatttcttaaattaaccgctgcggtcagcgtagccagcgcattgccgctctggagccgcgcggttttggctgccggtcgtccctctttgcccgtgccggaactgctgatggctgacgcgcgcaatcgcatctccttaaccattcaggccggaaaaacgcagttcggctctcacctggcgacgacctggggctacaacagtagcctgctggggccggccctgcagcttaagcaaggcgaggcggcaaccatcgatattcataatcgtctggcggaggagactaccgtgcactggcacggtctggaggtttccggcgtcgttgacggtggccctcagggggtgattcccgcaggaggttcccgtaccgtgacgtttacgccaacgcagcgggcggcgacctgttggttccaccctcaccaacacggtaaaaccggcagacaggtggcgatggggctggccggtctggtgctcatttctgatgcagaaagtgaaaagctgctcttgccaaagcagtggggaatcgatgatgtgccggtgatcgtgcaggataagaaattcaccccggaaggccagattgactaccagctcgatatcatgagcgccgccgttggctggtttggcgatacgctgctgaccaacggcgcgctttatccggagcatgccgctcctcgcggctggctgcgtttgcgtctgcttaacggctgcaacgcgcgttctttgaatttctctaccagtgataagcggcccatgtacgtcgtggcaagcgatggcggtctgcttgctgagccggtaaaagttaacgagctgccggtgctgatgggggaacggtttgaagtgctggtggatacgacggacggtaaaccctttgatctgataacgctgccggtgagtcagatgggtatggctattacgccattcgataaaccgcagccagtattacgcgttcagccgctgacgattccggcttccggtaagctgccggatgtccttgccgccatgccagcgctaccttccttacaagggctaacccagcgtacgctgcagctctctatggatccgatgcttgatatgatgggcatgcaggcgctgatgcaaaaatacggcgatcaggcgatgtccggaatggaccacggcgcgatgatgaaccatggcgagatggggaatatgaacactatgaaccacggcgacatggaacatatgaatcatggcggcatgacgcagatgaagcacggtaataaggattttgatttccataacgctaaccgcatcaacgggaaagcatttgatatgaatgtccccatgtttgcggcggcgaaagggcagtatgagcggtgggtgatttccggtaagggcgacatgatgctgcatccgtttcatatccacggtacccagttccgtattttatctgaaaacggcaaggcgcctgcagcgcatcgcagcggctggaaagacaccgttcgggtggaaggcgcagtgagtgaagtactggtgaaatttgaccatgatgccccgaaggagtttgcctatatggcgcactgccatctgctggaacatgaagatacgggaatgatgttggcctttacgactgcctga

SEQ ID NO: 172553 - DNA, 360 bp, Klebsiella oxytoca
atggtagaaaaaatgaagacgcttttcagaacaatagtgcttggcagcctgcttactctctccgccaatagctatgcattaagcgagtccgaagcggaagatatggctgatttgacggcggtattcgtctttctgaagaacgattgcggttatcaaaatctgcctaacacgcagattcgtcgcgctctggtgttctttgctcagcagaaccagtgggatttaagcaactacgacagcttcaatatgaaagccctgggcgaggatagctatcgggatctcagcggaatcaaaattcctaccaccaaaaaatgtaaagcgctggctcgcgactcgctaagcctgctcgcctacgtgaaataa

SEQ ID NO: 172554 - DNA, 327 bp, Klebsiella oxytoca
atgaaacctttacctgacgcgacattaaatcaacagcaaactgaacagcagagaattgccgaggagcaagcgcgcattgagacttgccgtaaagcgctggagtcactgaaagaggtgaatccaaagcaggcagctaaattggggaatgagttcaccgccctgctcaacgccgcatctcaatataattctgtgcgcagcaaagttgcagagccaactaaacagggtatcgactccatgtaccagttcaaatcaatcaagctatgcgcggatattgaaaaggaactgatcgatagtctggttaaacgcggtgaaaatgttcagccatga

SEQ ID NO: 172555 - DNA, 1695 bp, Klebsiella oxytoca
atgaacggaaaaatagctattaacttcaattcgatatcgctggcagcagcgcttgtgctggcgctgtcgccatcacccgacgctcgcgcggaaaaagaggcgctgatacatgttacggcaaattcgaatagtgacgcgtcagggccggcattcttaaattacgctaaagagcagcaggctcagaaagatcgcgcgcctgcgaagtccgttgaagaaaaaaacgctattacgcaaacaacgaataaaaaaaacgaacagaaagtcactgaagtttcacgccaggctgcaataattgctcaaaaagataaaatcattcggcaacttcgacaacagctttcagcaaagccagctacggtttatgccgtacaggacaatcaaaaagatctgacggataaaattcgccagcttgagaaagcattaacggttgccgtagcagaaaaacaacgcttaatagacaaagagctctccgccgccgctgaaatgaaacagaaactggggcagctcaatgccacggaaaataaaattctgctacaggaaaaaaagctagcttctgcggaatcagcgaaacaaaagcttgaatcactgctaacggaagccgccgctgaaaagcaaacgctgttaaagaagctcgcggctgaggaaaaacaaccgcaagatatcgcctctaagcttgctgccgctgcatcagacaagcaagcgctcgctgcaaagctcgtcgccgcagaaaccgcacagcgggaactcaaaacaaaactggatgcgggagaaaccggccggcaagcgctggcggcgaaacttgctgccgcagtagcggaaaagcaggatttggcggtaaaactggcggccacgggggtagaaaaccgggcgctcacggcaaaactggactccttcaccatcagcaggcagcagtcagcgcctcaggaaaatgcggtcagcccgcaggcagatgaaaacaacgccctgctgcaggccagcgctgatgagataagccagctaaaggcccggcttgctgatgccgagacgaaatcaggtaaaaacccggcggctatcgatcttaccagagagcctcagcagcaggcttactctgtcggcgtatcgatgggcgaggaggcgctaaaagtgttgtccacccgcagttcacagggcataaaaatcagtaaagataccgttctgcagggcattctggattccttttcagggaaaatcgccctcgacgagaaagcgcgcaataaggctctgttcgatgtgtcgaaaaaggtctttcagcatctgcataagatagaacagcagatggttaacgaagggaaaaaataccaacaaaaattcgcgaaacaaaaaggtgtggtatttaaagatggggtatacagccgtatcgactatgccggcgaaggtaagatcctcgacagcgataccgtcaccgtaaccatcaaggagacgctaatcgatggaaccgttattaacgacatggaagcggaaggcaaagtctggtctcagaccctaaaatcctatcctcctgtcttcctcgggccaataaagcgcctggggaaccacggttctattacggtggttatccctcctgaactcgcctatggtagcgaaggccggccacccaaaatcccgcccggagcgaccatggtgtattcagtcagaatcgtagacgccagggcggcacaaccccaggctaaaaacccctga

SEQ ID NO: 172556 - DNA, 864 bp, Klebsiella oxytoca
gtggccgatagcaatctgtggcatgaaacgctgcacgaccattttggtcagtatttcagcgttgataacgtactgtatcatgagaaaaccgatcatcaagatttaatcatattcgaaaacgctgcctttggccgcgtgatggcgctggatggcgtagtgcaaaccaccgaacgtgatgagtttatctatcatgaaatgatgacccatgttcctttgatggcccacggccaggcgaaacatgtattaatcatcggcggcggcgatggcgcaatgctgcgcgaagtctcccgtcatcgcaacatcgaaaccatcaccatggttgaaattgacgcgggcgtagtttcattctgccgccagtatctccctaatcataatgctggcgcgtatgatgacccgcgctttacgctggttattgacgatggcgtcaattttgttaatcaaaccgcgcaaacgtttgacgtcattatctccgactgcaccgatcctatcggtcccggcgagagcctgttcacttccgccttttacgaaggctgcaaacgctgcctcaatccaggaggaatcttcgttgctcagaacggcgttagtttcctgcagcaggatgaagccgtcgatagccatcgtaagctcagccattactttggtgatgtaagcttctatcaggcggcgatcccaacctattacggcggcatcatgaccttcgcgtgggccacggacaatgaagccctgcgccatctttccagtgaaatcatccaggcccgttttcacaagtcaaacctgaagtgtcgctattacaacccggcaattcacgcggcggcatttgctttaccgcaatatttactggatgcgctatccaccgttaagtaa

SEQ ID NO: 172557 - DNA, 795 bp, Klebsiella oxytoca
ttgaaaaaattgaagctgcacggctttaacaatctgaccaaaagcctgagtttttgcatttatgatatctgctacgcaaaaacggcagaggagcgcgatggctacatcgcctatattgatgaactctataacgccaaccgcctgacggaaattttgtcggagacctgttcgattatcggcgccaatattcttaacattgcccgtcaggattatgaacctcagggcgccagcgtgactattctggtcagcgaagagccgatcgacccgcagctcatcgatcagacggaacacccgggcccgctaccggaaaccgtcgtggcgcatctcgataaaagccatatttgcgttcacacttacccggaaagccatcctgaaggcgggctgtgcaccttccgcgccgatattgaagtctcaacctgcggagtcatttcgccgctgaaagccctgaactatctgattcaccagcttgaatccgatatcgtcaccatcgattaccgcgttcgcggcttcacccgtgatgtgaacggtatgaagcacttcatcgatcatgaaatcaactccattcaaaacttcatgtccgaggatattaaatctttgtatgacatggtggacgtgaacgtttatcaggaaaatattttccataccaagatgttgctgaaggagttcgaccttaagcactacatgtttcacaccaggccggaagatttaacggaagaagagcgcagggtcatcaccgctcggctctggaaagagatgcgcgaaatttactacgcaagaaatattccggcggtgtaa

SEQ ID NO: 172558 - DNA, 363 bp, Klebsiella oxytoca
atggattacgaatttctgcgcgatattaccggagtggtaaaggtgcgaatgtcgatggaccatgaggcgctcggccactggttcaacgaggaggttaaaggcaaccttgccctgctggatgaagtagagcaggctgcgcgtaccattaaaggcagcgaacgttcctggcaacgtgccggccatgaatacacgctatggctggatggtgaagaagtgatgatccgcgctaatcagctggatttttccggcgatgagatagaagaggggatgagctactatgacgaagaaagcctctcgctctgcggcgttgaagattttttgcaggtcgttgctgcctaccgggagtttatgcagcagcgctaa

SEQ ID NO: 172559 - DNA, 2598 bp, Klebsiella oxytoca
gtgctagaagaataccgtaagcacgtagctgagcgtgccgccgaggggattgttgccaaacccttagatgcaacccaaatggccgcgctggtagaactgctgaaaaacccgcctgcgggtgaagaagaattcctgttagacctgttaattaaccgcgtaccgccaggcgtcgacgaagccgcctatgttaaagccggattccttgccgcgatcgctaaaggcgaagcgacctccccactggttacccctgaaaaagctatcgaactgctgggcaccatgcagggcggttacaatattcatcccctgattgacgcgctcgacgacgcaaagctggcgccgattgccgccaaagcgctgtcccacaccctgctgatgtttgataatttctacgacgtagaagagaaagccaaagcgggcaacgcatatgccaaacaggtgatgcaatcctgggcagacgctgagtggttcctgagccgtcctcagctggccgataaaatcaccgtgaccgtttttaaagtgaccggtgaaaccaatactgatgacctgtccccggctcctgatgcctggtctcgtccggatatcccgctgcacgcgctggcgatgctgaaaaacgcccgtgaaggtatcgacccggatcagcctggcgtcgttggcccgattaagcaaattgaagccctgcagcaaaaaggcttcccgctggcctacgttggtgatgtcgttggtaccggttcatcgcgtaaatccgccaccaactcggtgctgtggtttatgggcgacgatattccgaacgtgccgaacaaacgcggcggcggtctggttctcggcggcaaaattgcgcctatcttcttcaacaccatggaagatgctggcgcgctgccgattgaagttgacgtaaaccgtctgaatatgggcgacgtcatcgacgtttatccgttcaaaggcgaagtgcgtaaccacgaaaccggcgagctgctggcgaacttcgagctgaaaaccgacgtgctgatcgacgaagtccgcgccggtggccgtattccgctgattatcggtcgcggcctgaccaccaaagcgcgtgaagcgctgggtctgccgcacagcgatgttttccgtcaggcgaaagatgtagcggaaagcagccgcggatactcgctggcgcagaaaatggttggccgcgcctgcggcgttgccggcgtccgtccgggcgcttattgcgaaccgaagatgacctccgtaggctctcaggacaccactggcccaatgacccgtgatgagctgaaagacctggcatgcctgggcttctctgccgacctggtgatgcagtccttctgccacaccgctgcgtatccgaagccggttgacgtgacaacgcaccatacgctgccggacttcattatgaaccgcggtggcgtatcgctgcgtccgggcgatggcgttatccactcctggctgaaccgtatgctgctgccggataccgtgggcaccggcggtgactcgcatacccgtttcccgattggtatctctttcccggcaggctccggtctggtggcgtttgccgcagcaaccggcgttatgccgctggatatgccggaatcagtactggttcgctttaaaggcaaaatgcagccgggtatcactctgcgcgatctggtgcatgcgatcccgctgtacgcaatcaaacaaggtctgctgaccgttgagaagaaagggaagaaaaacatcttctctggccgcattctggaaattgaaggtctgccggatctgaaggtcgagcaggcgtttgaactgaccgatgcctccgccgagcgttctgctgccggctgtaccatcaagctgaacaaagagccgattgttgaatatctgacctccaatatcgtcctgctgaagtggatgatcgccgaaggttacggcgatcgtcgtacgctggagcgtcgcgttcagggcatggaaaaatggctggccgatccgcagctgctggaaggcgatgcggatgcagaatatgcggcggtgatcgagatcgatctggccgatatcaaagagcctatcctctgcgcgccgaacgatccagacgatgcgcgtctgctgtccgacgtgcagggtgagaagatcgatgaagtctttatcggttcctgcatgaccaacattggccacttccgcgcggccggtaagctgctggacagccacaaaggccaactgccgactcgcctgtgggtggcgccgccaacccgtatggatgctgcgcagctgactgaagaaggctactacagcgtgttcggtaagagcggtgcgcgtattgaaattcctggctgctccctgtgtatgggtaaccaggcgcgcgttgccgacggtgcgacggtggtttcaacctcaacccgtaacttcccgaaccgtttaggtaccggcgctaacgtcttcctggcttctgcggagctggcggccgttgcggcgctgattggtaagctaccgacaccggaagagtatcagacctacgttgctcaggtggataaaaccgcggcggatacctaccgctacctgaacttcgatcagctgggtcagtatactgagaaggctgatggggtgattttccagaccgcggtataa

SEQ ID NO: 172560 - DNA, 1593 bp, Klebsiella oxytoca
atgacgctgcctttcaaaccccacgtgctcgccctgctttgcagcgccgggctactcgccgccgcgggtacgctgtatgtaaaaagccgggaaccgcaaaccgctgccgagccccctgccgttacgcagacggctcaggcaaccgccgccgctcagccggtgactaccgccttaactcccgcgcagatagatcagtgggtcgcgccgattgcgctctatcccgacaatctactgtcacaggtgctaatggcttcgacttatccgggcaacgtcgtgcaggcggtgcagtggtcgcaggatcatccgacgatgaaaggcgattcggcggtacaggcggtggcaaatcagccctgggatcccagcgtaaaatcgctggtcgccttccccgctctgctggcgttaatgggggaaaacccgccatgggtggaaaacctggggaacgcatttcttgcccaacctcaggacgtaatggactcggtgcagcgcttacgcgccattgcccggcaaaccggaacgttaaaatccacgccgcagcagaaaatcattaccgccaccagctccgcggctccggcaacgtcaacgaccaccgcttcccgcagtagcagcgccgtcacctcctccgccccggcgccagtgattattaagatcgaatccaccgatccgaatgtcgtgtatgtgccggcctataatccctcggtggtttatggcgcctggcctgacgcggcctatccaccggtctacctgccgccgcctcccggcgagcagttcaccaatagctttgtaaaaggttttggttttagcctcggcgtcgccaccacctacgccttattcagcaatatcgactgggatgacaatgaccatcatcatgatgacgatcatcaccatcacgatgatgatcatcacgacggctactcgcacaacggcgatagcatccatatcaacgtgaataatttcaaccatatcaccgggcaaaacctgccggggaatcatgccagctggcagcataatcccacctggcgcggtaatattccgtacccaaacgacaacattgcgcagcaattccatcagaccactgttcccggtgggctgagcgcgacccgacatcagccagtcgatcgcaacgcacagcgtcaggctgcaatgactcagctgcagcagcgtaccggcccggcgtcagcagcaggtcactcgaacgcacatgcgccttaccgcgatgcccagcgtcaggccgcatcgcagcagctgcatctgctgacccagcgcaataactatcgcggctatgaccaggcgcaggcggttaatcatagcgccgtacaaccgcaacatcgggaagcgctaaaaacacaaatccagacttccacagggcagcagcagcgccgcgaacagttgcggaccgcaacgcccgaacaacgccagcagaagctaaatgacctccacgtcaatgccctcagcggtaacgacatccgctctcccgactggcagtcgcagcgggaacgcggcctgcagagccgtcatatctcaggtttaaacagcgagcagcgcagcgcggtcagagagcacttgtccgagcatcgtgaactgcgccatcgctga

SEQ ID NO: 172561 - DNA, 801 bp, Klebsiella oxytoca
atgaaaaaattattaaaaatgacgctgctggccctggccctggcgcccggcatggcgctagctcagcagcagttttcctcccctaatgaggccgcaagcgcgctggctgaggcaatcggcaggcatgatgaatctgctctcaacgagctgctcggcgatagctggcagcaatttttaccgccggatggcatcgaccctgacgccgtcgctcgctttcagcgtgactggaaggttggccaccgtatcgttctgcaggaaaataccgcctggctggaggtaggccggacagagtggcgtctgccgatacccatcatcaaagataacgatggctggcattttgatatggccgcggctgaagatgagattctcacgcgcgcaattggtcgtaatgaactgtcagccattcaggctatgcacgcttacgttgacgctcagcaggatttttatcaattaaaccacgcctgggcgcagaagattatcagcagcgacggcaagaaagatgggctctactggcccgtcgcgccgggagaggcatccagcccgttagggccagcctttagccccgttgaacccggtgagggctatcatggctatcgtttccgtattatcaaagatgggggcaatcatggcgtcgccctgctggcatggcccgcgacatgggggaaaaccggcatcatgagctttatggtcaaccaggatgatcgcgtttatcaggctaatttaggtgaagaaacgccgaacaaggcgcaggccatttctcagttttcacctgataatggctggcagaccatcgatcagtaa

SEQ ID NO: 172562 - DNA, 285 bp, Klebsiella oxytoca
atgaaaagatttttaacgacgacgctgttggccgcaaccttagtttcgggcatggcctgcgcagctgatgccgttatcccctgggctgataacagcggcggtactgaaagtacgcatattgcggctatgggccaggatttaaatatgcagcatcagcagatcacgaagactcgcgaaggcgtgtgggcggcgaattccggtagcataagcgctgacgaagcggcgctgagcagcactaaaccggcttttgcgggcgacccgtctctgatgccccatcagggctaa

SEQ ID NO: 172563 - DNA, 1425 bp, Klebsiella oxytoca
atgagtactgaaatcaaaactcaggtcgtggtacttggggcaggtcccgcaggttattctgctgccttccgttgcgctgatttaggtctggaaaccgtcatcgtagaacgttacagcaccctcggcggtgtttgcctgaacgtcggctgtatcccttctaaagcactgctgcacgttgcaaaagttatcgaagaagcgaaagcactggccgaacacggcatcgttttcggtgagccgaaaaccgacattgacaagattcgcacctggaaagaaaaagtcatcactcagctgaccggtggtctggctggcatggccaaaggtcgtaaagtgaaggtggttaacggtctgggtaaatttaccggcgctaacaccctggaagtggaaggcgaaaacggcaaaaccgtgatcaacttcgacaacgctatcatcgcggcgggttcccgtccgattgaactgccgttcattccgcatgaagatccgcgcgtatgggactccaccgatgcgctggagctgaaaaccgtaccaaaacgtctgctggttatgggcggcggtatcatcggtctggaaatgggcaccgtatatcacgcgctgggttcagagattgacgtggttgaaatgttcgaccaggttatcccggctgccgataaagacgtggtgaaagtcttcaccaagcgcatcagcaagaaattcaacctgatgctggaaactaaagttaccgccgttgaagcgaaagaagacggtatctacgtttccatggaaggcaaaaaagccccggcggaagcgcagcgttacgatgccgttctggtcgctatcggccgcgtgccgaacggtaaaaacctcgatgccggtaaagcaggcgttgaagttgacgagcgtggctttatccgcgtcgacaaacagctgcgcactaacgtgccgcacatcttcgcgatcggcgatatcgttggtcagccgatgctggcgcacaaaggcgttcacgaaggccacgttgccgcagaagttatcgccggtatgaagcactacttcgacccgaaagttatcccgtctatcgcttataccgaaccagaagttgcatgggttggtctgacagagaaagaagcgaaagagaaaggcatcagctatgaaaccgccaccttcccgtgggcggcttctggccgcgctatcgcttctgactgcgctgacggtatgaccaaactgattttcgacaaagaatctcatcgcgttatcggcggggcgattgtcggcaccaacggcggcgagctgctgggtgaaatcggtctggcgattgaaatgggctgtgacgctgaagacatcgcgctgactatccatgctcacccgactctgcacgagtccgttggcctggctgcggaagtctttgaaggtagcatcaccgacctgccgaacgcgaaagcgaagaaaaagtaa

SEQ ID NO: 172564 - DNA, 1893 bp, Klebsiella oxytoca
atggctatcgaaatcaaagtaccggacatcggggctgatgaagttgaaatcaccgagattctggtcaaagttggcgacaaagttgaagctgaacagtcgctgatcaccgtagaaggcgacaaagcctctatggaagtcccgtctccgcaggctggcgttgttaaagagattaaagtctccgtcggcgacaaaaccgagaccggtaaactgatcatgattttcgattccgccgatggtgcagcagccgctgcacctgcgcaggaagagaagaaagaagccgctccggccgccgctgcgcctgcagccgcgagcgcaaaagaagttcacgtaccggatatcggcggtgatgaagttgaagtcactgaaatcatggttaaagtgggcgacaccatcgccgctgaacagtcgctgatcaccgtagaaggcgataaagcctctatggaagttccggcgccgttcgcgggtaccgtgaaagagatcaagattaacaccggcgataaagtctcaaccggctccctgatcatgatcttcgaagtagcgggcgcagcgcctgccgcagctccggcaaaagcggaagccgctccggctgctgctgcaccggcagcttcgggttctaaagaagttcacgttccggatatcggcggtgatgaagttgaagtcactgaagtgatggttaaagtgggcgataagattgccgctgaacagtcgctgatcaccgtagaaggcgataaagcctctatggaagttccggcgccgtttgcgggcaccgtgaaagagatcaaaatcagcaccggcgacaaagtctcaaccggctccctgattatggtcttcgaagtggaaggcgcagcgcctgcagcggctccggctaagcaagaagccgctgcacctgcggcagctccggctcaggcggcgaaacctgctgcagctcctgctgctaaagcggaaggcaaatctgagttcgctgaaaacgacgcgtacgttcatgcaacgccgctgattcgtcgcctggcgcgcgagttcggcgtcaacctggcgaaagtgaaaggtacgggtcgcaaaggccgtatcctgcgcgaagacgttcaggcttacgtgaaagaagcggttaaacgcgctgaagctgcgcctgcggcaaccggtggcgggatcccgggcatgctgccgtggccgaaagtggacttcagcaagtttggtgaagtggaagaagttgaactgggccgcattcagaaaatctctggtgctaacctgagccgtaactgggtgatgatcccgcacgttactcacttcgacaaaaccgatatcaccgatctggaagcgttccgtaaacagcagaacgccgaagctgagaagcgtaaactggacgtgaaattcactccggttgtcttcatcatgaaagccgttgccgctgcgcttgagcaaatgccgcgcttcaacagctcgctctctgaagatggccagcgtctgacgctgaagaaatacatcaacattggtgtggcggttgataccccgaatggcctggtggttccggtctttaaagatgtgaacaagaagagcgtaaccgagctgtctcgtgaactgaccgtgatttctaagaaagcgcgtgatggtaagctgaccgctggcgaaatgcagggcggttgcttcactatctccagcatcggcggcctgggtaccacccacttcgcgccgatcgttaacgcgccggaagtggctatcctcggcgtgtccaagtccgcgatggagccggtgtggaatggtaaagagtttgttccgcgtctgatgatgccgatctctctgtccttcgatcaccgcgtgatcgacggtgctgatggtgcgcgctttatcaccatcatcaacaatatgctgagcgacattcgccgcctggtgatgtaa

SEQ ID NO: 172565 - DNA, 2664 bp, Klebsiella oxytoca
atgtcagaacgtttaccaaatgacgtggatccgatcgaaactcgcgactggctacaggcgatcgaatcggtcatccgtgaagaaggtgttgagcgcgctcagtatcttattgaccaactcctttctgaagcccgcaaaggcggggtgaaagtggctgctggcgcatcgaccggcggttacgtgaacactattgccgttgaagatgagccggaatacccgggtaatctggatctggaacgtcgtatccgttctgcgatccgctggaacgccatcatgaccgttctgcgcgcatcgaaaaaagatctcgaactgggcggccacatggcttctttccagtcttccgcaaccttctacgaagtgtgctttaaccacttcttccgcgcacgcaacgagcaggacggcggcgacctggtttacttccagggccacatctctccgggcgtctatgcgcgtgctttcctggaaggtcgtctgactgaagagcagatgaacaacttccgtcaggaagttcacggtaaaggtctgtcctcttacccgcacccgaaactgatgccggaattctggcagttcccgaccgtctctatgggtctgggcccaatcggtgcgatttatcaggctaaattcctgaaatatctggaacaccgcggcctgaaagacacctctaaacagaccgtttacgctttcctcggcgacggtgagatggacgagccggaatctaaaggcgcgatcaccatcgcaacccgtgagaagctggacaacctggtcttcgtaatcaactgtaacctgcagcgccttgacggtccggttaccggtaatggcaagatcattaacgaactggaaggcatctttggcggtgccggctggaacgttatcaaggttatctggggcggtcgctgggatgagctgctgcgtaaagataccagcggtaaactgatccaactgatggaagaaaccgttgacggcgattaccagaccttcaaatccaaagacggcgcttacgtgcgtgagcacttcttcggtaaatatccggagaccgcagcgctggttgccgactggactgacgagcagatctgggccctgaaccgcggcggtcacgatccgaagaaagtctatgctgcactgaaaaaagcgcaggaaaccaaaggcaaagctaccgtaatccttgcccataccatcaaaggttacggcatgggtgacaccgccgaaggtaaaaacatcgctcaccaggttaagaaaatgaacatggacggcgtacgctacgtccgcgatcgtttcaatgtgccggttgccgatgctgatatcgaaaaactgccgtatgtaaccttcccggaaggttccgaagagcacacttatctgcacgcccagcgtcagaaactgcacggctatctgccgagccgtcagacccacttcactgagaagctggagctgccgaccctggaagatttccgtccgctgctggaagagcagaacaaagagatctcgaccactatcgcgttcgtacgtgccctgaacgtgatgctgaagaacaaatccatcaaagaccgcctcgtgccgatcatcgccgatgaagcgcgtacctttggtatggaaggtctgttccgtcagattggtatctacagcccgaacggccagcagtacactccgcaggaccgtgagcaggttgcttactacaaagaagacgaaaaaggccagattctgcaggaaggtatcaacgaactgggtgccggcgcctcctggctggctgctgcgacttcttacagcaccaacaacctgccgatgatcccgttctacatctactactccatgttcgggttccagcgtatcggcgatctgtgctggcaggctggcgaccagcaggctcgcggcttcctgatcggcgggacttccggtcgtaccacgctgaacggcgaaggtctgcagcacgaagatggccacagccacattcagtctctgactatcccgaactgtatctcttacgatccgtcttacgcgtacgaagttgcggtcatcatgcaggatggtctggaacgtatgtacggtgaagcgcaagagaacgtttactactacatcaccacgctgaacgaaaactaccatatgccggcgatgccggaaggcgccgaggaaggtatccgtaaaggtatctataaactcgaaaccgttgcaggtagcaaaggtaaagttcagctgctgggctccggttctatcctgcgtcacgtgcgtgaagcagcgcagatcctggccaacgactacggcgtaggctctgacgtgtacagcgttacctccttcaccgaactggcgcgcgatggccaggactgtgaacgctggaacatgctgcacccgctggaaactccgcgcgttccgtacattgctcaggtgatgaacgacgctccggcagttgcgtctactgactatatgaaactgttcgctgagcaggttcgtacttacgtaccggctgatgattaccgcgtactgggtaccgacggcttcggtcgctctgacagccgtgaaaacctgcgtcaccacttcgaagttgatgcttcctacgtggtggtagcagcgctgggcgaactggctaaacgtggcgaaatcgataagaaagtggttgcggaagccatcactaaattcaacatcgatgcagataaagttaacccgcgtctggcgtaa

SEQ ID NO: 172566 - DNA, 780 bp, Klebsiella oxytoca
atggcctacagcaagatccgccaaccaaaactatccgatgtgatagagcagcagctggagtttttaatccttgaggggacgttgcgccccggtgaaaagctcccgcctgaacgtgaactggcaaaacagttcgacgtttcccgaccctcgctacgtgaggctattcaacgcctcgaagctaaggggttgttgcttcgtcgccaggggggcggaacgtttgtacaaagccgcctgtggcagagcttcagcgacccgctggtagagctactgtccgaccaccctgaatcccaatttgatctgctggaaacccgtcacgcgcttgaaggcattgccgcatattacgcagcgctgcgcagcaatgatgaagatcgtgaacgcattcgcgagctgcatcaggctatcgagcgggctcagcagtcgggcgatcttgatgctgaatccgatgccgtcgtccagtatcaaatagccgtcaccgaagcggcgcacaatgttgtgctgctccatctactacgctgtatggagccaatgctggctcagaacgttcgccagaattttgaattgttgtacgcccgccgggaaatgctcccgcaggtcagcaatcatcgcactcgaatttttgaggcgataatcgccggggagccggagcaggcgcgtgaagcctcgcatcgtcacctggcgttcatagaggaaattttgctggatcgtagccgtgagcagagccgtcgtgaacgctcactgcgtcgtttacagcaacgaaaggatgagaactccggttcttaa

SEQ ID NO: 172567 - DNA, 1368 bp, Klebsiella oxytoca
atggaaggtcaacagcatggcgatcggctaaagcgcggccttaaaaaccgccacattcagcttattgcgctgggaggcgctatcggtaccggtttgtttctgggtagtgcatccgtcatccaaaatgcaggtcccggtattattctgggctacgcaattgccggtttcattgccttcctgatcatgcgtcagctgggcgagatggtggtagaagagccggtagccggttcatttagtcatttcgcctataaatactggggcggctttgcgggctttgcttccggatggaactactgggttctctacgttctggtggccatggccgagctgaccgcggtcgggaaatacgttcagttctggtggccggaaattcccacctgggtttctgcggctattttctttatcgccatcaatgctatcaacctgactaacgtcaaggtgtttggcgaaatggagttctggttcgcgatcattaaagttgtcgccgttgtggcgatgatcctgttcggcggctggctgttgttcagcggcaacggcggtccgcaggctaccgtacgcaacctgtgggagcaaggcgggttcctgccgcacggcttcaccgggctggtgatgatgatggcgattattatgttctccttcggcggccttgagctggtgggtattaccgccgcagaagcagataacccggagcaaagtatcccgaaagcgaccaaccaggttatctaccgcattctgattttctatgtaggatcgctggccgttctgctctctctgctgccgtggagccgcgtgaccgccgataccagcccgttcgtccttatcttccacgaactgggcgataccttcgtcgctaatgccctgaatattgtggtattaaccgcagcgctttccgtttacaacagctgcgtatactgcaacagccgtatgctgttcggtctggcccagcaggggaacgcgccaaaagcgctgatgagcgtcgataaacgcggcgtgccggttaatacgatcctcgtttccgcgctggtcaccgcgctgtgcgtactgattaactacttcgcgccggaatccgcgtttggtctgctgatggcgctggtggtttctgcgctggtgatcaactgggcgatgattagcctggcgcacattaaattccgccgcgctaagcagcaacagggcgtggtcacccgcttcccggcgctgttttatccgttaggcaactggatctgcctgctatttatggtcggggtgctggttattatgctgatgactccggggatggcgatttccgtctatctgatcccggtgtggattgccgttctcggcgtcggttatctgttcaagcagaaaaccgccagcgccgttaaagcataa

SEQ ID NO: 172568 - DNA, 1407 bp, Klebsiella oxytoca
atgaatggcaataagctttcagttaaagagaaaataggctacggaatgggcgatgccggatgtaatattatcttcggcgccatcatgttgtttgttaactatttttatacggatatttttggtctcgcaccggcgctggtcggggtgcttctgctttccgtacgcgttattgatgccgtgaccgacccgattatgggggcaatggcagaccgtacccgcagcaaatatggccgttttcgcccgtggctcctgtggatcgccttcccgtacgcgctgttcagcgtcctgatgtttaccaccccggaatggacgtacaatagcaaggttatctatgctttcgtcacctacttcctgctctctctgacctacaccgcgatcaacatcccctactgctcattgggtagcgtgattacgaacgacccgcaggaacgcgtggcctgccagtcatatcgtttcgtattggtcggcatcgctaccctgttactctccctgacgctgctgccgatggcggactggttcggcggcgaggataaagccaaaggctatcagatggcgatgaccgtgctggcgattatcggtatgtgcatgttcctgttctgcttcgccaccgtccgtgaacgcgtaaaacccgcagtccagaccaacgacgagctgaaaaaagatctaaaagacgtctggaaaaacgaccagtggattcgcatcctgctgttaacgctgtgcaacgtctgtccgggctttatccgtatggctgcgaccatgtactacgtcacctgggttatgcagcaaagcacccacttcgccacgctgtttatcagcctcggggttgtcggaatgatgatcggcagtatgctggctaaagtcctgaccgaccgctggtgcaaactgcaggtgtttttctggaccaatatcgtcctggcgattttctcctgcgcgttctatttcttcgacccgcacgccaccatgatgattatggtgctctacttcctgctgaacattctgcaccagatcccgtcgccgctgcactggtcgctgatggccgacgttgatgactacggcgaatggaagaccggtaagcgcatcaccggcatcagcttctccggcaatctgttcttcctgaaagtcggcctggccatcgccggcgcgatggttggcttcttgctctcctggtacggttacgatgccggcgcgaagcagcaaagcgcttccgcgattaacggtatcgtattgctgttcagcgttatccccggcgtcggctatctgattaccgccggcgtggtgcgtatgctgaaggtaaaccgcgaatttatgcggcaaattcagtccgacctcgaaaaacgtcggattaactacagcgagctcaacgactatcaggaactgaaaaccggcgaacatgtaaggaaagcataa

SEQ ID NO: 172569 - DNA, 951 bp, Klebsiella oxytoca
atgaaaaactggccgaacccatttattgaacaacgcgcggacccttatattctgcgccatcaggatagctactactttatcgcctcggtaccggagtatgaccgtctggaaatccgacgctcagccacccttgaaggcttgcgcgacgcgcagccggtggtcgtctggcgtaagccggacaacggcccaatgagccagctcatatgggccccggagctgcataaaattaacggcaaatggtatatctactttgccgccagccacacgcacgatctggatgcgctgggtatgttccagcaccgcatgttcgcgctggaatgcgcggacagcgacccgttaaccggtaaatggcaggaaaaaggccagattaaaacgccgcttgatacctttgcgctggatgccacgactttccgccatcagggtaagcagtggtatctatgggcgcaaaaagatcctgaaattaaaggcaataccaacctctatctggctgaactggaaaatccgtggacgctaaaaggtcagccggtcatgctgagtcaacccgagttcgactgggagtgccgaggttttctggtgaacgaaggcccggcggtactgttccatggcgacaagctgttcgtcagctattccgccagcgccaccgacgaaaactactgcatgggcctactgtggatagacgtcagcgccgaccctctccgcccggaaaactggcataaagcgccgcagccggtatttcgtaccagctatgagaatcgtcagtatgggcccggccacaatagctttacgcaaacgccggagggagaagatgtgctggtgtaccatgcgcgcaactacaccgaaatcgaaggcgacccgctgtacgatccgaatcgccatacgcgcctgaagctgattcgctggcaagaaaacgggatgcctgattttggcatcccggcagcagagacgaattaa

SEQ ID NO: 172570 - DNA, 855 bp, Klebsiella oxytoca
atgacgttgttcactacgctgttagtacttatagccgagcgtttgtttaagcttggcgagcactggcagctcgatcaccggctggaagtgctgtttcgccgggttaagcattattccctgctgaccaccgtactgatgacggcagcggcggcggcggtcgtgtatgttattcagcgcctgctgcaagggcagctgtttaacgttcctttgctggtgttctggatcctgcttggtttgctgtgtattggcgcaggtaaagtgcgtttgcactatcacgcctatctgaaagccgcggcgcgcgacgatagccgcgcctgcgatgcgatggccagcgagctcaccctgatccacggcgtgccgcccggctgcgaccagcgtgaatatctgagcgagctgcaaaacgcgctgctgtggattaactaccgctactatctcgctccgctgttctggttcgttgtcggcggaccgtgggggccgctaactctggtggcctattgtacgctgcgggcctggcagacctggctggcgcgttatcagacgccgcgtcatcgcttacagtcggggattgacggcattttgcacgtagtcgactgggttccggtacgtctggtcggcgtggtctacgcgctgattggacacggggaaaaggctttgcctgcgtggtttgcttcgctgggcgaccgccactcttcgcagtatcaggtgctgacgcgcctggcgcagtattcgctggcacgcgagccgcatgtggataaagtggcaacgccgaaggcggcggtctcaatggcgaaaaaaacatcgctggtggtggtcgtgattatggcgctgctgacgatttacggtacgctgatttaa

SEQ ID NO: 172571 - DNA, 552 bp, Klebsiella oxytoca
atgcagttgaacgggggatggctggtagaagcgcgtcgggttccttcgccgcactacgatagccgcccggataatgaaaccccttcgttgctggtggtgcataatattagcctgccgccaggtgagtttggcgggccatggattgatgccctgttcagcgggacgctcgatccgaatgcgcaccctttttttgctgaaatagctcatcttcgcgtttcggcacactgtctgattcgccgcgatggtgaaatcgtgcagtatgtcccttttgataagcgtgcctggcacgcgggcgtttccagctaccgcggccgagaacgttgcaacgatttttccatcggtattgagctggaagggaccgatacgctggcctataccgacgcgcagtatcagcaactggttgcggttacccgtcagcttatcttgctttatccggcgatagctgaccatatcaccggccattgcgatattgcgcccgtgcgtaaaacggatcccggtccggcctttgactgggctaaatttcgcagtctgttaaccccgtcgtcagaataa

SEQ ID NO: 172572 - DNA, 894 bp, Klebsiella oxytoca
atgacgcctcgtcgctacaatcccgaccgccgccgtgacgcgctgctggagcgtattaatcttgatattaccgatgccgtggcccaatccctgcgggaagatttaggcggcgaagtggatgccaataatgacattagcgcccaattattgccgcaggacgcacgctcgcacgcggtagtgatcacccgtgaagacggcgtattttgtggtaaacgctgggtggaagaggtctttattcagcttgcgggcgatgatgttaacttcacctggcatgttgccgatggcgatgcggtaaaagccaaccagccgctgttcgagctggaaggcccttcgcgtattttgcttaccggcgaacgtaccgcgcttaatttcgtgcagacactctccggggtggcaagcgaagttcgtcgctatgtcgacctactggccggcactaaaactcagctgctcgatacacgcaaaacgctgcctggactgcgcacggcgctaaaatatgccgttctttgcggcggcggcgccaaccatcgtctgggtctctccgatgcctttctgattaaagagaaccatattatcgcttccggctcggtacggcaggcggtagaaaaagcgttctggctgcacccggatgttccggtagaagtcgaagttgaaaaccttgaagagctggatgaagcgctgaaagccggtgccgacattattatgctcgataacttcactaccgatatgatgcgcgaggcggtcaaactcaccaatggccaggcagcgctggaagtctccggcaacgtcacattcgacaccattcgtgaattcgctgaaaccggcgtcgattacatttccgtaggcgcattgaccaagcacgtccgcgctcttgatctctctatgcgtttccgctaa

SEQ ID NO: 172573 - DNA, 432 bp, Klebsiella oxytoca
atggacaaacaacgtggttttactttaatcgaactgatggtggtcatcggaatcatcgcgatactcagcgcaatcggcattccggcttatcagaactacctacgaaaagcagcgcttaccgatatgctgcaaaccttcgtccctttccgcaccgccattgagctttgcgcgcttgagcacggcggcataaccacctgcgatggcggcagcaacggtatcccttcgcccgcgactactcgctatgtctcggccatgaccgtggcggcaggcgttgtcacgctcaccggacaggaaagtctcaatggcttaagcgtcacgatgacgccgaactgggataacgctaacggcattaccggctggcagcgcgtgtgcaatattaccggtgatagcgcactcaagcaggcctgtgaagacgtgttccgttttaactga

SEQ ID NO: 172574 - DNA, 1386 bp, Klebsiella oxytoca
atgaaaactgaacaattaatacctctctgccagcgctatcacgccttgctgcttgacagcaatgaacacactatcgctatcgccgtggttgatgcccctgccccggagctgctggaggcgctacgttttgcgactcagaaaaggattgatatcgaatgctggagccaggatcggatggacaagcggctgcaggcaccgggaatagcaacgcttgccccgcctgtcgaagcgtcagccagcatcgttgaacaggtcaataatcttctggaacaagctctgcgccagcgcgcatcggatattcatatcgagccaggcgaacagcaactgagaattcgcctgcgggtagatggcgtactacattctctgacgccgctggccccggaacttgccgcacctattaccgcccggcttaaggtgctcggcaatctggatattgccgaacatcgaacgccgcaggacggccagttcacccttacgctctcagatcgtccgatctcgtttcggatcgctacgcttccctgccgtggaggagaaaaaatcgttctgcgcctgttacaccaggtcgagcagacgctggacctcgaagcgctggggctctcttcacaacagcttgccgcctttcgctcggcgcttaaccaacctcagggactgatactggtcaccggtccgacgggaagcggaaaaaccgtcactctttatagcgcgctgcaggcgcgaaatcgtgatgaggtcaacatctgtagcgtggaagatccgctggagatccccatcgtgggaatgaatcaaacgcagattaacccacgcgcggggctcacctttcacagcgtgctgcgcgccctgctacgtcaggatcccgatatcgttatggtgggagagatacgcgatgctgaaaccgcggaaattgcgataaaagcagcgcaaaccgggcatctggtactctcaacgttgcacaccaattcaacgtgtgaaacgctggttcgcctgcagcagatgggcgttgcgcgctggatggtctcatccgcgctctcgctggttgtcgctcaacgcctggtacggaaactgtgcccgcactgccgccgtgaaaccggcagttcgaccaacgtcccgcatagcctgtggccgcgatcgcttcctcagtggcaggctccgggctgccagcactgctatcacggctactacggtcgcctggcactcttcgaactgctgccggttaataccgcactgcggcaggcgattacccagggccttagcgctgaggaaatcgaaacgctggcgcgggaatccggcatgatgacgctatttgagagcggctgtctggctgtagagcgtgggatgacaagtctggaagaagtggtacgcgttttagggatcccgcatggcgactaa

SEQ ID NO: 172575 - DNA, 1206 bp, Klebsiella oxytoca
atggcgactaaacgactctggcgctggcacggtatcgatggtcaggggatgccctgtcagggaacgctctggcaggataatcgccctgaggcattgcaaagcctggagcgagagcgaatcatcccgcttacgctgcgccgctgtagtgtgcaaaagtccctctggcatccacgctacagcggtgaggttattcgccagctggccgcccttctccaggccggtcttccccttgctgaggggcttggactgctggcgcagcagcagcctaacgcgcagtggcaggcattgctgcaaaccctggctgaggatctggcgcaaggcatttcgctttcaggctcccttgaaaaatggcccgaagcttttcctccgctctatctggcaatgatccgcaccggagaacttaccggtaaactggagctatgctgcgcgcagttagctcatcagcagcgagaacagctactgcttagtgaaaaagtcaaaaaggccctgcgctatcctctgattattttgtccctggcgctactggtggtgatgggaatgctgtgctttgttttgccagagtttgctgccatttatcaaaccttcaataccccgctaccgctgctgacccgcgcggtcatgggcattggcgaagggttaactcactattggccattgctcgctgcgctgctcgttttacctgcgatactcaaccgactgatttgccagaggcccgactggctgctgtatcgtcagaaacttctccataagctgccggtgtttggcaaactgctgtgcggtcagcggcttagccagatatttaccgtactcgcattgacgcaaagcgccggtatcagctttctgcagggcctgcaaagcgtggaagaaaccctgagctgtccgctatggcgacaaaggctgcagcaggtttcccggcaaatcactcacggcgcgcccatctggcaggcgctcactgacagcggaggattcacgccgctctgtttgcaactgatacgtaccggtgaagcttcgggttcgctggataccatgctggaaaatctggctcgccattacagtgagcagacgcaacagcaggcggataacctggccaccttactggaaccgatgatgctggtcgttaccggaacgattgtcggcgtgctggtagtcgcgatgtatttacccatttttcatctgggcgacgccattagcgggatggggggatag

SEQ ID NO: 172576 - DNA, 1044 bp, Klebsiella oxytoca
atgcgtattgaagaagatctgaagcttggttttaaagacgttcttatccgcccgaaacgctctaccctcaaaagccgttctgacgtacagctggaacgtgaattcactttcaaacattctggccagacctggtctggtgtgccgatcattgccgccaacatggatacggtgggcacgtttgctatggccaaagcgctggcttcttttggcgttctgactgcagttcataagcattacagcgttgaacagtggcaggcgtttgttcagggcgtttctgcggatgtcctgcagcatgtcatggtctcaaccggcacttccgatgcggatttcgaaaaaacgaagcagatactgctgcagaacccgcagcttagctttgtgtgcattgatgtggcgaatggttactccgagcacttcgtgcagtttgtggccaaagctcgcgaagcctggccgcagaaaactattattgcgggtaacgttgtgaccggtgaaatgtgtgaagagctggttctttctggcgccgatattgtgaaggttggcattggtccggggtccgtatgtacgactcgcgtaaaaactggcgtcggatacccgcagctttccgccgtaattgaatgcgccgacgcggcgcacggcctgggcgggcagattatcagcgacggcggttgtactatgccgggcgatgtggctaaagcattcggcggcggcgcggatttcgtgatgcttggcggtatgctggccggtcacgaagaaagcggcggtaccgtagttgaagagaacggcgaaaaatttatgctgttctacggtatgagctccgagtcggcgatgacccgtcacgttggcggcgtagcgcagtatcgtgcggctgaaggcaaaaccgttaagctgcctctgcgcggcccggttgaaaataccgcgcgcgatatccttggcggcctgcgttccgcatgcacctacgttggtgcttcacgcctgaaagaattgactaaacgcacgacttttattcgcgtacaggaacaagagaaccgcgtgttcaacagcctgtaa

SEQ ID NO: 172577 - DNA, 621 bp, Klebsiella oxytoca
atgacgtacacggtggcgttaacaggcggcattggcagtggtaaaagtaccgtagccgatgcgttcgcacagctcggcgttaacgttattgatgctgacattatcgcgcgccaggtggtggagcccggtacaccggggctaagcgctattgctcaacgctttggtgcgcagatgctcaacgaagatggtaccctgaaccgtcgtgctctgcgcgagcatatttttgctcatgacgaggataagcgctggctaaacgcgctgctgcacccgcaaattcagcaggaaacgcgtcggcagatacagtttgccacctcgccttatattctctgggttgtacctctactggtcgaaaatggtttgtccgccaaagccgaccgcgtactggttgtcgatgtgccaaaagagacgcaaattgagcgtacgatgcttcgcgatcgggtcagtcggcaacatgcggaacatattcttgccgctcaggcgacgcgcgagcagcgccttgccgtagcggatgatgttattgaaaatatgggttcacctgatgtcatagcatcagctgtcgcccgcctgcatgcaaagtatcaacgtctggcatcgcaggccgcctcacaggaaaaaccgtaa

SEQ ID NO: 172578 - DNA, 744 bp, Klebsiella oxytoca
atgcatacccctgttctttttgaacatccgcttaatgaaaagatgcgcacctggctacgcattgagtttttacttcagcagttatccgttcatccggcgattaccactcatgcggatgcgctgcatttcttccgcaatatcggcgatcttttagatgttttagaacgcggtgaagtccgtaccgatctgatgaaagagctggatcgccaacagaggaaactgcaatcctgggcagaagtacctggggtcgatcaggatcgcatcaatgaattacgccagcagctaaaacaatccggcagcacattaatgtccgccccgcggatcggccagtatctgcgagaagaccgtctgatcgccctggtgcgccagcgcttaagcatcccaggtggctgctgtagctttgacctcccgacgctgcatatctggctgcatatgccgcaggcataccgcgatgagcaggtcggtaagtggttgaccagccttgaacctttaacgcaatccttgctgcttgttctcgatctcatccgcaactcggcacctttccgtaagcagaccagcctgaacggtttttatcaggacaacggcgaggacgccgacctgctgcgtctgcgcctggatcttgccagccagctctacccgcaaatttcaggtcataagagccgttttgccatccgctttatgccgctggacagcgagcacggtattgtgccggaacgttttgattttgaactggcctgctgttaa

SEQ ID NO: 172579 - DNA, 195 bp, Klebsiella oxytoca
atgtcagaagagataaccgttaattgtccaacctgcggcaaaattgtgatctggaatgagcagagtccacatcgtccgttctgctccaaacgctgtcagctcattgatttaggcgaatgggcggcggaagagaaacgcatcccgagcagcagcgatctgtcagatagcgatggctggagtgaggataaagagtaa

SEQ ID NO: 172580 - DNA, 393 bp, Klebsiella oxytoca
atgaaaacactacagatttccgtcggtattatccgcaatgcgcgaggcgaaattttcatcacccagcgagctgccgacgcgcatatggcgaataagcttgaatttcctggtgggaaaattgaagagggcgagtcgtcagagcaggccttagtgcgtgaactacaggaagaagtgggtattacagtgagagcttccagcctgttcgataagctggagtatcagtttcccgaccgtcatataacgctgtggttctggctggtggaaagctgggatggcgagccgtgggggaaagaggggcagccagggcgctggatagcgcaaagcgcgctcgtcgccgaagattttcctccggcaaatgaacccgtgatagcaaaactagcgggcgggaggtaa

SEQ ID NO: 172581 - DNA, 2706 bp, Klebsiella oxytoca
atgctaatcaaattattaactaaagtattcggtagccgtaacgaccgtacgctgcgtcgtatgcgcaaagccgtcaacgttatcaacgccatggaaccggccatggaaaaactttccgatgacgaactgaaagcgaaaaccgctgagttccgcgcgcgtctggaaaaaggtgaaagccttgagagcctgatcccggaagcctttgccgttgtacgtgaggccagtaagcgtgtcttcggtatgcgtcactttgacgttcagctgctgggcggcatggtcctcaacgagcgctgcattgcggaaatgcgcactggtgaaggtaaaaccctgaccgccaccttaccagcatatcttaatgcgctgaccggcaaaggtgttcacgtggtcaccgtcaacgactatctggcgcagcgtgatgcggagaacaaccgtccgctgtttgagttcctcggtatgagcgttgggattaacatgtctggcctgcctgcgccagccaagcgcgaagcctacgccgccgatattacttacggcaccaacaacgaatatggctttgactatctgcgcgacaacatggcgttcagccctgaagaacgcgtacagcgcaaactgcactatgcgctggtggatgaagtcgactccatcctcatcgatgaagcacgtactccgcttatcatttccggcccggctgaagacagttcggaaatgtataagaaagtgaacaaaatcatcccgcatctgatccgccaggaaaaagaagactccgagacctttaccggagaagggcatttctccgttgatgagaaagcgcgccaggtcaacctgaccgaacgcggcctggtgctgattgaagagctgctggtcaatgaaggcattatggatgaaggcgagtcgctgtactctccgaccaatatcatgctgatgcaccacgtgaccgcggcgctgcgcgcgcacgtgctgtttacccgtgatgttgactatatcgttaaagatggcgaagttatcatcgtcgacgagcataccggccgtacgatgcagggacgtcgctggtctgatggcctgcaccaggcggttgaagcgaaagaaggcgttgagattcaaaacgagaaccagacgctggcttcaattaccttccagaactatttccgcctgtacgagaagctggcagggatgaccggtaccgccgataccgaagcgtttgaatttagctcgatctacaagctggataccgttgtggttccgaccaaccgcccgatgattcgtaaagacatggcggatctggtttatatgaccgaagcggaaaaaattcaggccattatcgaagatattaaagagcgtaccgctgcgggtcagccggtgctggtgggtaccatttcaatcgaaaaatcagaagtggtctccaaagaattgacgaaagcgggcatcaagcacaacgtgctgaatgcgaaattccacgccagcgaagcggacatcgttgctcaggcgggctacccatcagcagtgaccattgcgaccaacatggcgggccgtggtactgatatcatgctcggcggtagctggcaggcggaagtcgcccagctggaagacccgacgccggaacagattgctcagatcaaagccgactggcaggttcgccacgatgcggtgttggccgccggcggcctgcatatcatcgggaccgagcgccatgaatctcgccgtatcgataaccagctgcgcggccgttcaggtcgtcagggggatgcgggttcttcccgtttctatctgtcgatggaagatgccctgatgcgtatcttcgcatctgaccgcgtgtccggcatgatgcgtaaactgggcatgaagccgggtgaggctatcgagcatccttgggtgaccaaggcgattgccaatgcccagcgtaaagtcgagagccgcaacttcgatatccgtaagcagctgctggaatatgatgacgtggccaacgaccagcgtcgcgctatttacacccagcgtaatgaactgctcgacgtgaccgacgtgagcgaaacgatcaacagcattcgtgaagacgtatttaaagccactatcgatgcccatattcctccgcagtcgctggaagaaatgtgggatgtggaaggactgcaggaacgtctgaaaaatgacttcgacctcgatctgccgctcaaagagtggctggataaagaaccggagctgcatgaagaaacgctgcgcgagcgcattctgcagagcgccattgaaacctatcagcgtaaggaagaagtggttggcgctgagatgatgcgtcacttcgaaaaaggcgtcatgctgcaaacgctggactcactgtggaaagagcacctggcggcgatggactacctgcgtcagggtatccatctgcgcggctatgcgcagaaagatccgaagcaggaatataagcgtgaatccttctctatgtttgctgcaatgctggaatcactaaaatacgaagtgatcagcacgctgagcaaagttcaggtgcggatgccggaagaggtggaggcgatggagcagcagcgtcgtgaagacgctgagcgtctggcgcagatgcaacagctgagccatcaggacgatgagagcgcagctgcggccgcgctggctgaacaaaccggcgagcgtaaagtgggccgtaacgatccttgtccgtgcggctctggtaaaaaatataagcagtgccacggtcgtctgagctaa

SEQ ID NO: 172582 - DNA, 510 bp, Klebsiella oxytoca
gtgagtggattgctgacgcgctggcgacagtttggcagaaggtatttctggccgcatctcctgttggggatggtcgcggctagccttggcctgcctgcgcttagcaacggccatgagcatgagaccgcgtcgccggcaaaaacaacttccagcaaccacaaccctgctaaagtcaatttttctcagctcgcgctactggagtcttccagtcgtcggccaaattttaccgttgattactggcatcagcatgccattcgtacggtcatccgccatctctcttttgcgatggcgccgcaggcgctgccggtagctgaggagtcttcaccgctccaggcgcagcatctcgcgctcctcgatacgcttagcgcgctgttgacgcaggagagtaaacctccggtcatcgttcacctggtggcatacaatcccaccttctcccaatgtgcgtttcgcgtctgtacctggataagccaggttacgggcatacgcgccgggcctcaacgtctcagctga

SEQ ID NO: 172583 - DNA, 918 bp, Klebsiella oxytoca
atgatcaaacaaaggactcttaaacgtatcgttcaggcgactggcgtcggtttgcataccggcaagaaagtcaccctgacgttacgccctgcgccggcaaataccggggtcatctatcgtcgcaccgacttgaatccaccggttgattttccggctgatgccaaatctgtgcgtgataccatgctctgtacttgcctggtcaacgagcatgacgtgcggatatcgacggttgagcaccttaatgctgccctggctggcttaggtatcgacaacattattattgaagtcgatgccccggaagtcccgattatggacggtagtgcggctccgttcgtttatctgttgctggatgccggcatcgatgaactgaactgcgctaagaaatttgtgcgtatcaaagagaccgttcgcgtcgaagatggcgataaatgggctgaattcaaaccgtataatggtttttcactggacttcaccattgattttaaccatccggcgattgactccagcagccagcgctacgcaatgaacttctcggccgatgcgtttatgcgccagattagccgtgcgcgtacctttggtttcatgcgcgatatcgaatatctgcagtcccgcggcctgtgcctgggcggcagcttcgattgtgccatcgttgttgacgattatcgcgtactgaacgaagacggtttgcgctttgaagacgaatttgtccgtcataaaatgctggatgcgattggcgacctgtttatgtgcggtcacaatattatcggtgcatttacggcgtacaagtccggtcatgcgttgaataacaaactgctgcaggctgttctggcaaaacaggaagcctgggagtatgtgaccttcgaggacgacgcagagatgccgctggcgttccgcgcgccgacactggttctggcataa

SEQ ID NO: 172584 - DNA, 1152 bp, Klebsiella oxytoca
atgtttgaacctatggaactgaccaacgacgcggtgattaaagtcatcggcgtcggtggcggcggcggtaacgccgttgagcacatggtgcgcgagcgcattgagggtgttgaatttttcgcggtgaacaccgacgcgcaggcactgcgcaaaacggctgttggccagactatccagatcggcagcggtattaccaaggggctgggcgcaggcgcaaacccggaagtgggtcgtaacgcagcggatgaagaccgtgaagcgctgcgtgctgctcttgatggcgccgacatggtgtttatcgcagcaggtatgggcggcgggaccggaaccggtgctgcgcccgtggttgctgaagtcgccaaagatttaggcatcctgaccgttgccgtcgtgactaagccgttcaattttgaaggcaagaagcgtatggcattcgccgagcagggtatcaccgagctgtccaagcacgtggattctctgatcaccattccgaacgataagctgctgaaagttctgggtcgcggtatttcgctgctcgacgctttcggtgcggctaacgacgtgctgaaaggcgcggtgcagggtatcgctgaactgattacgcgcccaggcctgatgaacgtcgactttgcggacgtacgtaccgtgatgtctgaaatgggctatgcgatgatgggctccggcgtagcgagcggtgaagaccgtgcggaagaagcggctgaaatggctatctcttccccgctgctggaagatatcgatctgtccggcgcccgcggcgtcctggttaacatcaccgctggcttcgatctgcgtctcgatgagttcgaaaccgtgggtaacacgatccgtgcatttgcttcggataacgcgaccgtggttatcggtacctctctggacccggatatgaacgacgaactgcgcgtaaccgtggttgccactggtatcggtatggacaaacgtccggaaattaccctggtcaccaacaagcaggttcagcagccggtgatggatcgttaccagcagcacggcatgtccccactgaatcaagagcagaaaccggtttcgaaagtggtaaacgacaatacgccgcaaaccgcaaaagagccggattatctggatattccagccttcctgcgtaagcaagccgattaa

SEQ ID NO: 172585 - DNA, 1257 bp, Klebsiella oxytoca
atgatcaaggcgacggacagaaaactggtagttggactggagattggcaccgctaaggttgccgctttagtaggggaagttctgcccgacggtatgattaatatcattggcgtgggcagttgcccatcgcgtggtatggataaaggcggagtgaacgacctggaatccgtggtgaaatgcgtacagcgcgccattgaccaggccgaactgatggcggattgccagatctcgtcagtctatctggcgctttcaggcaagcatatcagctgtcaaaatgaaattggtatggtgccgatttctgaagaagaagtcactcaggatgacgtcgagaacgtggtgcataccgccaaatcggttcgcgtgcgcgatgaacaccgcgttctgcacgttattccgcaagagtacgctattgactaccaggaggggataaaaaaccccgtcggcctgtctggcgtacgtatgcaggcaaaagtgcatttgattacctgccataacgatatggcgaaaaatattgtcaaagcggtggagcgctgcggtctgaaagttgaccagctcatcttcgccggtttagccgccagctattccgttttaacggaagatgaacgtgaactgggtgtctgcgtggtggatatcggcggtggtacaatggatatcgcggtgtataccggcggcgcgctgcgtcataccaaagtgatcccttatgcggggaacgttgtgaccagcgatattgcttacgctttcggtacgccgccgagcgatgccgaagccattaaagtgcgccacggctgcgcgctgggctccatcgttggtaaagatgaaaacgtcgaagtgccgagcgtgggtgggcgtccaccccgcagtctgcagcgtcagactctggcagaggttattgagccgcgttataccgaattgctcaacctcgtgaatgaagagattctgcaactgcaggaacagcttcgtcagcagggcgtcaagcatcatctggcggcagggattgtattaaccggcggtgcggcgcaaattgaagggcttgccgcctgtgcgcagcgcgtgtttcacacgcaggtgcgaattggcgcgccgctgaacattaccggattaacggattatgcccaagaaccgtattactcgacggcggttgggctgctgcactacgggaaggaatctcatctcagtggtgaagcagaagtggaaaaacgcgtaacggtcgggtcgtggatcaaacgactcaacagttggttgcgaaaagagttttaa

SEQ ID NO: 172586 - DNA, 834 bp, Klebsiella oxytoca
atgtcgcaggctgcgctgaatacgcggaaccacgaagaggaagaagaatcttcttcgcgtcgaagtaatggctctcgtctggcaggtattttcttcctgctggcggtgctctgtaccgtgctggtcagcggctggatggttctgggctggatggaagatgcacagcgattaccgctgtcgaagatggtcgtcaccggagagcgtcactacacgcgcaacgatgatatccgtcaggcgatactggcattggggtcgccgggcacctttatgactcaggacgtcaatattattcaaagccagattgaacgcctgccgtggattaagcaggcgagcgtcagaaagcaatggccggacgaattgaagattcatctggttgaatatgtgccgattgcgcgctggaatgatcagcatatggtagacgtcgaaggcaattctttcagcgtgccgtcagatcgcaccagtaaacagaatttaccgatgttatacggcccggaaggtagtgagagcgaagttcttcaggggtaccgtgacatggggcaggtgctggcaaaggataaattcacgttgaaagtggcggcaatgaccgcgcgtcgctcctggcaattgacgcttaataacgatattaagctcaatcttggccgaggcgacaccatgaaacggcttcagcgctttatggaactctacccggttcttcagcagcaggcgcagaccgacggcaaacggataagctacgttgatttgcgttatgactcgggagcggcagtcggttgggtaccggttcccgcagaggaaactaatcaacaacagaatcaggcacaggcagaacaacaatga

SEQ ID NO: 172587 - DNA, 921 bp, Klebsiella oxytoca
atggctgataaaatcgcggtcctctttggcggaacctccgctgaacgtgaagtctctctcaattcaggttctgcggtgctcgccggcctgcgtgaagccggcgttgatgcgcacccggtcgacccgcgcgacgttgatattacccaattgaaaaatatgggctttaagaaagcgtttattgccttgcatggtcgcggcggtgaagatggtacgttgcaggggctgctggagctgattcaacttccctacaccggtagcggggtgatggcttcagcgatctcaatggataagctgcgcagcaaattactgtggcagggcgccggactgccggttgcgccgtgggttgcgctaacccgtaaacagttcgaggcagggctttctgctgacgttgaacagcaactcctggcccttggactgccgctgattgttaagccgagccgggaaggctccagcgtcggtatgtcaaaagtcagcgaaagttgcgcattacaaaatgcattggcgctggcttttcagcatgatgatgaagttctgattgaaaaatggctcagtggcccggaatttaccgtcgctatggtcggagaagaaattttgccgtcaatacgtatccaggcggctggaaccttctatgattatgaagcaaagtatctctctgatgagacgcaatatttctgcccaggcttcgaagatcccgcgcgtgagtcagaaatccaggctctggtgcaaaaagcctgggatagccttggttgcaagggatggggaagaattgacgtgatgctggacagcgatggccagttttatctgctggaagctaacacctctcctggcatgaccagccacagcctggtgccgatggcggcgcgtcaggcagggatgagcttctcgcagcttgttgtacgaattctggacctggcggggtga

SEQ ID NO: 172588 - DNA, 1476 bp, Klebsiella oxytoca
atgaatacacaagatctggcaaaactgcgttccatagtgcccgagatgcgtcgcgtccggcacattcactttgttggcattggcggtgccggcatgggcggtattgccgaagttctggccaatgaaggttatcagattagcggctccgacctggcgccgaatccggtgacccaacagttgactcagcttggcgccacgatttatttcaaccatcgccctgaaaacgtgcgcgatgcgagcgttgtcgtggtttccagcgcgatttctgcggataacccggaaattgtcgccgctcacgaagcgcgtattccggttattcgtcgcgctgaaatgctggcggaactgatgcgttttcgccacggcattgccattgccggcacgcacggcaaaaccacaactacggcgatggtctcaagtatttatgcagaggctggacttgatccgaccttcgtgaacggtggtctggtgaaagccgctggcgtgcatgcgcgccttggacacagccgttacctgattgccgaagcggatgaaagcgacgcctcgttcctgcatttacagccgatggttgctatcgtgaccaatatcgaagccgatcatatggatacctaccacggcgacttcgaaaacctgaagcagacgtttatcaacttcctgcataacctgccgttctatggacgcgcggtgatgtgcgtggacgatccggtgattcgcgagctgctgccgcgcgttggtcgccagctcaccacctacggttttagcgatgatgctgacgttcgcgtggaagagtatcgtcaggtcggcgctcaggggcatttccgcctggtccgtcaggataaagacgtcattcaggtgacgctgaacgcaccgggtcgccacaacgcgcttaacgcagcggcagcggtggccgttgcgacggaagagggcattgatgatgaagcgatcctgcgcgcgctggaaagtttccagggtaccgggcgtcgttttgatttcctcggcgaatatccgttagctgaggttaacggtaaaacgggaaccgcgatgctgatcgatgattatggccaccatcctacggaagtggatgccactatcaaagcggcgcgagcgggctggccggataaaaatctggtgatgttgtttcagccgcaccgttttacccgtacgcgcgatctgtatgacgattttgccaacgtactgacccaggttgacgctctgctgatgctggacgtttattctgctggcgaagccgccattcctggcgctgatagccgctcgctgtgccgtacgattcgcggccgcgggaaagtggacccgattctggtttccgatccggcgcaagcggcagagatgctggcatcagtattgaccggcaacgatctggtgctggtgcagggggcgggaaatatcggtaaaatcgcccgtcacctggcggaaatcaaattgcaaccgcaaaaaacgcaggaggagcgccatggctga

SEQ ID NO: 172589 - DNA, 1047 bp, Klebsiella oxytoca
atggtgatggcgggcggtaccggaggacacgtgttcccggggctggcggttgcgcaccatttaatggaccagggctggcaggttcgctggctgggtaccgcggatcgtatggaagcggatttagtgccgaagaacggcattgaaattgacttcattcagatttccggcctgcgcggcaaaggcctgaaggcgcagctgctggcgccggttaggatattcaacgcctggcgccaggcgcgggcgattatgcagcgttttcaaccggacgtggtgctgggaatgggcggctatgtgtccggccccggcggactggcggcatggtcgctggggatcccggtggtcctgcatgaacagaacggaattgccggtctgacgaataagtggctggcgaaaattgccaaaaaagtgatgcaggcattccccggcgctttcccgcatgccgatgttgtgggcaacccggttcgcaccgatgtgctggcgctcccgctgccggaacagcgcttagtcgggcgtcaggggccaattcgcgtattggtcgtcggcggttcgcagggcgctcgcgtgctcaatcagacgatgccgcaggtggcggcgaagctgggctctactgtcaccatctggcaccagagcggtaaaggtgggcagggaaccgtacagcgggcctattccgatgccgggcagccgcagcacaaagtgaccgaatttattgacgacatggcggcggcttacgcctgggccgatgttgtcgtgtgtcgttccggggcgctgacggtgagcgaaattgccgccgctggtttaccggcgctgtttgtgcctttccagcacaaagatcgtcagcagtactggaatgccctgccgttagagaaggcaggagcagcgaagatccttgagcagccgcagtttaccgtggatgccgtcgcgcaaaccctggcgggctgggatcgcgaaacgctgctggatatggcggagcgagcgcgtagagcctcgattccggatgctaccgaacgggtagcagaagaagtgagcgccgcagcactggcgcgctaa

SEQ ID NO: 172590 - DNA, 1260 bp, Klebsiella oxytoca
atgcgtttatcactcccgcgcctgaaaatgccacggctaagactgccgcgtctgccgggaatgtttattttcgcatggctgttcgccgcgctgaaaggctgggtgatgggctcgcggcaaaaagataccgatagcctggtgatgtatgaccggatgctgctgtggctgacttttggcctggccgcaatcggcttcatcatggtgacctcggcgtcgatgccggtaggccagcgtctggcgaacgatccgtttctgtttgccaagcgcgatggcttatacattctgctggcgctagggctggcgatggtgacgctgcgcctgccaatggagttctggcagcgccacagtactgcaatgctgattgcttctatcgtcatgctgctgattgttctggtggtcggcagctcggttaacggggcctcgcgctggattgcgctggggccgctgcgtatccagcctgcggagttcaccaagctgtcgctgttctgctacatcgccaactaccttgtgcgtaaaggcgacgaagtgcgtaacaacctgcgcggcttcttaaagccgatgggcgtgattttcgtgctggcgattttactgctggcgcagcctgacctcggtaccgttgtggtgctgtttgtcacgactctggccatgctgttccttgcgggggccaagctgtggcagtttatcgcgattatcgggatggggctttcggcagtcgtactgctgattctggctgaaccgtaccgtattcgccgcgtgacctctttctggaacccgtgggaagatccattcggcagcggctaccagctcacccagtcgctgatggcctttggccgcggtgaaatgtgggggcagggcctgggtaactcggtccagaagctcgaatatttgcccgaggcgcacaccgatttcatcttcgccattatcggtgaagaactcggttatatcggtgtggtactcgcacttttaatggtattcttcgtcgcttttcgcgccatgtccattggccgcaaagcgctggagattgaccaccgtttctccggttttctggcctgcgccattgggatctggttcagctttcaggcgctggttaacgtcggcgcggcagcgggaatgctgccaactaaaggcctgacgctgccgctgatcagctacggtggctcgagcctgctgattatgtcgacggccatcatgttgctgttacgaattgattatgaaacgcgtctggaaaaagcccaggcgtttacacggggtgttcgatga

SEQ ID NO: 172591 - DNA, 1317 bp, Klebsiella oxytoca
atggcagattatcagggtaaaaaagtcgtcattattgggctgggtatgaccggcctgtcatgcgtggactttttcatggctcgcggcgtgacgccgcgggtgatggatacccgcgttgcgccggcggggctggataaactgccggaagctgttgagcgctatgttggcggtcttaatgaagactggctgttgacggcagacctgattgtcgccagtccgggtatcgctctggcgcatccttccctgagcgccgcggcagatgctggggtggaaattgtcggtgatatcgaactgttttgccgcgaggcgcaggcgcctgtcgttgcgatcaccggctctaacggtaaaagcaccgtgacttccctcgtgggagaaatggcgaaagcagcgggtatgaacgttggcgttgggggcaatattggcctgccggcgctgatgctgctggatcctgaacgcgaactctatgttctggagctttcaagcttccagctggaaactacctccagcctgcgggcggtagcggcgacgatcctgaacgtcaccgaagatcatatggaccgctatccgctggggcttcagcagtaccgcgccgccaaactgcgaatttacgagaatgcgcgggcctgtatcgtcaatgccgacgatgcgttaaccatgccggtacgcggcgcggacgagcgctgcatcagcttcggcgttgacgttggcgactatcacctgaaccgccagcagggcgaaacctggctgcgcgtcaaaggcgaaaaagtgcttaacgtcaaagagatgaagattagcggccagcacaactacagtaacgctcttgcggccctgtccctggctgacgccgcgggtttgccgcgcgccagcagcctgaaagcgctaaccacattcaccgggctggcgcatcgtttccaactggtgctggagcacaacggcgtgcgctggatcaacgattctaaagccaccaacgtcggcagtaccgaagcggcgctcaatgggctgcatcttgatggaacgctctatctgctgctgggcggagacgggaaatccgctgatttcacgccgttaagccgttacctgaccggcgacaacattcgcctgtactgcttcggacgcgacggcgcgcagctggcggcgctgcgcccggatgtcgctgtgcaaacggaaacgatggagcaggcgatgcgccagattgcgccgcaggttgtcccgggcgatatggtgctgctgtctcccgcgtgcgccagcctcgatcagtttaaaaactttgaacaacgcggcgacatctttgctcgcctcgcgaaggagttaggttga

SEQ ID NO: 172592 - DNA, 1083 bp, Klebsiella oxytoca
atgttagtatggctggccgaacatttggtcaaatattattcaggctttaacgtcttttcctacctgacgtttcgcgccattgtcagcctgctgaccgcgctgttcatctccctgtggatgggcccgcgcatgatcgcccgtctgcaaaaactctcctttggccaggttgtacgtaacgatggcccggaatctcactttagtaagcgcggtacgccaaccatgggcgggatcatgatcctgaccgccattgttgtctccgttctgctgtgggcttacccatccaacccctacgtctggtgcgtactgacggttctcgtcggctacggcatcatcggctttgtcgatgactatcgcaaagtggtgcgtaaagatactaaaggcctgattgcgcgctggaagtacttctggatgtcggtgattgcgctgggcgttgcctttgcgctgtatatggcgggtaaagatacgccggcgactcagctggtggtgccgttctttaaagacgtgatgccgcagctgggcctgttctacgtcctgctggcctattttgttatcgttgggaccggtaatgcggtcaacctgaccgacggcctcgatgggctggcgattatgccaaccgtattcgttgccgccggcttcgcgctggtggcctgggcgaccggtaacatgaacttcgccaactacctgcatatcccttatttgcgtcacgccggtgaactggtgatcgtctgtacggcgattgttggcgcgggcctgggcttcctgtggtttaacacctatccggcacaggtctttatgggcgatgtgggttcgctggcactcggcggcgcgctgggtattatcgccgtgctgctgcgccaggaattcctgctggtgattatgggtggcgtatttgtggtggaaacgctctcggtgattctgcaggtcggttccttcaagctgcgcggtcagcgcattttccgcatggcgccgattcaccatcactatgaactgaaaggctggccggaaccgcgcgttatcgtgcgtttctggattatttcgctgatgctggtgctgattggcctggcgacgctgaaggtacgttaa

SEQ ID NO: 172593 - DNA, 1359 bp, Klebsiella oxytoca
atgattcgcttgactctcagccagctcgccgacatcacgcgcggcgagctgcacggccgcgatgtggcgattgatgacgtcacctccgatacccgtaaagtcacggcgggctgcttgttcgtggcgctaaaaggcgagcgttttgatgctcacgattttgccgaacaggcgaaagctgccggcgcgggcgcgctgctggtcagtcgtcagctggcctgcgatttaccgcaggtagtggtgaaggatacgcgcctcgcgttcggcgaactggccgcatgggtgcgtcagcaggttccggcgcgcgtagtcgcgctgaccggatcttccggaaaaacatcggtcaaagagatgaccgcggcgattctgagccagtgcgggaatacgctgtataccgcaggtaacctgaacaacgatatcggcgtgccgatgacgctgctgcgcctcacccaggaacatgactacgcggtcatcgagttaggcgctaatcatcagggcgaaattgcctggaccgttagcctgacccgccccgaagccgcgttagtgaataacctggccgctgcccacctggaaggttttggctctctggaaggcgtggcgaaagctaaaggcgaaatttacaccggcctgccgctcaacggcatcgcgattatgaacgccgacaataatgactggctgaactggcaaagcgtaattggcgagcgtaaaacctggcgtttttcgccgaatgccgccaacagcgatttcacggcaaccaacgttcacgtgacgtcgcatgggactgaatttaccctgcaaaccccatcgggcagcgttgatgtcctgctaccgctcccggggcgccataacatcgctaatgcgctggccgcagcggcgctgtcaatggcggttggtgcgacgcatgaggcgatcaaagcgggtctgaaagatctgcaagcagtaccagggcgtttattcccgatccaactgaccgacagccagctcctgctggatgattcctataacgccaacgttggctcgctaaccgccgcggtacaggtgctgtctgagatgccgggctatcgggtactggtcgtcggcgatatggctgaactcggcgcggaaagcctggcgtgccatcgtcaggtgggcgaagcggcaaaagcggccgggctcgatcgcgtactgagcgtcggtacgctgagcgcagaaatcagcggcgccagcggagttggcgaacattttagcgagaaggccgcactggtgacccgcctgcgcgagcttaccgcagaacataaaattatgaccattttagtgaaaggttcacgtagtgccgccatggaagtggtagtacgcgcattacaggagaacggaacatgttag

SEQ ID NO: 172594 - DNA, 1488 bp, Klebsiella oxytoca
gtggcagatcgtaatttgcgcgaccttctcgctccgtgggtgccaaatgcgccggagcgaattctgcgagaaatgacgctggacagccgggtggctgcttctggcgatctttttgtcgcggttttaggtcatcaggcggacgggcgtcgttatatcccgcaggcgatagcgcaaggtgttgctgccattattgctgaggccaaagatgaggcccatgacggcgagatccgtgaaatgcacggggtgccggttatctatctcagccaactcaacgagcgcttatccgcgctggccgggcgtttttaccatcagccttcagaacaactgcgcctggtgggcgtcaccggaactaacggtaagaccaccacgacgcaactgctggcgcaatgggcgcagctgcttggcgaaaccagtgcggtaatgggaaccgtaggcaatggcctgctggggaaagttatcccaacggaaaacaccaccggttcggctgttgacgttcagcacgtcctttctggcctggcagggcagggggcaacgttcgccgcgatggaagtttcctctcacggcctggtgcagcaccgcgtcgccgcgctgcagtttgccgcgtcggtcttcaccaacctgagccgcgatcaccttgattaccacggtgatatggagcattacgaagcggcaaaatggctgctctactcaactcaccattgcggtcaggcgattgttaatgcggacgatgaagtcggtcgccgctggctggcgaaactgccggatgcggttgccgtatcgatggaagatcacattaacccgaactgccgtggccgctggctcaaagccactgcagtgaactatcacgacagcggtgcaaccgttcagtttgcttccagctggggtaacggcgagatagaaagccgcttgatgggcgcctttaatgtcagcaatctgttgctggcgttagccaccctgctggcgctgggttatccgcttgccgatctgctgaaaaccgccgcgcgcctgcagccggtatgcgggcgtatggaagtgttcgccgcgccgggtaaaccgaccgtggtcgttgattatgcccacacgcctgatgcgctggaaaaggcgctgcaggcggcgcgtttgcactgcagcggtaagctgtggtgcgtattcggctgcggcggggatcgcgacaaaggcaagcgtccgctaatgggcgctatcgccgaagagtttgccgatattgtggttgtcaccgacgacaacccgcgcactgaagagccgcgggcgattattaacgatattctggccggcatgctggacgcgggccatgccagagcggtggaggggcgtgcggaagcggtgacgaatgcagtgatgcaggcgaaagaaaacgacgtcgttctggtggcgggcaaaggccacgaggactatcaaatcgtcggcaatcgccggctcgattattctgaccgcgtcaccgtggcgcgtttgctggggacggtagcatga

SEQ ID NO: 172595 - DNA, 1767 bp, Klebsiella oxytoca
atgaaagcagcgccgaaaacgccaaaagcaaaacgtcaggaagaacaggccaactttatcagttggcgttttgcgttgctgtgcggctgtattctgctggcgctgggcttcctgctgggccgcgtggcctggctacaggtgattagcccggacatgctggtacgccagggcgatatgcgttctctgcgtgtgcaggaggtttctaccgcgcgcggaatgataaccgatcgttccggccgtccgctggcggtgagcgtaccggtaaaagcgatctgggctgacccgaaagagctgcatgaagcgggcggcgtcaccctggacaaccgctggaaggcgctggccgatgcgctgaatatgccgctggatcagctggcatcgcgcatcaataccaacccacggatgcgtttcatctacctggcgcgtcaggtgaaccccgatatggccgactacatccgtaaattgaagctgccggggattcacctgcgggaagagtcccgccgctactatccgtcgggcgaagtaaccgctcacctcattggcttcactaacgttgatagccaggggattgagggcgttgagaagagcttcgataagtggctcaccggccagcccggcgagcgtatcgtacgtaaagaccgctatggccgggtaatagaagatatttcgtccaccgatagccaggccgcgcataacctggcgctgagcatcgatgaacgcctccaggcgctggtttatcgcgaactgaacaatgcagtggcgttcaacaaggcggagtcaggcacagcggttctggtcgacgtcaacaccggcgaagtgctggcaatggctaacagtccttcgtacaacccgaataatttcgccggcacgtctaaagataccatgcgtaaccgcgccattaccgacgtgtttgagccgggttcaacggtgaagccgatggtggtgatgacggcccttcagcgcggcattgttaacgaaaataccgtgctgaataccattccttaccgaattaacggccacgaaatcaaagacgtggcgcgctacagcgaattgaccctgaccggggtgctacagaagtcgagtaacgtcggtgtttctaagctggcgttagcgatgccgtcctcagcgttagtagatacttactcacgttttgggcttggaaaagcgaccaatttggggttggtcggagaacgcagtggcttataccctcaaaaacaacggtggtctgacatagagagggccaccttttctttcggctatgggctaatggtaactccgttacagttagcgcgagtctacgcaacgatcggcagctacggcatctatcgcccgctgtcgattaccaaagttgatccaccggttccgggcgagcgcgtcttcccggaatcactcgttcgtaccgttgttcacatgatggaaagcgtggcgttgcccggcggcggcggcgtgaaggcggcgatcaaaggctatcgcatcgccattaaaaccggtacggcgaaaaaagtagggccggatggccgctacatcaacaaatatattgcttacaccgcaggcgttgcgcccgccagccatccgcgctttgcgctggtggtggtgatcaacgatccgcaggcgggcaaatactacggcggcgccgtttccgcgccggtcttcggtgccatcatgggcggcgtgctgcgtaccatgaacattgaaccggatgcgctggcaacggctgaaaaaagtgaattagtgattaatcaaggcgagggaacaggtggcagatcgtaa

SEQ ID NO: 172596 - DNA, 366 bp, Klebsiella oxytoca
atgatcggcagagtgacagaagccctaagcaaggttaaagggtcgataggaagcaacgagcgccatgctttgcctggcgtgatcggagacgaccttctgcggttcgggaagctgccactctgcctgttcatttgcatcattattacggcgattacggtggtgacaacggcgcaccatactcgcctcttaacggcgcagcgcgaacaactggttctggaacgcgacgcgctggatattgaatggcgcaacctgatcctcgaagaaaatgctctcggcgatcacagtcgggttgagcggatcgcgaccgagaagctgcagatgcagcacgtcgatccatcacaagaaaatatcgttgtacagaaataa

SEQ ID NO: 172597 - DNA, 942 bp, Klebsiella oxytoca
atgatggaaaattataaacacactacggtacttctggatgaagccgttaacggcctgaatattcgtcctgacggtatctacattgatggtaccttcggccgcggcggtcactcgcgtctgatcctctcccaactgggagcggagggacgcctgctggcgatagatcgtgacccacaggctatcgccgtcgcgaaaactatcgatgatccccgcttttccatcgttcatggtccattttctcagctggccgactatgtaggcgagcgcaacctgaccggcaagatcgacggtattttgctcgatcttggcgtctcctcgccgcagctggatgacgctgaacgcggcttttcttttatgcgtgatggcccgctggatatgcgtatggatccgacgcgcggccaatctgccgctgaatggctacaaaccgccgacgaagccgatatcgcctgggtcatcaaaacttttggtgaagagcgttttggtaaacgtattgcccgcgccatcgtcgaacgtaaccgcatcgaaccgatgacgcgcaccaaagagctggcggaggtcgttgcggcggcaacgccggtgaaagacaaattcaaacatcccgcgacccgtaccttccaggcggtgcgcatttgggtaaacagtgaactggaggagatagagcaggcgctaaaaagctcgctcagcgtgcttgccccgggcgggcggctctcaattattagtttccactcgctggaagaccgtattgtgaagcgttttatgcgcgagcaaagccgcggtccgcaggttccggctgggttaccgatgaccgaagagcagcttaaaaaactgggcggccgtgagctaagagcattaggcaagttgatgccgggtgaaaaagaggtagctgaaaatcctcgtgcccgtagttcagttctgcgtattgcagagaggacgaacgcatga

SEQ ID NO: 172598 - DNA, 459 bp, Klebsiella oxytoca
atgttccgtggggcaacgttagtcaatctcgacagtaaaggccgtttggccgtgccgacgcgctaccgcgacgggctgatcgaggacgcttccggtcaattggtgtgcaccattgacatccatcacccatgcctgctgctttaccctttgcctgagtgggaaatcatcgagcaaaaattatcgcgtttatcgagcatgaaccccaccgagcggcgcgtacagcgtttgcttttgggacatgccagcgaatgtcagatggatagcgccgggaggctattaatagccccggtgctgcggcaacatgccgggctgacaaaagaagtgatgctggtcgggcagttcaataagtttgagctgtgggatgaaacgacctggtatcaacgggtcaaggaagatatcgacgctgagcagtccgcttccggggaactgtcggagcgcctgcaggatttgtctttgtaa

SEQ ID NO: 172599 - DNA, 1005 bp, Klebsiella oxytoca
gtgaaactggatgaaatcgcccggctggccggcgtctcgcgaacgaccgctagctatgtgattaatggtaaagcgaagcagtatcgcgttagcgataaaactgttgagaaggtgatggcggtcgttcgtgagcacaactatcaccccaacgcggttgctgcaggcttgcgtgcaggacgtacgcgttctatcggtttggttatcccggatctggaaaacaccagctatacgcgcatcgctaattacctggagcgtcaggcgcgccagcgcggctatcagctattgatcgcttgctccgaggatcagccggataacgaaatgcgctgtattgagcatctgctgcagcgacaggtcgacgcgattatcgtttccacctcattaccgcctgaacatccgttctatcagcgctgggctaacgatcctttcccgattgtcgccctcgaccgcgctctcgatcgagaacacttcaccagcgtagttggcgccgatcaggatgatgccgaaatgcttggtgcggagctgcgtaagtttcccgctgaaacggtgctgtatctcggcgctttgccggagctttccgtgagcttcctgcgcgagcagggattccgtacggcgtggaaggacgatccccgagaggtacatttcctctatgcaaatagctatgagcgagaagccgcggcccagcttttcgaaaagtggctggaaactcatccgatgcctcaggcgctgtttacaacttcatttccgttactgcagggggtgatggacgtcacgctgcgccgggaagggaagctgccttctgaactggccattgccacttttggcgataacgagctgctggatttcctccagtgccccgttttggccgtggctcagcgccaccgcgatgtcgcggaacgcgtgctggagatcgtgctcgccagccttgatgaaccgcggaagcccaaaccgggtttaagccgcatacggcgcaacctttatcgtcgcggcagcctgaaccgtcgctga

SEQ ID NO: 172600 - DNA, 492 bp, Klebsiella oxytoca
atgcgccggatattatcagtattactggagaacgaatcgggtgctttatcccgcgtgatcggcctcttttcccagcgtggttataatattgaaagtctgacggtagcgccgacggacgatccgacgctctcccgcatgacgattcaaaccgttggtgatgagaaagccattgagcagatcgaaaagcagctgcataagctggtcgacgttctgcgcgttaacgagcttgggcaaggcgcgcacgtagagcgtgaaattatgctggtgaaagtgcaggcgagcggctatggacgcgatgaggtgaaacgcaatacggaaatcttccgcgggcaaattatcgatgtcacgccgtctatctatactgttcaactggcgggaaccagcgacaagctggatgcgtttttggcttctctgcgcgacgtggcgcgaattgttgaagtcgcccgctcgggcgtggttggtttatctcgcggtgacaaaatcatgcgttga

SEQ ID NO: 172601 - DNA, 1725 bp, Klebsiella oxytoca
atggagatgttgtcaggagccgaaatggtcgtccagtcgctggtcgatcagggcgtcaagcaggtgttcggttatcccgggggcgcggtcctcgatatctatgatgcgttacacacccttggcggaatcgatcacgttctggtccgtcatgagcaagcggccgttcatatggcggatggtcttgctcgcgcaacgggcgaagtcggagtggtactggtgacctcgggcccgggggcgaccaacgccatcaccggcattgcgacggcttatatggattccatcccgctggtgattctttccggccaggtcgcgacctccttaatcggttacgatgctttccaggagtgcgacatggttggcatctcccgaccggtggtaaagcacagctttctggttaagcaaaccgaagatattcccggcgtactgaaaaaagcgttttggctggccgccagcgggcgccctggtccggtcgtcgtggatttaccgaaagatattctcaacccggctaaaaaactgccctacagctggccggatacggttagcatgcgttcttataatccgacgacgtccggtcataaagggcagattaagcgagcgctgcagacgctgatagcggcaaaaaaaccggtcgtttatgtagggggcggggcgatcaatgcgcaatgtgaaccgcagctatacgcgctggttgagaaactgaagttaccggtagcttcatcgctgatggggctgggcgctttccctgcgtcgcaccagcaggcattagggatgctgggcatgcatgggacctatgaagccaatatgaccatgcacaattccgacgtgattttcgccgttggcgtgcgctttgacgatcgtacgacgaataacctggcccgctactgtccgaacgctacggtgctgcatattgatatcgatccgacttcgatatccaaaaccgttcctgccgacgtgcctattgtgggtgacgctcgcctggtgctggaacagatgctggagctgctcgaacacgaggagacacagcagccactcgatgaaattcgcgactggtggcagcaaattgaacagtggcgcgcgcgtcactgcctgcaatacgacacgcaaagcggcaagattaaaccgcaggcggttattgaaacgatctggcggctgactaacggcgatgcgtacgtaacgtccgacgtcggtcagcatcagatgttcgccgctctctattatcctttcgataaaccgcggcgctggatcaactcgggtggtctgggaaccatggggttcggccttcctgctgcgcttggcgtgaagatggcgctgccggaagagacggtcatttgcgtcaccggcgatggcagtatccagatgaatatccaggagctctccaccgcgctgcagtacgagctgccggtgctggtgctgaacctgaataaccgctacctcgggatggtgaagcagtggcaggatatgctctattcgggccgccattcgcaatcctatatggagtcactgcctgattttgcccgcgtagcggaagcctatggccatgtgggcattcgtattagcgacccgcaggaactggaagcgaaactcgctgaggcgctggcgcaggtgcgtaacaatcgactggtttttgtcgatgtgacggttgatggcagtgagcatgtataccctatgcagatccgcggcggcggtatggacgagatgtggctgagcaaaacggagaggacctga

SEQ ID NO: 172602 - DNA, 951 bp, Klebsiella oxytoca
atgttaaatgaaggtactgaatataagtcgacctctgaggtagaaaacacaaaaccccagctgcggatggtcgacctcaatctgttaaccgtatttgatgcggtaatgcaggagcaaaatatcacccgtgcggcgcactctttgggaatgtcccagccggcggtcagcaatgcggtctcgcgcctgaaagtgatgtttaatgatgagctgtttgttcgttatgggcgcggcatccagcctacggcgcgggctttccagctatttggttccgtacggcaggctctgcagctggtgcaaaacgaattaccgggctcgggctttgagccgctcagcagcgagcgggtctttaatttatgcgtgtgcagcccgctggataacgctttaacttcggttattttcaacaaagttggcgagattgcgcccaacattcatttggtctttaaatcggcattgaatcaaaacacggaacatcaattacgctatcaggaaattgaattcgttattggttatgaagagtttcgtcgtcctgagtttgcctgcgtacctttatttaaagatgaaatggtactggtggcaagtcgcaagcatccgcgtatttccggtccgctgatggaaaatgatatttatcaggaggagcacgccgttgtcgctcttgatcgttacgcatcatttagtcagccatggtatgacactgcggataaacagtctcgtattgcctatcaaggcaacgcaatggttagcgtattaaacgttgtttcccaaaccaatatggtcgctatcgcgccgcgctggctggccagcgagttcgccgataagctggatttgcaaatattacctctaccgttgaaggtcaatagccgtacctgctatctctcctggcatgaagcggcaggccgcgataaaggccatcagtggatggaagaattgctggtgagtatctgccagcgctaa

SEQ ID NO: 172603 - DNA, 1572 bp, Klebsiella oxytoca
atgagccagcaagtcattattttcgatacgaccttacgcgacggtgaacaagcgttacaagccagcctgagtgtgaaagagaaactgcagattgctatggccctggagcggatgggcgttgacgtgatggaagtcggttttccggtttcatccccgggcgattttgaatccgtgcaaaccatcgcacgcaccatcaaaaacagccgcgtttgcgcgctggcccgctgcgttgaaaaagatatcgacgttgcggcggaatcgctgaaggtcgcggaagccttccgtattcatacctttatcgccacctcgccgatgcacatcgcgaccaagctgcgcagtaatctggatgaagtgattgaacgcgctatctatatggttaagcgcgcccgcaactacactgacgacgttgagttttcctgtgaagatgctggccgtacgccgattgccgatctggcccgcgtcgtcgaagccgcgataaatgccggcgcaacgaccatcaatatccctgataccgtcggctacaccatgccgttcgaattcgccaatatcataaccggcctgtacgaacacgttcccaatatcgataaagccattatctccgtccatacccatgacgatttgggtatcgcggtgggtaacgccctcgccgcagtccatgccggcgctcgccaggttgaaggcgcaatgaacggcatcggcgagcgcgcgggtaactgctcgctggaagaagtgattatggcgattaaagtgcgcaaagacattatgaatgtgcacacccgcattaatcaccaggaaatctggcgtaccagccagaccgtcagccagatctgtaatatgccgattcccgccaacaaagcgatcgtcggtaccggtgccttcgcccactcttccggtattcaccaggatggcgtgctgaagaatcgcgaaaactacgaaatcatgacgccagaatctatcggtctgaaccaggtacagctgaacctgacttcccgctccggccgcgcggcggtgaaacaccgtatggaagagatgggctataaggacagcgactacaacatggatcacctgtatgaagcgttcctgaagctggcggataaaaagggccaggtatttgactatgacctggaagcgttagcctttattaacaaacagcaggaagaaccggagcatttccgtctggattacttcagcgtgcagtccggttccagcgacatcgcaaccgcctccgtgaagctggtctgcggcgaagaaaccaaagctgaggccgccaacggcaacggaccggttgacgccatctaccaggcgattaaccgcatcaccggctatgaggttgagctggtcaaatatgacctgaacgccaagggtcagggcaaggatgcgctgggccaggtggacatcgtggcaaactacaacggccgccgcttccacggcgttggcctggcgacggacatcgtggaatcctccgcgaaagcgatggttcacgtcctgaacaatatctggcgcgccgctgaagtcgaaaaagaattgcaacgcaaagctcagaataaagagaacaataaggaaaccgtgtaa

SEQ ID NO: 172604 - DNA, 1092 bp, Klebsiella oxytoca
atgtcgaagaattaccatattgctgttttaccaggtgatggtattggcccggaagtcatgaaccaggcaatgaaagtactggaagccgttcgcaaccgttttgatatgcgcattaccaccagccagcatgacgttggcggtatcgccatcgatcgtcagggcactccgctgcctcagtctaccgttgaaggctgcgagcaggctgacgcaattctgttcggctccgttggcggaccgaaatgggagcatctgccgcccgctgagcagccggagcgcggtgcgctgctgcccctgcggaaacactttaaattattcagcaacctgcgtccggctaagctgtatcaggggctggaagagttttgcccgctgcgcgccgatatcgccgccaacggcttcgacattttatgcgtgcgtgaactgaccggcggcatttactttggccagccgaagggtcgcgaaggtagcggtcagcatgaaaaagcatttgataccgaggtataccaccgcttcgagattgagcgtatcgcgcacattgccttcgaatccgcccgtaaacgtcgtcacaaagtgacttctattgataaggctaacgtcctgcagtcctctattttatggcgtgaaatcgttagtgaaatcagtaagcagtatcctgacgttgagctgtcgcatatgtacatcgacaacgccaccatgcagctgattaaagatccgtctcagttcgacgttctgctgtgttccaaccttttcggcgacatcctgtctgacgaatgcgccatgattaccggttcgatgggcatgctgccgtcagccagcctcaacgagcaaggctttggtttatatgaaccagcaggtggctccgcgccggatatcgccggcaaaaacatcgctaaccctatcgcgcagatcctctcgctggcgctgctgctgcgctacagcctggatgccgacaacgcggccactgcgattgagaacgcgatcaaccgcgcattagaagaaggcgtacgtaccggcgatttagcgcgcggtgcggcggcggtcagtaccgatgaaatgggcgatatcattgcccgctatgtcgctgaaggggtgtaa

SEQ ID NO: 172605 - DNA, 1401 bp, Klebsiella oxytoca
atggcgaagacgttatacgaaaaattgtttgatgctcacgtcgtttatgaagcgcaaaacgaaaccccgctgctgtacattgaccgtcatctggttcacgaggtgacctcgccgcaggcgtttgacggcctgcgcgcccataaacgtccggtacgccagccgggtaaaaccttcgccacgatggatcacaacgtatcgacgcaaactaaagacattaatgcctccggcgaaatggcgcgtatccagatgcaggagttgattaaaaactgcaaagagttcggcgttgaactgtatgacctgaatcacccttaccagggcatcgtgcacgtgatggggccggaacagggtgtgaccctgccgggcatgaccatcgtctgcggcgactcccatacggcaacccatggcgcattcggcgcgctggcattcggtatcggcacctccgaagtcgagcacgttctggcaacgcagacgctgaagcagggccgcgccaaaaccatgaagattgaggtcaagggtaaagcagccccgggcatcaccgccaaagatatcgttctggcgattatcggtaaaaccggcagcgccggcggcaccggtcatgttgtcgaattttgcggcgaagccatccgtgatttaagcatggaaggccgtatgactctgtgcaatatggcaatcgaaatgggcgcgaaagcgggcctggtggcgccagaccaaaccaccttcgattacgtgaaaggccgtctgcacgcgccgaagggccaggattttgacgaagccgtcgcctggtggaagaccctgactaccgatgatggcgcgacgtttgacagcgttgtcacgctgcaggcggaagatattgctccgcaggtcacctggggcaccaacccagggcaagtgatatccgtcaccgacatcatcccggatccggcatcgttcaacgacccggtagagcgcgcaagcgcggaaaaagcgctggcctatatggggctgaaatctggcgtaccgttaaccgaagtagcgattgataaagtctttatcggttcctgcaccaactcgcgcatcgaagacttacgcgcggccgccgagatcgctaaaggccgtaaagtggcgccgggcgttcaggcgctggtcgttcctggttccggcccggtgaaagcgcaggccgaagcggaaggtctggataaaatctttattgaagccggttttgagtggcgtttacccggctgctctatgtgcctggcgatgaacaacgaccgcctgaatccgggcgagcgctgcgcttccaccagcaaccgtaactttgaaggccgtcagggccgcggcgggcgcacccatctggttagcccggccatggcagccgcggcggccgttaccggtcatttcgccgatatccgtagcttgaaataa

SEQ ID NO: 172606 - DNA, 606 bp, Klebsiella oxytoca
atggcagagaaatttatccaacataccggcctggtggttccgctggatgccgcgaacgtcgatactgatgcaatcattccaaaacagtttctgcagaaagtcacgcgtaccggttttggcgcccatctgtttaacgactggcgcttcctggacgataaaggcgaacagcctaacccggaattcgtgctgaactttccggagtataaaggcgcctctatcctgctggcgcgagaaaacttcggctgcggctcctcccgcgagcatgcgccgtgggcgctgaccgattacggttttaaagtcgtcatcgcgcccagcttcgccgatatcttctatggcaacagctttaacaatcagctgctgccggtcacgctgagcgaagaacaggttgatgagctctttaagctggtccagtctcagcccggcattaagtttgaagtcgatctgcaagccgaggtcgtgaaagctggcgataaatcctggagctttaaaattgacgctttccgccgccactgcatgcttaacggcctggacagcatcggtctgaccctgcagcacgaagaggccatctcggcctatgagaaaaaactgccggcttttatgaattaa

SEQ ID NO: 172607 - DNA, 2034 bp, Klebsiella oxytoca
atgagccactacccccatcttttttccccgttgaccattaacgggatgacaataaaaaaccgcatcattatgccgccaatggggaccaacctggcgagcctgaacggtgaagtcactcaggaacagattgactactatgagctacgcgcgcggggcggcacaggcctcatcactatcgagaatatttgtatcgattttccattcgcttctaatggcacaacccagctgcgtatcgataacgatcagtatattccgcgcctgttcaaattaaccgaaaccttacataaacacggcgcctgcgtcggtattcaattaaaccacgctggcgcatcggcctatgcatatcgcctgaacggcgaaatgccgctttcctcttccagcacgccgtccaaaaagaacggtaatattccccgtccgatgacgcacgacgagatatatcatgccgtcgataagtttggtgatgctgcggagcgcgttcgccgcgctggtttcgactgtgtggaaattcacgccggccactcttatttaattagtcagtttttatcaccgctgtttaataagcgtaccgatgaatttggcggcagcgtagagaatcgcgccagaatattaaccttaatcgtcgataaggtacgcgcctgcgtaggtccgcgtttcccggtcagcctgcgtattagcgccgatgacttcctggagggcgggaatacgctcgaagattccttgcggatcctcgaattgtgccaggagaaagtcgatattatcaacgtctccgccgcgcaaaacgacaacctgaatttccagattgaccagatgtctctggaagatggctggaagcgctatctctcccgtgcggtacgcgacaaattccacaagccaacggtaattgccggcaatatccgtaccccgaaagtcgctgaagatattatcgccagcggcgatgctgacctgatagccattggccgcggactgatcgccgagccggagtgggtacaaaaagtgcagagcggtaacgagcttttgatgcggaaatgcatctcctgcaacatcggctgcgcggatcaccgcatcgcccgctcccgccctctgcgctgctcgattaacccggatattatccacggcgatgcctataaacagcagcgcgttatccgcgataccaacgtcgtggttatcggcgcgggtacggcgggaatggaagcggcctgcaccgcggcggaagtcggctgccatacctggctgctggaagagaagcacagcatcggcggactggccagcgagatctccctgctgccggagaaaaagcgtatcgccgattttccgcagtttatgaaaaaccgtatcgcctcgctcgataacctgatgctgcaggtcggcaagcgcgccaccgtggcatccgtttccgctcttcgcccggatttaatcgtcaacgcaaccggttcagttcctctgctgccgccaattgaaggactgcgcgagaacatcgatgtcgaaggcggaaacgtcttctccatcaccaacatgattcatcatctgggccagtttgccgatgctacaggtaaacgcatcgctgtcgtcggcgcaggcgccgtaggtctggatgttattgaatacttctccgcgcgcggcgccagcgccgtgcttatcgagatgcaggacgcgccgggacgcgacctggacatcattactaaaaatgccatgttgaccatgctcgatgaacatcacgtggaacagcacatgcgtacgcagctggttgccgtcaccccaacgcatttcaccgttaaaaatgcggatggcacctttgacattccttttgattacggcttcgtctgcctgggaatgcgcgccaataccgccggtctcactgagattgaacaatgggccagagccaataacgtaaaaataatgaacatcggcgacagcctgatggcccggcgaatcattgatggcgtgcgcgaagggcgcaacgtgctggacacccttgaagatatgggcgctctcggcaaccgcgaatcgacaaaaattccatttctaacatattga

SEQ ID NO: 172608 - DNA, 864 bp, Klebsiella oxytoca
atggcagaacgtattactggacacaccgagctgattggcctgattgcgaccccgattcgtcacagcatgtcgccgactatgcataacgaagcctttgcccatctgggactggactacgtttatctggcgttcgaagtaggtaatgaagagctgaaagatgtcgtacagggttttcgtgcattaaaactgcgcggctgtaacgtctccatgccgaacaaaacggagatttgccagtatctggacaaactctcgccggcggcagaactggttggcgcggtgaataccgtggtgaacgacaatggcgtcctgaccggccatatcaccgatggcaccggatatatgcgcgcgctcaaagaagaaggcattgatatcatcggcaaaaagatgaccgttctgggcgctggcggtgcggcaaccgcgctctgcgttcaggccgcgcttgatggcgtcaaagcgatctccatcttcaaccgcaaagataaattcttcgccaacgcagaacagaccgttgccaaaatccgtaataacaccaactgcgagatccacctgttcgatctggacgatcatgacaaactgcgcgcggaaatcgacagcagcgtcattctgaccaacgccaccggcgtggggatgaaaccgtttgaaggccagatgctgctgcctgacgacagcttcctgcgcccggacctgatcgtttctgacgtggtctacaacccgcgcaaaacttatctgctggaagtggctgagaaaaaaggctgccgcaccatcaacggtctggggatgatgctctggcaaggcgcgcgcgcttttgaaatctggacaggcaaagaaatgccggttgaatacgtcaaaaatatcctgttctaa

SEQ ID NO: 172609 - DNA, 1215 bp, Klebsiella oxytoca
atgaaaaatcaatatgtcccaacggcagctgggctatatcttaactatctgatccacggtatgggggttttgttaattaccctcaatatggcgaatctgcaggaacaatggggaaccgacgctgccggcgtctccatcgttatctcatcgctcgggatcggtaagctcgccacgatcgtgacaggattcctgtccgaccgttttggtcgtaaaccctttatctatctcggcatagccagctatgtggtgttcttcctcggtattctgctgacgaaaaacatctatctggcctactgctgcggcattatggcgggcctggcgaacagcttcctcgactccggtacctatccggcgctgatggagtctttccctaactccgccagccgggctaatgtcttgatcaaagcctttgtctctgccgggcagttcctgctgccgtttattatcggtgcgctgatatgggcgaatatgtggtacgggtggtcgtttatcatcgctgcagcattaatgatcctgagcgcggtctacctgataaaaatgcctttcccggatcatcgggcgaaaaaggaaaccgcagagaaatcagtgactgccgccgccgctccgcaggcggactccggcaaactggatatggtcatctttaccctgtacggctatatcggtatggcgactttttatctggtaagccagtggttagcgcagtacggcgagttcgttgcaggcatcccacacgagtcggctattaaactcttgagcgtctatactgccggttcactgacctgcgtatttgtcactgcggcttttgttaaagaggtattcagctcagccgtcgctatgatcatctacactttcctgtcgatgatttcactgctgatcgtttgcctgttcccgacgccaatgattgtgaccggctttgcctttatcatcggctttgccgccgcaggcggcgtgctgcagataggcgcgaccatcatggccatgagctttccgaacgggaaaggcaaagccaccgggatcttttataccgcaggaagtctggccagctttacgatcccgctaattacggcaaaactgtcgaagataggtatcgccagcattatgtggttcgatcttctgatcgctatcgtcggctttgtgatcgccctgtacatcggttatcgtcagcttcaggttcgcgccgctgcaaaaacatcccgcgttgcagcaaccgcctga

SEQ ID NO: 172610 - DNA, 756 bp, Klebsiella oxytoca
atgactaaagcagtaacagtaaaaaacatcaccttccaggaaggggaaaccttaatctgcgtaccgctgatcggcaaaacgcttgccgagctgcaaactaacgcacgcgcgctggctaccgccggagccgatattatcgaatggcgcgtcgatcacttcacccaggtcagagaaactgagcaggttctgctggcgctgggcgaaattcgccagctgctgaaagagattcctctgctgtttaccttccgcagcaaaaaagagggtggcgaaacggaaattagcgacgaagcctattttgagctgaatcgccaggcggccgttagcggtctgaccgacgtgattgatatcgagctgttcaacgacgaagcgcaaattcgctcgctggtgagcgatgcccacgctgcgggcgttaaagttatcatgagcaatcacgattttcataaaacgccggctcaggaagatatcatctatcgtctgcgtcgcatgcaggatcttggtgctgacctgccgaagatcgcggttatgccacagtcgccgcaagatgttctgaccctgctttcggcaacgctgacgatgaaagagaagtatgccactcgcccattaatcacgatgtcgatgggtaaatccggcggcgtgagccgggtaaccggccgtttgttcggttcagcaatgacctttggcaccgtcggtcaggcttctgcgccagggcaaatcgccattacccagctgcgtgagctgatggatattctttcctga

SEQ ID NO: 172611 - DNA, 897 bp, Klebsiella oxytoca
atgaacctaaagcaactttattattttaagcgactggcagaaactgagcattacactgaagctgcctccagcctttttatcacccaaccgtccctcagccatgccatatctgaactggagaaagagctgggagtggcgctatttgccaggaaagggcgcaatgtcaagattacgcagaatggtaggcgctttctgccctacgtggaagatgcgctggcctcgttagaaaatggccgtatgacgttgcaaaaaaatagcgctgagaacaaagaaaatattcgcattgcatttatttataccatgggcgaatatgttgttccgcagttaattaacaaatattcgctgtcaccatctcgtcacaatgtgacattttcttttactcagggaacctcgttaacccttctccaggaactgaaagccggaaaaagcgatctggctatttgttcctatattgcggatgaaccggatattgactttattcctattattcaacaagaactggtcgtagtgacggcaaaagatcatcctctggccaggctttatgaaaatgaagtcgacctggtggagacgatccactacccctatatctatttttcagaaaatagcggtctgcgaccttttattgataacgtgtttatgcagcaaaaactggttccggatattgcctgctacgttgatgaggatacggcgatggcggggctggttagtattgattacggtattgcgattatgccgagaatttccgcgctgtcgtattacaacgtgcatatcctgacgatcaaaaatgccattcctccgcgttatatctatctggcgaccatgaaggagcgggtactttccccggccattcagtcatttaaagatgtcattattaatgacagccaaaaaatcagataa

SEQ ID NO: 172612 - DNA, 1311 bp, Klebsiella oxytoca
atgaggacactcaatgctcaggaacggccgattttgccgtcggccacgcaaaagcgaactaaaacacgaattgtaattttaatgttactatcgatcgggacgatgataaattatctcgatcgtactattttaggtattgttgcacctaagttaacgagcgaaatccatatcgacccggcgatgatgggtatcgttttttccgctttcgcctggacctacgcgctggcgcaaattcccgggggaatgtttttagatcgcttcggtaataaattaacttacgcgctttctattttcttctggtcaacctttaccctattacaaagcttttccgtaggcttaaaatcattgctgctgctgcgattaggtttaggcatcagcgaagccccctgctttccggtgaatagtcgggtcgtgagtaaatggtttccccagcatgaacgcgctcgggcaacggcgacttacaccgtcggtgaatatattggactggccgcattctccccgctactttttttaattctggagcatcatggctggagaacgctatttttcctgaccggcggtttgggcattgcattcacttttgtgtggtggaaattttatcatgaaccgcatcagtcaaagactgcaaataaagcagagctggaatatatcggcgtagaaaatacggctggcgccgatgaaaatatcccgtttaactggcccgatgccaaacgcctgctgtgctgccgacagattatcggcgccagcctggggcagtttgccggtaacaccacgctggttttcttcctgacctggtttcccacttatctggctaacgaacgccatttaccgtggcttcacgtgggtttcttcgcctcctggccgttcctggccgcggctatcggtatctttttcggcggttgggtatccgataaaatcttaaagaaaacccgttccgtaaatattagcagaaagctgcccattatttccgggctgctgctttcgagctgcatcatcattgctaactgggtcgagagtaacaccgctgttattattattatgtcgatcgctttttttggtcagggcatggttggactcggctggacgcttatttcagacatagcgcctaaaaacatgggcggactcaccggggggatcttcaacttctgtgcaaatatggcgtcaattattaccccgttaattatcggggtcatcatatccatgaccggtaattttttctacgcgctgatttatatcggattaaccgcgctgattggcgttatcgcttatatttttattatcggcgatataaaaagaatcgtgttgaaataa

SEQ ID NO: 172613 - DNA, 1185 bp, Klebsiella oxytoca
atgctgtggttaatgacgatgggtcgacgtcttaacggcgtttacgccgcttttatgcttgtcgctttcatgatgggaatcgcaggcgcgctgcaggcgccgacgctcagcttatttctcagccgcgaagtgggcgcgcagcctttctgggtagggctattctatacggttaacgccattgccggcatactggtcagcctggcgctggctaagcgctccgatagtcggggcgatcgccgacggctgattatgttttgctgcctgatggcggtgggaaacgcgctgctgtttgcttttaatcgccactatctgacgctgattacctgcggggttatgctggcctccgtggcgaatgccgcgatgccgcagctttttgccctcgcgcgggaatatgctgatagctcggcgcgtgaagtggtgatgttcagttcgataatgcgtgcgcagctctcgctggcatgggttattggcccgccgctggcctttatgctggcgctgaactacggcttcaccaccatgttttcgattgctgccgggatctttgttattagcctggcgctgattgccttcaagctgccctcggtcgcccgcgttgaacaaccctcggaaggcgctgaagttctggtacaggccggaggatggcacgataaaaacgtacgcatgctgtttattgcctcgacgctgatgtggacctgcaacaccatgtatatcattgatatgcctttgtggatcagtagcgatcttggccttcccgatagcctcgccgggattctgatgggcaccgccgccgggctggagatcccggcgatgatcctggcgggctactacgttaagcgctgggggaaacgcaagatgatggtgacagcggtggcggcgggcgtgctgttttatatcggtctgattctgtttcacgaccgcgtggcgctgctggtgttacagctgtttaatgccgtgtttatcggcattgttgccggcattggcatgctgtggtttcaggatttgatgcccggacgggcgggcgccgcgacgacgctgtttaccaacagtatctctaccggggtgattctggccggggtgattcagggcgcactgtcgcaaagctatgggcacgccagcgtctactggacaattgccgctatctcactggtgacgctatttatgaccagccgggtgaaagatatctga

SEQ ID NO: 172614 - DNA, 153 bp, Klebsiella oxytoca
atgatggggtcaaccattaaacagttctaccaacgctacttttctgcgacgcaggatgcgtcatggctggcccgcctgatggcaggaagacagcaggaaattctcggcgaactgatgcagtggggagttacgtcgcaggcctctgatcattga

SEQ ID NO: 172615 - DNA, 1656 bp, Klebsiella oxytoca
atgtcttccggtcgtttacaacagcagttcatccgcctgtggcagtgctgcgacggcaagtcgcaggagacaacgctgaatgaactggcagagatgctaagctgctcgcgtcgtcatatgcgtaccttactcaacatgatggaggcgcgcggctggctgacctgggaggcggaggccggacgcggcaagcgttctcggctcgcttttctctataccggtctcgcgctgcagcagcagagggcggaagatctgctggagcaggacagaatcgatcagctggtgcagctggttggcgataaagccgccgtccgccaaatgctggtttcccatttaggccgcagctttcgccagggtcggcatatcctgcgcgtgctctactaccggccgatgaaaaatctgctgcccggcagcgcgctgcgccgctcggaaacccatattgcccggcagatttttagcgccctgacgcgagtaaatgaggaaaatggggaactggaagccgatattgctcaccattggcagcagatcgcgccgacccactggcgtttttttctgcgtccaggcattcattttcaccatgggcgtgagctggagatggaggatgtcatcacctccctgcagcgcagtaacacgctgccgctcttctctcacatcgagcatatcgactcccccaccgcctggactctcgacattcatctcagccaacccgaccgctggctaccgtggttgttaagccaggtaccggccatgatccttccgcatgagtggcgaacgatggagaatttctccagcatccccgtggggacagggccatactcggttgtgcgtaataatcagaaccagctcaaaattcacgccttcgacgactatttcggctaccgggcgctgatcgatgaagtgaacgtctgggttctgccggaaatcagcgaagagcccaacggtgggttaacgttacagggcaccacgcaaagcgaaaaggcggtggaaagccgtctggaagaggggtgttattacctgctgttcgatgcccgtagcccgctcggcgcgaacagcgcggtacgccagtggctaagctatgtattccagcccgctaatctgctctatcacgcgggtgagcactatcagggcaactggttcccggcgtatggcctgctgccccgctggcatcatgcgcgcagccacgcctgtgaaaaaccgcccggtcttgaaacggtcaggctgacctactaccaggaccacgtcgagcatcgcgtgatgggcgggatcatggcgacgctgctggccgagcatcaggttaagctggagatccaggaactggagtatcaggagtggcaccgcggtgaggtggtcagcgacgtatggctcaacagcgccaactttacgctgccgatcgatttctccctgtttgcctggctgtatgaagttcccctgattcgcaattgtatccccatcgactgggagcaggacgccgctcgctggcgcgcgggtgagctgaatccggcgacctggagccagcagctgttggccaatcaaaccgtggtgccgctcattcaccactggctgatgatccaggggcagcgcagtatgcgcggcgtacgtatgaacacgctcggctggtttgactttaaatccgcgtggttcgcgccgccggagccataa

SEQ ID NO: 172616 - DNA, 984 bp, Klebsiella oxytoca
gtgttgaaaaaattactccccctgctggcgctggccgccgcgcccgtttttgccaaaccgctgctcaccgtttatacctacgactcattctccgccgactggggccctggcccggcggttaaaaaagcctttgaagccgactgcggctgcgagctgaagttcgtggcgctggaagatggcgtctcgctgctcaatcgtctgcggatggaaggcaaaaacagcaaagccgacgtagtgctggggctggataacaacctgctggaagcggcttcgcaaagtaagctgttcgccaaaagcggcgtccctgccagcgcggtgaacgtacccggcggctggaacaacgacaccttcgtcccgttcgattacggctatttcgcctttgtttacgataaaaacaagctgaaaaatccgcccaggagcctgaaagagctggttgagggcgagcaaaaatggcgggtgatttatgaagatccgcgtaccagcacgccgggtctgggcctgctgctgtggatgcaaaaagtctacggcgataaagcgccggaagcctggcagaagctggcggcgaaaaccgtcaccgtcaccaaaggctggagcgaagcctacggcctgttcctgaaaggcgaaagcgatctggtgctgagctacaccacctccccggcttaccacattatcgaagagaagaaggataactacgccgcggcaaacttcgctgaaggacactatttgcaggtcgaagtcgccgcccgcaccgcggccagcaagcagccggaactggcggaaaaattcctcaaatttatggtatcgccgggctttcagaatgcgatccccaccggcaactggatgtatccggtcactcaggttgcgcttccgccaggctttgacgcgctgatgaaaccgcagacgaccctcgaatttacaccgcaacaggtggccgccgaacgtcagaactggattaacgcatggcaacgcgccgtcagccgctag

SEQ ID NO: 172617 - DNA, 1611 bp, Klebsiella oxytoca
atggcaacgcgccgtcagccgctagctgtcggctggctcctgccgggactcacggcggccatcgttctggtcgtcgtggcgctggccgcctttctggcgctatggttcagcgccccggagaccacctggaaagcgcttatcagcgacggctatctctggcacgtggtgcgtttctccttctggcaggccttcctttccgcgcttttttcggtgctaccggcgatattcctcgcccgcgctctgtaccggcgacgtttccccgggcgcacgctgctgctgcgcctttgcgcgatgaccttaatcctgccggtactggtggcggtcttcggtattctgagcgtctacggtcgtcagggatggctggctgaattatgcaacgcgttcggctggcagtgggaattctcgccctacgggctacaggggatcctgctggcgcacgtgttctttaatatgccgatggctacgcgcctgctgctgcagacgctggaaaatatccccggcgagcagcggcaaatcgccgcccagctcggcatgcgcggctacgtctttttccggctggttgaatggccgtggctgcgtcggcaaatcccgccggttgcggcgctgatctttatgctctgtttcgccagctttgcgaccgtgctgtcgctgggcggaggcccgcgggccacgacgatcgagctggcgatttaccaggctctcaatttcgactacgacccggcgcgcgcggcgatgctggcgcttatccagatgatctgctgtctcgggctggtgttgcttagccagcgcctgagtagagcgctcgccatcggggccagccatatccgcggctggcgcgatcccgacgaccggctatatagccggctgtgcgacacggcgctgatcggcgctgcgcttttactgctgctaccgccgctgctggcggtgataggcgacgggctgaacagcaatctgtttagcgtgctgcagcagcccgcgctttggcaggcgctgtggacatcgctgcgtatcgcccttgccgccggactcttaagcgtcatcctgaccatgatgctgctgtggagcagccgtgagctccgcgcccgccgtcgccctctcgccggtcaggcgcttgagctgagcggcatgctgatcctcgccatgccgggcatcgtgctggccaccggtttcttcctgctgctcaataatagcgtgggcctgccggaatccgccgacgccatcgtcattttcaccaatgcgctgatggcgatcccctacgcgcttaaggtgctggaaaacccgatgcgcgatatcgccgcccgctacggtaccctctgcgagtcgctggggatgcacggctttacccgcctccgggtggtcgagcttcgcgctttaaaacggccgctggcccaggcgctggccttcgcctgcgtgctgtcgattggcgatttcggcgtcgtagcgctgttcggcaacgaagattttcgtactctgcccttttatctgtatcagcaaattggctcttatcgcagccaggacggcgccgtcaccgccctcctgcttctgctgctgtgctttttactctttagcgtgattgaaaaacttccgggacgcgatgctaaaactgaatga

SEQ ID NO: 172618 - DNA, 702 bp, Klebsiella oxytoca
atgctaaaactgaatgatgtgacctggctttatcagcatctgccgatgcgtttcacgcttgccgtcgaacgcggtgagcgcattgcggttcttggccccagcggcgccgggaaaagtacgctgctgaacctgattgccggttttctgccgcctgccagcggcagtatcgagatcgatggtcagccccatacctacacgccgcccgcgcatcgcccggtatcgatgctgtttcaggaaaataatctgtttaaccatctcaccatccgccagaacattgctctgggaatgcatccggggctcaagctgaacgcgacgcagatcgcccgcctgcaggccattgccgggcagatgggaatcgacgccttgttagagcggctgccgggcgagctttccggcggccagcgtcagcgtgcggcgctggcgcgctgtctggtacgccagcagccggtactgctgctggatgagcccttctccgcgctcgatcccgcgctgcgtcaggagatgctgaccctggttgccgacatctgccggcaacagcagctgacgctgttaatggtctcgcacagcgtggaagatgctgcgcgtatcgcgccgcggtcggtggtcgtggctgagggacggattgcctgggatggcgagaccgccgcgctgctcaacggcagcagcagcgcctcggcgctactgggaattagcgcaaaataa

SEQ ID NO: 172619 - DNA, 768 bp, Klebsiella oxytoca
atgcaagcattgctggaacactttattactcaatcgacggtctattccctgatagccgttctgctggtcgccttcctcgagtcgctggcgctggtggggcttatcttaccgggaacggtgatgatggccggattgggggcgctgatcggcagcggagaggttaacttctggcaggcttggctggcggggattatcggctgtttgctcggcgactggatctcattctggcttggctggcggtttaaaaagccactgcatcgctggtcttttttaaagaaaaacaaagcgctgctggataaaaccgaacatgcgttgcatcagcacagcatgtttaccattttgattggccgctttgtcgggccaacgcgcccgctggtgccgatggtcgccgggatgctggatctgccggtcgcgaaattcattccgccgaatatcattggctgcctgctatggccgccgctctacttcttaccggggatactagccggggcggccattgatattccggccgatgagaatagcgccagctttaagtggctgctgctgggggcggcgctgctggcgtggctggcggcgtggctgtgctggcgattgtggcgcagcgccaaaagcgccggcgatcgtctcacccgctttctgccgcgttcgcgcctgctgtggatcgcgccgctgatggtatgcgccgccgtcgcggccctggtgctcgccttccgtcatccgctgatgccggtctatctcgacatcctgcataaggttattttgcgctaa

SEQ ID NO: 172620 - DNA, 846 bp, Klebsiella oxytoca
atggctgaaacgcaaaacgatcctttgttgccgggttactcttttaatgcccatctggtgacgggcctgacgccgattgaggccgacggctatctggatttctttattgaccgtccgctgggcatgaagggctatatccttaatctgacgatccgcggcgaaggggtgatcaataaccacggggagcagtttatctgccgccccggcgatatgctgctgtttccgccgggagagatacaccactacggccgccatcccgatgcccgcgagtggtatcaccagtgggtctatttccggccgcgcgcctactggcatgaatggcttaactggccaacgatttttgcccagaccggctttttccgcccggatgagcagtggcaggcgcgctttggcgagctgttcgggcagattgtggaggccgggcagggcgcggggcgttattccgagctgctggcgatcaatcttatggagcaactgctgctgcgccgtatggaggccatcaatgaatcgctgcatccgccgctggataaccgggtgcgcgatgcctgccagtacatcagcgatcatctggcggacagccatttcgacattgccagcgtcgcccagcacgtgtgcctgtcgccgtcgcgcctgtcgcatctgttccgccagcagttagggatcagcgtactggggtggcgggaggatcagcgcattagccaggccaagctgctgctgagcacgacgcggatgccgatcgctaccgttggccgtaacgtcggttttgaggaccagctctacttttcgcgcgtgtttaagaaatgcaccggcgccagcccgagcgagtttcgcgctgggtgtgaataa

SEQ ID NO: 172621 - DNA, 1710 bp, Klebsiella oxytoca
atggcaattgcgattggcctcgattttggcagtgattcagtacgtgccctggcggtagagtgcgcgaccggcgaagagctcgccgcaagcgtcgagtggtatccgcgctggcaggaggggctattctgcgatggcccgaacaaccagttccgccatcatccacgcgactatatcgaatcaatggaagccgcgctgaaaagcgtcctcgccgcccttagcgccgaacagcgcgctgccgtcgtaggtatcggcgttgatagcaccggctcaacgcccgcgcccatcgacgctgacggcaacgtgctggcgctgcgcgaagagttcgccaacaaccccaacgccatgttcgtgctgtggaaagaccatacttcggtggaggaggcggaggaaattacccgcctgtgccaccagcccggcaaagaagattactcccgctatatcggcggtatctactccagcgaatggttctgggccaagatcctccacgtgactcgccaggaccgcgccgtcgtcgaggccgccgcgtcgtggattgagctgtgcgactgggtgccggccctgctttccgggacgacgcgcccgcaggatattcgccgcggccgctgcagcgccgggcataaatccctttggcatgaaagctggggcggcctgccgccagccgggttcttcgatgaacttgacccgataattaaccggaacctggcctacccgatgttcagcgagacctggactgcggatctgccggtcggcacgctgaccaccgaatgggccgcgcgtctgggcctgccgcaaaccgtcgccatctccggcggcgcattcgactgccatatgggcgccgtcggcgccggagcgcagccaaatgcgctggttaaagttatcggcacctccacctgcgacattctgatcgccgataaacagagcgttggcgagcgcacggtaaagggcatttgcggccaggttgatggtagcgtcgtgcctgactttatcggtatggaagcggggcaatccgcctttggcgacatctacgcctggtttggccgcattctcggctggccgctggagcagctggcgcaggcccacccggaacttaaagaacagatcaaagccagccagaaacagctgctgcccgcgctgaccgacgcatgggcgaaaaatccgtctctcgaccacctgccggtagtgctggactggtttaacgggcgccgtacgccgaatgccaaccagcgtctgaaaggggtcattaccgatctgaacctcgccaccgacgccccggcgctgttcggcgggctgattgccgccaccgccttcggcgcccgcgccattatggagtgcttcaccgaacaggggatcccggtcaataacgtgatggcgctcggcggcatcgcgcgcaaaaacccggtgatcatgcaggcctgctgcgatgtgctgaatcgcccgctgcaaatcgtcgcgtccgatcagtgctgcgcgctgggcgcggctatcttcgccgccgttgctgccggcgtctaccacgatattcctgccgcgcaggagcaaatggccagccgggtggaaagcaccctgcagcctcgcccggcgcaggcgcaacgttttgaacaactctatcagcgctaccagcagtggtcgctcagcgcggaacaacgttacctcccttcgactgcaaaagcggaatccgcgccgcaatctcaggcagccttcacccattaa

SEQ ID NO: 172622 - DNA, 1503 bp, Klebsiella oxytoca
atgacaatttttgataattatgaagtgtggttcgtcatcggtagccagcatctgtatggccctgaagcgctacgccaggtgacaaagcacgcagaacatgtggtgaacagcctgaatgcggaagccaaactgccgtgcaaactggtgcttaagccgctgggtaccacgccggatgagatcacccatatctgtcgcgacgcaaactacgatgataagtgcgccgggatggtggtgtggctgcataccttctcaccggcgaaaatgtggatcaacggcctcacgatcctgaataaaccgctgatgcagttccatacccagttcaacgcggcgctgccgtgggacagcatcgatatggactttatgaacctgaaccagaccgcccacggcggccgcgaatttggcttcatcggcgcgcggatgcgtcagcaacacagcgtggtaaccggccactggcaggataaagaagcccatcagcgcatcggcgcatggatgcgtcaggcggtttcgaaacaggatacccgccacctgaaagtgtgccgtttcggcgataacatgcgtgaagtggcggtcaccgacggggataaagtcgccgcgcagattaagtttggtttctcggttaacacctgggcggtgggcgacctggtacaggtcgtcaatgcggtcaccgatggcgaaatcagcgccctggtcgatgagtatgaaagcagctatcgcctgacgccagcggtgcaaatccacggtgataagcggcagaacattcttgatgccgcgcgcattgagctggggatgaagcgcttcctggaacagggcggcttccacgcctttactaccacctttgaagatttgcacggcctgaaacagcttccgggtctcgccgtacagcgtctgatgcagcagggctacggctttgcgggcgaaggcgactggaaaaccgccgccctgcttcgcatcatgaaggtgatggcaaccggtctgcagggcggcacctcctttatggaggattacacctaccacttcgagaaaggcaacgatctggcgctgggctcgcatatgctggaagtctgcccgaccatcgctaccgcggagaaaccgattctcgacgtgcagccgctgggcatcggcggtaaagccgatccggcgcgcatcatcttcaacacccagaccggcccggcgatcgtcgccagcctgatcgatctcggcgatcgctatcgtctgctggtgaacaccattgagacggtgaaaacgccgcacgagctgccgaagctaccggtggccaatgcgctgtggaaagcccatccggatctgcgcaccgcgtccgaggcctggatcattgctggcggcgcgcaccataccgtcttcagccatgcgctgacccttgatgatatgcgccagttcgcagagctacaggatatcgaactgaccgtgattgacaatgagacccgcctgccctccttcaaggatgcgctgcgctggaacgaagtgtattacggttcaaaacgctaa

SEQ ID NO: 172623 - DNA, 696 bp, Klebsiella oxytoca
atgttagaagatcttaaacgccaggttctcgaagccaacctggccctgccaaagcacaatctggtcactctcacctggggcaacgtcagcgccgtcgaccgtgaacggggcgtgctggtgattaaaccctccggcgtcgactacagcgtcatgaccgccgaagatatggtggtggtcagcctggagaccggcgaagtggttgaaggtcagaaaaagccctcgtctgataccccgacccaccgtctgctgtatcaggcattcccgacgctgggcggtattgtccacactcattcgcgtcacgccaccatctgggcgcaggccggtcagcccattcccgctaccggcacgacccacgccgactatttctacggcgcggttccctgcacccgcctgatgaccgatgacgagatcaacggcgagtacgagtggcaaaccggcgaagtgatcgtcgaaacctttcgtgaaaaaggcatcgatccggcgcaaatgcccggcgtgctggtgcactctcacgggccgtttgcctggggtaaaaacgccgaagacgcagtgcataacgccattgtgctggaagagatcgcctatatgggcatcttctgccgccagctggcgccgcagctgccggagatgcagcagacgctgctggataaacactatctgcgcaagcacggcgcgaaagcctattacgggcaataa

SEQ ID NO: 172624 - DNA, 2358 bp, Klebsiella oxytoca
gtgacgcagccacgagaaggttttttactgacccgtcactggcgggataccccgcagggcaccgaactgactttctggctggcgaccgatgacggcccgcttgaggtcacgctgccgccccaggagtccgtggcgtttatccctgaatcccagcgcgcgcaggttgaacgcctgctgcagggggaaaacggccatcgccttgccccgctcagcctgaaagattttcatcgccagccggtttttggcctttactgccgcgctcaccgccagctgatgcggctggaaaaaaagctgcgcgaaaacggcgtcacggtttatgaaggcgacgttcgcccgccggagcgctatctgatggagcgctttatcaccgccccggtgtgggttgaaggcgagtcgcgcggccagcagctggtcaacgcccggatgaagcccaatccccactaccgcccgccgctaaaatgggtttcgctggatattgaaaccagccgccacggcgagctctactgcatcggtcttgaaggctgcggccagcgggttgtctatatgctcgggccggagcccgcctcgccccctgccgtcaacttccagctagagtacgtcgccagccgcccgctgctgctggaaaagcttaacgcctggtttgccgctcacgacccggacgtgctgatcggctggaacgtggtgcagttcgatttacgcgtcctgcaaaagcacgccgagcgctatcgcatcccgctgctgctcgggcgcggcaacagcgaactggagtggcgcgaacacggttttaagaatggcgtcttctttgctcaggccaacggccgcctgattatcgacggcattgaggcgctgaaatccgcgttctggaacttctcctcttttgcgctggaatcggtcgcccgcgagctgctcggcgagggcaaagccattgataatccctgggatcggatggatgaaatcgaccgccgttttcaccaggataaaccggcgctggccacctacaacctgcaggactgcgagctggtcacccgcatcttccataaaaccgagatcatgccgtttttgctggagcgcgcgacggtcaacggcctgcctgcggatcgccacggtggttcggtcgccgccttcagccacctctattttccacgcatgcaccggctcggctacgtcgcgccgaacttcggagaagtgccgccgcaggccagccctggcggctacgtaatggattcacgccccggtctgtacgactctgtgctggtgctggactacaaaagcctgtacccgtcgattatccgcaccttcctgatcgacccggtggggctggttgaaggtctggcgcagcccgatgacgctcacagcaccgaaggctttctcggcgcgcgcttctcgcgagataagcactgcctgccggggattgtcgggcagatctggcacgggcgcgacgaagccaagctgcataaaaacaaaccgctgtcgcaggcgctgaagatcattatgaacgccttctacggcgtgctcggcaccagcgcctgccgcttcttcgatccgcgcctggcctcttccattaccatgcgcggtcacgcgattatgcgccagaccaaagcgctgattgaatcccagggctatgacgttatctacggcgataccgactccaccttcgtgtggctcaagcgagcccacagcgaagaggaagctggcgctatcggtcggtcgctggtggccttcgtcaacgaatggtgggcgacggagctgggcaaagaggggctcgccagcaccctggagctggagtttgaaacccacttctgccgctttctcatgcctaccattcgcggcgcggataccggcagtaaaaagcgctacgccgggatgattcaggaaggcagcgagcagcgcatggtgtttaaaggcctggagacggtacgcaccgactggacgccgctggcccagcagtttcagcaggagctttatctactcattttccgccatcagccctatcgcgactatgtgcgcgaaaccattgataagctgatgaacggcgagcttgacgatcgactggtctatcgcaaacgcctgcgccgtccgctggcggagtatcagcgcaacgtgccgccgcacgtgcgcgcggcgcggctggctgatgagcacaacgttcggctgggtagaccgcagcagtatcagcagcgcggcagcattaaatacgtctggactaccggcgggccggaaccagtggattatcagcagtcgccgctggattatgagcactatctctctaagcaattagagcctgtcgccgaaggaatacttccctttgtcgacgacgattttgctacaatagtgacggggcaactggggctattttga

SEQ ID NO: 172625 - DNA, 2907 bp, Klebsiella oxytoca
atgccttttacacttggtcaacgctggattagcgacacagagagcgaactgggattagggacggtcgttgcgctggacgcgcgcatggtgaccctgcttttccccgccatcggcgaaaaccgtctgtacgcacgcaacgactccccgatcacccgcgtgatgtttaacccgggcgacaccatcaccagccatgaaggctggcaactccaggttgacgaagttaatgaagagaacggcctgctggcctacaccggcacccgactcgacacccaggaagccaacgttaccctgcgtgaagtgctgctcgacagcaagctggttttcagcaaaccgcaggaccgtctgttcgccggacagattgaccgtatggatcgttttgccctgcgctatcgcgcgcgcaaattccagagcgaacagtaccgcatgccgtggagcggcctgcgcggtcagcgcaccagcctgatcccgcatcagctgaatatcgctcatgacgttggccgccgccatgcgccgcgcgtcctgctggcggacgaagtgggtctgggtaaaaccatcgaagccgggatgatcctgcatcagcagctgctctccggcgccgccgaacgcgtactgattgtcgttccggaaaccctgcagcaccagtggctggtggaaatgctgcgccgctttaacctgcgcttctcgctgtttgacgatgagcgctatgccgaagcgcagcacgatgcaattaacccgtttgaaaccgaacagctggtgatctgttcgctggatttcgtacgccgcagcaagcagcgtctggaacacctgtgcgaagcggagtgggatctgatggtcgttgatgaagcgcaccacctggtctggagcgaagacgccccgagccgggaatatcaggcgattgaacagctggccgaatgcgtgccgggcattctgctgctcaccgcgacgccggagcagctgggaatggagagccatttcgcccgtctgcgcctgctcgaccccaaccgtttccacgacttcgcccagtttgttgaagagcagcagaactaccgtccggttgccgacgccgtcgccctgctgctggccggcaataagctgaacgacgccgagctgaacgcgctgagcgatctgatcggcgaacaggatatcgagccgttattgcaggccgccaacagcgatcgcgatgatgcccaggccgctcgtcaggagctggtgtcaatgcttatggaccgccacggtaccagccgcgtgctgttccgcaatacccgtaacggtgtcaaaggctttccgaaacgcgagctgcatacgattcgtctgccgctgccgacccagtaccagacggccatcaaggtttccggcattatgggtgcccgcaaaacggccgaagagcgcgcccgcgacatgctctatccggagcagatttatcaggaatttgaaggcgataccggtacctggtggaactttgacccgcgcgttgaatggctgatgggccatctcaccagccaccgctcgcagaaagtgctggtgatctgcgctaaagcagccaccgcgctgcagctggagcaggttctgcgcgagcgcgaaggcatccgtgcagcggtgttccacgaagggatgtcaattatcgaacgcgaccgcgccgccgcctggttcgccgaggaagataccggcgctcaggtgctgctgtgttctgaaatcggctccgaaggccgcaacttccagttcgccagcaacctggtgatgttcgacctgccgttcaacccggatctgctggagcagcgtatcggtcgtcttgaccgtatcggccaggcccacgatattcagatccacgttccgtatctggaaagaaccgcccagtcggtgctggtgcgctggtatcacgaaggtctggacgcgttcgagcacacctgcccgaccggccgtaccgtttacgacagcgtgcataatgaactgattaactatctcgccgcgccggaaaataccgacggcttcgacgacctgatcaaagcctgccgccagcagcatgaagcgctgaaagcgcagctggaacagggccgcgatcgtctgctggagatccactctaacggcggagaaaaagcccagcagcttgcggaaagcattgaagaacaggatgacgacaccagcctgatcgctttctccatgaacctgttcgatattgtcggcatcaaccaggacgaccgtggtgaaaacctgattgtcctgaccccctccgaccatatgctggtaccggacttccctggcctgccggaagatggctgcaccattacctttgagcgtgacgtcgccctgtcccgcgaagacgcgcagttcatcacctgggagcatccgctgattatcaacggtctggatctgatcctctccggcgataccggcagcagcaccatctcgctgctgaagaacaaagcgctgccggtaggtaccctgctgctggagctgatttacgtcgttgaggcccaggcgccgaagcatctgcagctcaaccgcttcctgccgccgacgccggtgcgcatgctgctcgacaaaaacggcaacaaccttgccggtcaggtggagttcgaaagctttaaccgtcagctgagcgcggtaaaccgccacaccggcagcaagctggtcaacgccgtccagcaggacgtccacgccattttgcagcagggcgaaggccaggtggccaaagcggcccaggccctgatcgacgccgcgcgtcaagaagccgacgataagctgtcggccgaactgtcgcgccttgaagcgctgcgcgccgttaacccgaacatccgcgatgatgaactggcggctatcgagagcaaccgtcagcaggtcatggacgcgctggcgcaggcgggctggcgcctggatgcgctgcgcttaatcgtggtcacccaccagtaa

SEQ ID NO: 172626 - DNA, 660 bp, Klebsiella oxytoca
atggcgatggaaaactacaatccgccgcaggatccctggctggttatcctctaccaggatgagcacattatggtggtcaacaagccaagcggcctgttgtccgtaccgggccggcttgctgagcacaaggacagcgtgatgacgcgcattcagcgcgatttcccgcaggccgagtcggtgcaccggctggatatggcgaccagcggcgtgattgtggtagccctgaccaaagcggcagagcgcgagcttaagcggcagttccgcgaacgcgagccgaaaaagcagtacgtcgcacgcgtctgggggcatccggaaaaagccgagggtctggtggatttaccgctgatttgcgactggccgaaccggccaaagcagaaggtgtgttacgaaaccggcaaagcggcgcaaaccgagtatgaagtgctggagttcgcgacggacaacaccgcccgcgtgcgcctgaagccgattaccgggcgttcgcatcagctgcgcgtgcatatgctggcgctgggccatccgattcttggcgaccgcttttatgcgtcgccggaagcgctggccatggcgccgcgtctgctgctgcacgctgaaaccctgaccatcacccatccgtcattcggtaatacgatgacgttccgcgcgccgatcgacttctga

SEQ ID NO: 172627 - DNA, 540 bp, Klebsiella oxytoca
atgtcagtggatactctcgcccgtgagggcgtaagcatggaagcgctgctggcggcgaaagagcagcgcgccgcgcgtcaggccgactggttagcccattatcagcggccggtgatttcgctgaccctggtgaccccgggcgcggtgaaagacagcattcgctaccgtaatatgatgggcgtagcgctgcaggcctgcgatcagatgctgtggaaacaccgctggcagacgctggatcgccaggtgctgtggctgccgaccggtccggaagcgctgtggtgcgtcgatcacgccgccagtgaaatcaaagccttctgtaccgatcttgagcatacccatccgctgggccgcctgtgggatatcgacgttatttgcccgaaagatggcctggttggccgtgagtcaatgggggaaaaccagcgccgctgcctgctgtgcgatgaacctgcgcacgcctgcgcgcgcagccgtcgtcatgacaccggggaggttgtcgcccgcgttgagcagatgattgatgcgtggtttgcccgcgactaa

SEQ ID NO: 172628 - DNA, 1356 bp, Klebsiella oxytoca
atgagcaccacagacaatgcattctctgcaaccatcgaccctatcaataccccgaaagcgccgcttaagcagcgctggtggcatatcctcgataactggaaagtcggtattatcccgctgccgctctttctgctggccggcggcctgattgccctggactgtttaggcggcaagctgccgagcgatatcgtcgtgatggtggcgacgctggcctttttcggctttgcctgcggtgaattcggcaaacgcctgccggttctgggtaagcttggcgcagcggccatctgcgcgacttttattccttctgcgctggttcattacggcctgctgccggaggtggtggtggaatcgaccaccaaattctataagtcgaccaacattctttatctttatatctgctgcattatcgtcggcagcattatgagcatgaaccgcaccacgctgattcagggctttctgcggattttcttcccgatgctgtgcggagaaatcgtcggcatggtcgttggcgtcggcgtcggtaccgcgctagggctggagccgttccaggtgttcttctttatcgtcctgccgatcatggccggcggcgtcggcgagggagcgatcccgctgtcgattggctacgccgcgctgatgcatatggatcagggcgtggcgcttgggcgcgttctgccgatggtgatgctgggcagcctgacggcgattgttatctccggctgtttaaatcagctgggcaagcgttttccgcatttgaccggtgagggacagctgatgccgaaccgccgcaacgagacgcatcgcgaaacgcccgtcgagggcaaaatggacgtaacgacgctggcctccggcgcgctgctggcggtgctgctctatatgctgggcatgctggggcagaagaccatcggcctgcccgcgccggtgggcatgctgttcctcgcggtgctgctgaagctggtgaacggcgtctctccgcgcctgcaggagggatcgcagatggtgtataagttcttccgcacggcggttacctatccgattctgtttgccgtcggcgtggcgatcaccccgtggcaggagctggtcaacgcgtttaccgtaaccaatttgctggtgattatcagcaccgtaacggcgctggtggcgaccggtttcctggtcggcaaaaagattggcatgtacccgattgacgtggcgattgtctcctgctgccagagcggtcagggcggtaccggcgacgtggcgatactgacctccggcaaccgcatgaacctgatgccgttcgcgcagatcgcaaccaggatcggcggcgcgattaatgtttcgctgggtctgctgttcctcagtcactttctggcctga

SEQ ID NO: 172629 - DNA, 1626 bp, Klebsiella oxytoca
atgaaggtttcatttcaatttaagctgttcatttcactggtcgcttttttctcagtgcttttcgcgctgctgggcgtgtattactattttgacgccagccgtcagctttatcaggaaatgagcgcccgcgcgaaaatacaggcgcaagaaattgccctgatgccggatttacgccaacaggtcgcgcgtgaagacgcgctggcgataaaaccttttatgcaaaatatcgccgcccacagcgacgccagctttattgtcattggcgacaggcgaggcgtgcatctgtttcattcggtccacccggaatgggtcggcacgcggctggttggcggcgataaccagccggtgctggaggggaaaagcgccaccaccatccgcaaagggggactggggatttccctgcgcagcaaagcgccgattttcgacgatgcgggccgggtcatcggtattgtttccgtcggctaccttaccagctatctcgacagcatcacgctggaaaaagtcatcaatatctttgtcgccgcagtgctgctgttgattgcgctgtttatcttctcctggtacttcacccgcagcattaagaagcaaattttctcgctggagccgcgggaaatcggcctgctggtgcgccagcaaaaggcgatgatggagtcgatatacgaaggggtgatcgtaattgaccatcaccggcgtatcgaagtgataaatcatgccgcccgcagcctgctcggactgagccagccggcgcatcagctgcgcggtaagtctatcgatagcgtcattacgccgcagccgtttttcgccagcggggagatgctcgaaaacgatacccacgacgagctgtgccgctttaatcagctgaccgttctcgccagccgggtgcgtatcctgctggagagtgaactgcagggctgggtgatcactttccgcgaccgcgacgaaatcaactcgctgagcgcccagcttagccaggtgaagcgctacgttgataatctgcgcatcatgcgccatgaacagctgaaccgtatgaccaccctttccggcctgctgcatatgggccactatgatgaggcgattcgctacattcaggcgcagtcggagcatgcccaggagctgctggactttatctcatcacactttaattcgccgacgctgtgcggtctgctgctgggcaaagccgcccgcgcgcgggaaaaaggggttgaactgagctttgacccggcctgccgcattgaccgtccgctgccgtcattgatggagtccgagcttatctctatcatcggtaatctgctggataacgctattgaggctacccagcgcgccgaactgccgcacgaaccggtcgagattctgattcagctcaacgcccgggaattaatgattgaagtcgccgaccgcggcgtcggtattcgtccggagatccgcgagcatatttttgagcgcggcgtcaccaccaaaacccgcggcgatcacggtattggcctgtatcttattgagcgctacgtaacccaggccggcggcacaattgaagtggccgacaacgccccgcgcggcgcgatttttacgctgtttatccccgccagcgggccagcccatccgcaagaagagacgcactatgcatcatga

SEQ ID NO: 172630 - DNA, 699 bp, Klebsiella oxytoca
atgcatcatgacctggtcgatgttctgatcatcgaagatgaaagcgaactggcgcggctgcacgccgagcttattcaaaaacacccgcgcatgcggctggcaggcacggcggcctccctcgcccaggcgcggcagagactcaacgccaggccgccccagctggtgttgctggataattatctgccggacggcaaaggggtcacgctgatgaacgacccgatcatggcccaggctaactgctcggtgatctttatcaccgccgccagcgatatggaaacctgtagtctggcaatccgcaacggcgccttcgactacattcttaagccggtgtcatggaagcgcctgagccagtcccttgaacggtttgtgcagttctacgatcagcagcgcgagtggaagattgtcgaccagcagaacgtggattcgctgtatcagctacaggccaaaaactatcgtgccgatagcggcagtaaagggattgaagaaaaaacgctggcgctggtgcaaaatctgtttaccggcgatcaagaacgctgcttttcggtcgatgacgtggtgagcgaggctggattgagcaaaaccactgctcgtcgctatctggagcactgcgtggaaatcggctttctggaggtggaaatgctgtacggcaagattggccatccgcggcgtatgtaccgccgcgccgccagcccatcgtga

SEQ ID NO: 172631 - DNA, 828 bp, Klebsiella oxytoca
atgcagtatttgggtaaaataattggcgttgcggttgcgttgatgatgggcggcggcttttggggcgtggtactgggctttttaatcgggcatatgtttgaccgcgcgcgcagccgccggctgaacgtctttgccaaccagcaggagcgccagtcgctgttcttctcgacgacgtttgaagtgatggggcacctgaccaaatcaaaagggcgcgtcaccgaagccgatatccacgtcgccaatttgctgatggatcgcatgaatcttcatggcgaagcgcggacggcggcacagcacgcgtttcgggtagggaaatcagatgactatccgctgcgtgagaaaatgcgccagctgcgcagcgtctgttttggccgctttgatttaattcggatgtttctggaaattcagctgcaggcggcttttgccgatggcgatctgcatcccaacgaacgtgaagtgctgtttgtgattgccgatgagctgggcatctcccgcgctcagtttgagcagttcctgcgcatgatgcagggcggggcgcagttcggcggcgggtcgcagcagcaatcttacggccagcgcggcggcaacgccggctggcagcaggcgcagcgcgggcccactctggaagatgcctgcaatgtgctgggggtaaaaccgactgatgatgccgccaccgtcaagcgcgcctatcgtaagctgatgagcgagcaccatccggataagctggtggcgaaagggctaccgccggaaatgatggagatggctaagcagaaagcgcaggagatccagaaagcctgggagctgatcaaagaacagcgcggcttctga

SEQ ID NO: 172632 - DNA, 2367 bp, Klebsiella oxytoca
atgacggaacaacaaatacaacgtatgaaaaaacgtattcccagcctcctggccaccatgatcgccagcgccttgtatagccaacagggcctcgctgccgatctcgccacgcagtgtatgcttggcgtcccaagctacaatcgtcctttggtcgaagggaaacccaacgacctgccggtgacgatcgatgccgatcatgcgaaaggcaactaccctgataacgccgtatttaccggcaacgtcgatattaatcagggaaacagccggctgcaggccgatgaggtccagctccaccagcagcaggcggaaggccagccgcagccggtgcggacggttgatgccctcggcaacgtgcactatgacgataatcaggtgatcctcaaagggccgaaggcctggtcgaatctcaacaccaaagataccaacgtctggcagggcgattaccaaatggtaggccgtcaggggcgcggtaccgctgacctgatgaagcagcgcggtgaaaaccgctacaccattctggaaaacggcagctttacctcctgtctgccgggctctgacacctggagcgtggtcggcagcgaagttatccacgaccgcgaagagcaggtggctgagatctggaacgcgcgctttaagctcggttcagtgccgattttttatagtccttacctgcagctgccggtgggcgataagcgccgttcaggtttcctgatccccaacgctaaatacagcaccaaaaacggcgcggagttctatctcccttactactggaatatcgcgcctaactttgacgccaccctgaccccgcactatatgagcaagcgcggcggcgtgatgtgggaaaacgaattccgctatctgaccaaagcagggaccggtttatttgagttcgactacctgccgtcggataaaatttatcatgacgatcattcgaacgacagcaacagccgccgctggctgttctactggaaccattcaggcgtcgtagaccaggtgtggcgtttcaacgccgactacaccaaagtcagcgacccggactactttaacgatttcagctccaaatacggttccagtaccgatggctatgccacgcagaaactcagcgccggctacgcaaatcagaatttcgatgccaccgtatcgaccaagcagttccaggtctttgaccgcgactcaagcaatgcctattccgccgagccgcagctggacgtgaactactaccagaacgacgtcggcccgtttgatacgcatctttatggccaggcggtgcattttgttaactcgaacagcaaaatgccggaagcaacgcgtcttcaccttgagccaaccatcaacctgccgctgtctaacggctggggaagcatcaatactgaggcaaaactgctggccacccattaccagcaaagcaaccttgatagctacaacgcggccaacggcactgactataaagactccgttaaccgcgtcatgccgcagtttaaagtcgacggcaaaatggttttcgagcgcgatatgcaagagaactatacccagacgcttgaaccgcgcatgcagtatctgtatatcccgtatcgtgaccagagcaagatcggcagctacgactcaacgctgttgcaatcagactacagcggcctgttccgcgaccgcacctacagcggtctggaccgtattgcgtccgccaaccaagtctccaccggcatcacatctcgcgtttatgatgccgccgcagttgaacgttttaatatttccgttggtcaaatctactatttcaccgaagcacgtaccggtgacgacaacatcaactgggagaacaacgacacgcgaggttcactggtatgggccggggatacctactggcgcattaccgacgactggggtttacgcgggggaattcagtacgatacgcgtctggataacgtcgcgaccagcagcggaaccgtggaataccgtcgcgacgaaaaccgtttagtacaacttaactatcgttatgcaagtccggaatacattcaggcgactctgccttcgtattccaccgctaagcagtataaagatggtatttcgcaggtgggaatgaccgccagctggccaatcgtcgatcgttgggcagtcgtcggcgcgtattactacgatacgaataccagaaagtcagcgaaccagatgttaggggtgcagtatagctcctgctgctacgctatccgcgttggctatgaacgtaagatcaacggctgggataacagcagcagcgaaagcaaatacgacaataccttcggctttaacattgagctgcgcggcctgagctccaattacggtctcggcacccagcagatgctgcgttcgaacattttaccgtaccagagctccctgtga

SEQ ID NO: 172633 - DNA, 1287 bp, Klebsiella oxytoca
atgaagaactggaaaacgctgcttctcggtatcgccatgatcgcgaataccagtttcgctgccccacaggttgtcgataaagtagcggctgtcgtcaataatggcgttgttctggaaagcgacgtcgatggcttgatgcaatcggtaaaacttaacgccggccaggccgggcagcagctgccggatgacgccaccctgcgtcatcagatccttgagcgtctgatcatggaccagattgtcctgcagatgggtcagaaaatgggcgtgaagatcactgacgatcagctggaccaggctatcgccaacatcgccaaacagaacaacatgaccatggatcagatgcgcagccgtctggcctatgacggtattaactacaacacctatcgtaatcagatccgcaaagagatgctgatttcggaagtgcgtaacaacgaagtacgtcgccgtattaccgttctgccgcaggaagttgaaaccctggcgaagcagattggcgatcagaacgacgccagcaccgaactcaacctcagccacattctgatcccgctgccggaaaaccccacttccgagcaggtggcagaagctcaggaccaggccaactcggtggttcagcaggcgcgcagcggcgcggatttcggcaaactggcgatcacctactcagccgaccagcaggcgctgaaaggcggccagatgggctggggtcgtattcaggaactgccgggcatcttcgcccaggcgctgagcacggctaagaaaggcgatatcgttggtccggtacgttccggcgttggcttccatattttgaaaatcaacgatatgcgcggcggcagccagaatatctccgtgactgaagttcacgcccgccacatcctgctgaaaccgtcgccgatcatgaatgacaatcaggcccgggcaaagctggagcaaattgcggctgacattaagagcggcaaaaccacatttgctaaagcggcaaaagagttctctgaagatccgggttcggcaaaccagggtggtgatttaggctgggcaacgccggatatcttcgatccggccttccgcgacgctattctgcgcctcaataaaggccagaccagcgcaccggttcactcatccttcggctggcacctgattgagctgctggatacccgcaacgtcgacagaaccgacgccgcgcagaaagatcgcgcttaccgcatgctgatgaaccgtaaattctctgaagaagcggctacctggatgcaggaacagcgcgccagcgcctacgttaaggtactgagcaactaa

SEQ ID NO: 172634 - DNA, 981 bp, Klebsiella oxytoca
atgaatcgagttgttatcactcccggcgaacctgccgggattggccccgacctcgttgtgcagcttgcgcagcgcgactggccggtcgagctggtgatttgcgccgatggcgctctgttatccgaccgggcaagcctgctcggtcttcctttatcgcttctgccttatgaccctaccgttcccgctacgccgcagcgcgcaggcaccctgacgcttcttcccgtcgctctcaatgcgccggttgagccaggcgtgctcaacgtcagcaacggcagctatgtggtggaaacgctggcccgcgcctgtgatggctgtctgaacggcgaattcgccgcgctgattaccgggccggtgcacaagggcattatcaacgatgcggggatcgccttcaccggtcataccgagttctttgaagagcgctcgcaggccagtaaagtggtgatgatgctggcgaccgaagcgctgcgcgtggcgctggtgaccactcacctgccgcttaaagcaataagcgatgcgattacccccgagctgctgcgggaaatcatcaccattctgcatcacgatctgcgcaccaaatttggcatcaataacccgcacgtgctggtttgcggcctgaacccgcacgcgggcgaaggcggccatatgggcacggaagagattgataccattattccggtgctggaagagatgcgcgcgaaggggatgaatctcagcggcccgctgccggcagataccctgtttcagccgaaatatctcgaccatgccgatgcggtactcgcgatgtatcacgatcagggcctgcccgtgctaaaataccagggctttggccgcggcgtgaatattacgctcggtttaccatttattcgcacttccgttgaccacggcaccgcgcttgaacttgcgggccaggggaaagcggaagtcggcagttttatcacggcgcttaatctcgccattaaaatgattgttaatactcaatga

SEQ ID NO: 172635 - DNA, 822 bp, Klebsiella oxytoca
atgaataatcgagtccatcagggccacttagcccgtaaacgcttcgggcaaaactttctcaacgatcggtttgtgatcgacagcattgtctcggccatcaatccacagaaaggccaggcgattgttgaaatcggccccggcctcgccgcgctgaccgaaccggtcggtgaacgcctcgaccagctcaccgttatcgagctggaccgcgacctggccgctcgtctgcaaacgcatccgttcctcggaccaaagctgacgatttatcagcaggatgcgatgaccatgaacttcggcgagctgtcgcagaacatgggccaaccgctgcgcgtattcggcaacctgccgtacaacatctcgaccccgctgatgttccatctgttcagctatactgatgccattgccgatatgcactttatgctgcaaaaagaggtggtcaatcgtctggttgccgggccgaacagtaaggcgtatggtcgactaagcgtcatggcgcagtactactgccagattatcccggtgcttgaagttccgccgagcgcctttacgccgccgcctaaagttgattccgccgtggtgcgcctggtgccttaccgcacgctgccgcatcccgttaaagatgtacgcgtgctgagccgcatcacgacagaagcctttaaccagcgtcggaaaacgatccgcaacagtctgggcaatctgttcagcgttgaagttctgaccgagctgggcatcgacccggcgaagcgcgcagagaatatttccgtggcgcagtactgtcagctagctaactggttatctgagaacgcgcccaccaaggagagctaa

SEQ ID NO: 172636 - DNA, 378 bp, Klebsiella oxytoca
atgattaattcgccccgagtttgtgtacaggtgcaaagcgtctatatcgaatcgcaatcttctccgcaagaagagcgctacgtcttcgcttataccgtcaccattcgcaatctggggcggactcaggttcagcttcttggccgctactggcttatcaccaatgggcacggtcgtgagaccgaagtccagggggaaggcgttgtcggcgagcagccgcatattccggccggcggtgaataccaatataccagcggcgcggtcattgaaacgccgctgggcaccatgcagggacattatgagatgatcgatgtgaacggcgcgccgttcaccattgaaatccctgttttccgtctcgcagtacccactctcatccattaa

SEQ ID NO: 172637 - DNA, 849 bp, Klebsiella oxytoca
atgtctacataccttattggcgacgttcacggttgctacgatgaactgatcgcactattagagcaggtggagtttaaccctgagactgatacgctgtggctgacgggcgacctggtcgcgcgcggccccggttcgctcgaagtactgcgtttcgtgaaacagcttggcgacagcgtacgcatcgtgctgggcaatcatgacctgcacctgctggcggtctttgcgggcattagccgcaataaacccaaagatcggctgaaatcgctgcttgaggcgccggacgccgacgatctgctcaactggctgcgtcgtcagccgatgatgcaaatcgatgaagagaaaaagctggttatggcccacgccgggatcacgccgcagtgggatctggaaaccgctaaacagtgcgcacgcgacgtggaagccgtgcttgccagcgactcctatccgttcttcctcgatgcgatgtacggcgacatgccgaacaactggagcaacgaactgagcggactggcgcgcctgcgctttatctctaacgcttttacccgcatgcgctactgcttcccgaacggccagctggatatgtatgccaaagaggcgccggaaaacgcgcccgcgccgctcaagccgtggtttgcgattcccggcccggtggccagcgaatacagcatcgccttcggtcactgggcttcgctggaaggaaaaggcacgccggaagggatttacgcgctggataccggctgctgctggggcggcgatctgacctgcctgcgctgggaagataagacgtacttcacgcagccgtcaaaccggcagccaaatcttgatgaaggcgaggcgatcgcctcctga

SEQ ID NO: 172638 - DNA, 480 bp, Klebsiella oxytoca
atgatcagtctgattgcggcgttagcggtagatcgcgtcattggtatggaaaatgccatgccgtggaatctgcctgccgatctcgcctggtttaagcgcaataccttaaacaaaccggtagtgatggggcgtctcacctgggaatctatcggtcgcccgttaccggggcgtaaaaatatcgttattagcagccagcccggcaccgacgatcgcgtgcagtgggtgaagtcggtcgatgaagccatcgccgcctgcggcgacgtcgaagagatgatggtgatcggcggcggacgcgtttatgagcagttcctgccaaaagcgcaaaagctttatctgacccatattgatgcggaagtggaaggcgatactcatttcccggattacgatccggacgagtgggagtcggtattcagcgagttccacgatgctgatgcgcagaattcccatagttactgcttcgagattctggagcgtcgctaa

SEQ ID NO: 172639 - DNA, 1866 bp, Klebsiella oxytoca
atggatagccatacgctgatacaggcgctcatctatttaggctccgccgcgctgatcgtgccgattgccgtacgtctgggcttagggtcggtgctcggctacttaattgccggctgcattattggcccgtgggggctgcggctggtcaccgacgccgagtcgattctgcacttcgcggaaatcggcgtggtgctgatgcttttcgttatcggtcttgagctcgatccccagcgcctgtggaaacttcgcgcttcggtgttcggcggcggggcgctgcagatggtcgtctgcggcgtgctgatcggcctgttctgcatgtcccttggtctgcgctggcaggttgccgagctgattggcatgacgctggcgctctcttcaacggcgatcgctatgcaggcgatgaacgagcgtaacctgacggtcacccagctgggccggagcgcctttgcggtgctgctgttccaggatattgcggctattcctctggtggcgatgatcccgctgctggcggcgagcggcggctcgacgacgctgggcgcgtttgcactctcggccctgaaagtggcgggtgcgctggcgctggtggtggtgcttggccgctatctgacccggccgatgctgcgttttgttgcgcgctccggcctgcgtgaagtcttcagcgccgtggccctgttcctggtgtttggcttcgggctgctgctggaagaggttgggctgtcgatggcgatgggggcattcctggccggggtgctgctggcgagctcggagtaccgccacgctctcgaaagcgatattgaaccgtttaaggggctgctgctggggctgttttttatcggcgtcgggatgtctatcgacttcggtactctggtgactcatccgctgcggatcctgattttgctggtgggatttctggtgattaaatccctgatgctgtggttgatcgccaggccgttaggcgtacctcgcgcgcagcgccgttggtttgcggtgctgctggggcaggggagtgaatttgtctttgtggtcttcggcgcggcgcagatggccgatgtcctggacggcgaatgggcgaaggcgctgaccctggcggtggcgctatcgatggctgccacgccaatcctgctggtgttgctgacccgtctggagaaatccaccagcggtcaggagcgcgaggcggatgaaattgacgaagagcagccgcgagtaattattgccggctttggccgctacgggcagattgccggccgcgtgctgctctccagcggcgtgaagatggtgattctcgatcacgatcctgaccacgtcgataccctgcgtaagtttgatatgaaggtgttctacggcgatgcgacgcgggttgacctgctggagtcggcgggggcggaaaaagcggaagtgctgattaacgccatcgacgatccgcagacaaacctgcagctggcggagctggcaaaagagcatttcccgcatctgcagatcatctcccgcgcccgcgatgtcgatcattacatcaagctgcgccaggccggcgttgaggcgccggagcgtgaaacctttgaagcggcgctgaagtccgggcgtatgacgcttgaggcgctgggcctgggagcctacgaggcccgcgagcgcgccgatctgttccgccgtttcaacctgcaaatggtcgaagagatggtggccatggcggaaaacgatgcggcctcccgggtggcggtattcaagcgcaccagcgatatgctgaccggaataatcaacgaagaccgcaaccatttatcgctggttcagcgtcatggctggcaaggaacggaagaggggaggcataccggtgatatcgctgatgagccggaaaataaacccccggcataa

SEQ ID NO: 172640 - DNA, 126 bp, Klebsiella oxytoca
atgacatggctaccgccgtttgcgatgcattgcacttttatctgcgatgacgaaaccctacaggcgcaggcgcgccgctatcggcaacgcttaatcgaatggcaggaggcgcacaaccatggatag

SEQ ID NO: 172641 - DNA, 402 bp, Klebsiella oxytoca
atgatcctcataatttatgcgcacccttatccgcagcactcgcatgcgaataagcggatgcttgagcaggcagggacgcttgacggcgtagagatacgctccctctatcagctttatcctgactttaatattgatatcgccgccgagcaggcggcgctggctcgtgccgatctggttatctggcagcatccgatgcagtggtacagcgtgccgccgctgctcaagctgtggatggataaagtgctggcgcacggctgggcatacggtcacaacggtatcgcgctgcgcggtaaatcgctgatgtgggcggttactaccggcggcggcgaaagccactttgatattggttcctttcccggtttcgacggccgctgcaggcgacagccctctactgcggcatga

SEQ ID NO: 172642 - DNA, 234 bp, Klebsiella oxytoca
atgtacaacaagcccctcaccgccgctatttttgccgctgctgcgcttttcaccgtggctggctgttcatctaatcagtcgctaaaaaccaccgatggcaaaactattgtcaccgatggcaaaccccaggtggatgacgacaccggtctggtgtcctacaaaaacgcggaaaccggtcgtaccgagcagatcaatcgcgatcaggttaaatcgatggatgaactggataactaa

SEQ ID NO: 172643 - DNA, 885 bp, Klebsiella oxytoca
atggcgatacttttgtttgattggggcggcacatcgattaaatatggcgtctggcagcagggggagctgaaggacaccgcatcggttgagacgcctgatagctgggaagagatgaaaaatcggctattggaactttatcaacagtttcagtcgcgctacgccattgatgggatctcaattagtgctcctgggtgcgtggatccgcagagcggggtcattagcggcctgagcgccattccctatattcatcactttcccatcgtcgaagagctttccgggctgtttttactgccggtatgcattgagaacgacgccaactcggcgggtatcgccgaggcggcattgggcgcgggccgcgagtatgacagcgtactgtttgtgattgccggttcaggtatcggtggcgccattgtcgacaataaagtcctgcgccacggcagccatcgctacgccggggaatttggcatgatgaccctgcacgaggggcaaacctttagcgaactggcaaccgccgtcgctacggcgcgtcgttatgcccggcgcatgtcgctggcggctgactccgtctccggagaggatgtctttcgcctggctgaggagggcgacaatatcgcgcagcaggaagtggcgcagttttaccactggatggcgataggcttactgaatttgcaggtgtgctacgacccagactgcctgattatcggcggcggtatctccgccagcgataagatttttaacggcatcaagcagcgcctgaacgagctggtgaatgaaaaagatttagcagaatttttaccgcaggtggtgctctgccaataccgcaacgatgctaacctgatcggcgcggcggtgaacttcgaacaaaaacagagggatcggcgctaa

SEQ ID NO: 172644 - DNA, 3225 bp, Klebsiella oxytoca
atgccaaaacgtacagatataaaaagcatcctgattctgggcgcgggcccgattgttatcggtcaggcgtgtgaatttgactactccggcgcccaggcgtgtaaagcgctgcgcgaagagggctaccgcgtcattctggtgaactctaacccggccaccatcatgaccgacccggaaatggccgatgctacctacatcgagccgattcactgggaagtggtgcgcaagatcattgagaaagagcgtccggatgcggttctgccgaccatgggcggccagacggcgctgaactgcgcgctggagctggagcgtcagggcgtgctggcagagttcggcgtgaccatgattggcgcgaccgccgacgcgattgataaagcggaagaccgccgccgtttcgacgtggcaatgaagaaaattggcctcgacaccgcgcgttccgggatcgcacataccatggaagaagcgctggcggttgccgctgaagttggcttcccgtgcatcatccgtccttcctttactatgggcggcaccggcggcggtatcgcctacaaccgcgaagagttcgaagaaatctgcgaacgcggtctggatctctcgccgacgaatgagctgctgattgatgagtcgctgattggctggaaagagtacgagatggaagtggtgcgtgataaaaacgacaactgcatcatcgtctgctctattgaaaacttcgacgcaatgggcatccacaccggcgactctatcaccgtcgcgccggcacagaccctgaccgataaagagtaccaaatcatgcgtaacgcctcgatggcggtactgcgtgaaatcggcgtagagaccggcggttccaacgttcagttctcggtgaacccgaaagatggccgcctgatcgttatcgaaatgaacccgcgcgtctcccgctcctcggcgctggcctcgaaagccaccggcttcccgatcgctaaagtggcggcgaagctggcggtcggttacacccttgatgagctgatgaacgatatcaccggcggccgcaccccggcgtcgtttgagccgtccatcgactacgttgtgaccaaaatcccacgcttcaactttgaaaaattcgtcggcgccaacgaccgtctgaccacccagatgaaatcggtgggcgaagtgatggcgattggccgcacccagcaggaatccctgcagaaagcgctgcgcggcctggaagtcggcgctaccggcttcgacccgaaagtgagcctcgatgatccggaagcgctgaccaagattcgccgcgaactgaaagatgctggcgctgagcgtatctggtacatcgctgacgctttccgcgcgggcctctccgttgatggcgtattcaacctgaccaatatcgaccgctggttcctggtgcagattgaagagctggtgcgtctggaggagaaagtggctgaagtcggtattaccggcctcgacgccgacttcctgcgtcagctcaagcgtaaaggctttgccgatgcgcgtctggcgaagctggctggcgtgcgcgaagcggaaatccgcaagctgcgcgaccagtatgacctgcacccggtctacaagcgcgtggatacctgcgcggcggaattcgctaccgatactgcctatatgtactccacctatgaagatgagtgcgaagccaatccgtccgttgaccgcgataaaatcatggtgctcggcggcggcccgaaccgtatcggccagggcatcgagttcgactactgctgcgtccatgcctccctggcgctgcgcgaagacggctacgagaccattatggtcaactgtaacccggaaaccgtctctaccgattacgacacctctgaccgcctctactttgaaccggtgacgctggaagacgtgctggaaatcgtgcgcattgagaagccgaaaggcgttatcgtgcagtacggcggccagacgccgctgaagctggcgcgcgcgctggaagccgcaggcgtgccggttatcggcaccagcccggatgcaatcgaccgtgcggaagaccgtgagcgcttccagcacgcggttgaccgcctgaagctgaagcagccggcgaacgccaccgtgaccgcgatcgaaatggcggtcgagaaggcgaaagagattggctacccgctggtggtgcgcccgtcctacgttctcggcggccgcgcgatggaaatcgtctacgacgaaatcgacctgcgtcgctacttccagaccgccgtcagcgtctctaacgatgcgccggtgctgctggaccgcttccttgacgatgcggttgaagttgacgtcgatgccatctgcgacggcgaaatggtgctgattggcggcatcatggagcatatcgagcaggcgggcgtacactccggcgactccgcgtgttcgctgccggcctacaccctgagccaggaaattcaggatgtgatgcgcgagcaggtgcagaagctggcctttgagctgcaggtacgcggtctgatgaacgtgcagtttgcggtcaaaaacaacgaagtctacctgattgaagtcaacccgcgcgcggcgcgtaccgtcccgtttgtctcgaaagccaccggcgtaccgctggcgaaagtcgcggcgcgcgtgatggcgggcaaaacgctggctcagcagggcgtcactaaagagatcatcccgccgtactattcggtgaaagaggtggttctgccgtttaacaaattcccgggcgttgacccgctgttagggccagaaatgcgctctaccggtgaagtcatgggcgttggccgcaccttcgcggaagcgttcgccaaggcgcagttaggcagcaactcgacgatgaagaaacagggacgcgcgttgctctccgtacgcgaaggcgacaaagagcgcgtggtggatctggcggcaaaactgctgaagtttggtttcgagctggatgcaacccacggtactgcgattgtgctgggcgaagccggcatcaacccgcgtctggtgaacaaggtgcatgaaggccgcccgcacattcaggaccgcatcaagaatggcgaatacacctacatcatcaacaccaccgcaggccgtcaggcgattgaagactccaagctgattcgccgcagcgccctgcagtacaaagtgcactacgacaccacgctgaacggcggtttcgctaccgcaatggccctcaatgccaacgcgatagagaaagtgacctcggtgcaggaaatgcacgcgcagattaaaaagtaa

SEQ ID NO: 172645 - DNA, 1149 bp, Klebsiella oxytoca
ttgattaagtcagcgctattggttctggaagacggaacccagtttcacggtcgggccattggggctaccggcacggcggttggggaagtcgttttcaatacttcaatgaccggttatcaagaaatcctcactgatccttcctattcccgccaaatcgtcactctaacttatccccatatcggcaatgtcggcaccaatgccgccgatgaagaatcttctcaggtacacgcgcagggtctggtcattcgcgatctgccgctgattgccagcaacttccgcaataccgaagacctctcttcttatctgaagcgccataacattgtagcgattgccgatatcgacacccgtaagctgacccgcctgctgcgtgaaaaaggcgcgcagaacggctgcatcatcgccggcgatagcccggatgcgcagctggcgctggaaaaggcaaaagcgttcccgggccttaacggtatggatctggcgaaggaagtaaccaccgcagaaacctacagctggacgcagggaagctggacccttgcgggtgacctgccggaagccaaagcggaaagcgagctgccgtttcacgtggtggcctacgatttcggcgccaagcgcaacattttgcgcatgctggtagaccgcggctgccgtctgacggtggttccggctaagactcctgccgaagaggtgctgaagatgaatccggacgggatcttcctgtccaacggtcccggcgacccggcgccttgtgactacgctatcgacgcgattgagaagtttctggaaaccagcgttcctgtattcggcatttgcctcggccaccagctgctggcgctggcgagcggcgcgaagaccgtgaagatgaagtttggccaccacggcggcaaccatccggtaaaagatattgataacaacgtggtgatgatcaccgcgcagaaccacggtttcgcggtggatgaagcgtctatgccggccaacctgcgcgtcacccataagtcgctgttcgacggcaccctgcaggggattcatcgtactgacaaaccggcgttcagcttccagggacacccggaggcgagccccggcccgcacgatgccgcaccgctgttcgaccattttatcgagttaattaagcagtaccgtcagtccgcgaaataa

SEQ ID NO: 172646 - DNA, 822 bp, Klebsiella oxytoca
atgcatgatgcacatatccgcgtggccatcgcgggcgcgggcggccggatgggacgccagttaattcaggcggtacagcagatggaaggcgcggcgcttggcgcggcgctggagcgcgaaggttcctcgctgctcggcagcgatgcgggcgaactggcgggcgcgggcaagtcaggggtggtggtgcagagcagccttgaggcggtaaaagacgatttcgatgtcttcatcgatttcacccgtccggaaggcacgctgaaccatctcgctttttgccgtcaacatggtaaaggcatggttatcggcaccaccggttttgacgacgccgggaagcaggccattcgcgaggcgtcgcaggagatcgccatcgtctttgccgccaactttagcgttggcgttaacgttatgcttaagctgctggagaaagcggcgaaggtgatgggcgactataccgatattgagattattgaagcgcatcatcgccataaagtcgacgcgccatcaggtacggcgctggcgatgggcgaggcgattgccggcgcgctggataaagatctgaaggagtgcgcggtatacagtcgcgaaggctataccggtgaacgcgttcccggaaccatcggctttgcaaccgtgcgcgccggggatatcgtcggcgaacatacggcgatgtttgcggatatcggcgaacgtattgaaatcagccataaggcttccagccggatgacttttgcaaatggtgccgttcgctctgcattatggctaaaaggcaagaaaaatggtctttttgatatgcgtgatgtgcttgaactgaactctttataa

SEQ ID NO: 172647 - DNA, 909 bp, Klebsiella oxytoca
atgagcgaagtgataataagccagcatcggccattgagccgtcaaacggtgacggctgaggagatggtttctcgcgtgggacgggcgctactgactgaagttcgcctgacgccgaagccgggtctggtggatattcgtaatgccggcgcgcatcgggatatggatctggccacctttgaggccagtacggcggttgtcgccccgtggatggagaagtttttcattatgggacacgacaccgccaatatcacgccggaacaggtgttgacgatgctgcgtccggtgggcatggcctgcgagacggatatgctggaagccaccggcggggtgaacacccatcgcggcgcgatcttcgcttttggcctgctctgcgcggcggcgggaagactggttgccagaggggagccggttgaacagcatcgggtttgcgatcaggtggcccgattctgtcgcggcctggtggcgcgcgagctctcctcctctgaaggaaagaaggtgagcaaaggcgaagggcatttcctgcgctacgggctctccggtgccagaggcgaagcggaaagcggctttcacaccgtgcgcactcaggcgatgccggtattcaatcgcgtcatggcgaataccggcgacgccaatctggcgttattgcagaccctgctgcatctgatggcctggaatgacgataccaatctggtatcgcgcggtgggctggaagggctgaattttgttcagcagcaggcgcaaaagctgctgtgggaaggcggagtgctggccgatggcgggctggaagcgctgcgccagctggatgatgaactgattgttcgccatcttagccctggcggcagcgctgacctgctggcggtaacctggttcctgtctggttttcctgccggggagatgttcctgcattaa

SEQ ID NO: 172648 - DNA, 1527 bp, Klebsiella oxytoca
atgaaagagaccgtggcaatgcttaatcaacagtacgtcatgccggaaggattagaaccttacgcaggggtaacggcgaagagtccgtggctggccagtgaaagcgaaaagcggcagcgtaaagtctgcgcttcgctggaggaggcgattcgccgctccgggctgcaaaacggtatgaccatctcctttcatcacgcgtttcgcggcggtgacaaggtggtcaatatggtggtggcgaagctggctgaaatgggctttcgcgatctgacgctggcctcaagctcgctgatcgacgcccactggccgctgatcgagcacataaaaaacggcgtgatccggcagatttacacctccggtctgcgcgggaagctgggggaagagatctccgccgggctgatggaaaatccggtacaaatccattcccacggcggccgggcgtatttagtgcaaaccggtgagctaaccattgacgtggcgttcctcggcgtgccgtgctgcgatgaatatggcaatgccaacggctttagcggtaaatcccgctgcggctcgctgggttacgccaaagcggatgccgatgccgccagatgcgtggtactgctgactgaagagtgggtggattatccgaactatccggccagcatcgcccaggatcaggtggatctgatcgtgcaggttgatgaagtcggcgatccggcgaaaatcaccgctggcgcgatccgtctgaccagcaacccacgcgagctgctgatcgcccgccaggcggccaaagtcatcgaacattcgggctacttcaaagagggcttctctttgcaaaccggtaccggcggcgcatcgctggcggtaactcgcttcctcgaagataagatgcgtcgtaacaatatcaccgccagctttggtttgggcgggattaccggcacgatggtcgatctgcatgaaaagggcttgatcaaagcgctgctggatacccaatctttcgacggcgatgccgcccgttcgctggcgaacaaccctaatcatatcgaaatttccgctaatcagtacgccaatcccggttcgaaagggatctcctgcgaacgcctgaatgtggtgatgctcagcgcactggaaatcgacaccgggtttaacgttaacgtgatgaccggctccaacggtgtactgcgcggggcgtccggcggccatagcgatacggcggcaggcgcggatttaaccattatcaccgcgccgctggtgcgtgggcgtattccgtgcgtggtggagaaagtcctgactcgcgtcacgccgggggccagcgtggatgtgctggtgaccgaccacggtattgccgttaacccggcgcgtcaggacctgattgataacctgcgtaacgcgggcatccagctcatgaccatcgaagagctacagcagcgcgccgaactgttgaccggcaagcctgatccgatcgaattcaccgatcgggtcgtggccgtggtgcgctatcgcgatggttcggtgatcgacgtgattcgtcaggttaaaaccgctggttaa

SEQ ID NO: 172649 - DNA, 870 bp, Klebsiella oxytoca
atgaaacctcgtcgcagtatgctgtttatccccggcgccaacgccgcgatgttaagcacctcttttgtctacggcgctgacgcggtgatgtttgacctcgaagacgccgtctcgctacgagaaaaagataccgctcgcctgctggtgcatcatgcgctccagcatccgctctaccgggatgtggaaaccgtggtgcgtattaacccgctcagcacgccgttcggccttgccgaccttgaggcggtggtgcgggctggcgtcgacatggtgcgtctgccgaaaaccgatagcaaagaagatattcatgagctggaggctcacgtcgaacgtattgagcgcgagtgcggccgggaggtgggcagcaccaaattaatggcggcgattgagtcggcgctgggcgtggtgaacgcggtagaaatcgcccgcgccagtccgcgtctgtcggccattgcgctggcggccttcgactacgtcatggatatggggacctgccgcggcgacggtacggagctgttctacgcccgctgcgcggtgctgcacgcggcccgcgtcgccggaatcgcggcctatgacgtcgtgtggtcggacattaacaatgaagagggtttcctcgcggaagcgaatctggcgaaaaatctcggctttaacggcaaatcgctggttaacccgcgccagattgagctgctgcaccaggtttatgccccaacgctgaaagaagttgagcatgcgcgggacgtcatcgcggcggcggaagaggcggaagaacgcggactcggcgtggtctcgctaaacggcaagatgatagatggaccgattatcgatcatgcgcgcaaagtcgtggcgctgtcggcttccggcattcgtgattaa

SEQ ID NO: 172650 - DNA, 294 bp, Klebsiella oxytoca
atggaaatgatgattgacgccctggccggcacgctggagtccagcgatgtgatggtcaggattgggcctgcgaatgagccaggtattcagcttgaaatcgacagcattgtgaagcagcagtttggcgcggcgattgaacgcgtcgtcagagagacgctgacccagcttggcgttacccgggcgaacgtcgtcgtcgatgataaaggcgcgctcgaatgcgtgctgaaggctcgcgtccaggccgcagcgctgcgcgcggcgcaacaatctcaaccgcaatggagccagctatga

SEQ ID NO: 172651 - DNA, 1029 bp, Klebsiella oxytoca
atgaatctgatattaaaacgcgtcgtggtacagaaagatccccggcggcgagaggccgttgacctctttcttcatcagcatcagctctcgctggaggcggattgcgaaatagtgattgtcgccgagtaccagcggcgcattgttggctgcggcgcgattgccggatgcgtgctgaagtgcattgccgtcgacccgtcgctgcagggagaagggcttagcctgaagctgctgactgaactgatgaccctggcgtatgagctgggccgcagcgagctgtttctgttcactaaaccttataacgcggccctcttttcctgcgccggtttttggcctatcgcccgtgcgggcgacagggccgttttgatggagaacagccgcgaacgcctggcccgctattgccgccagctcaggatgtatcgccagcccggagaaaaaatcggcgccatcgtaatgaacgccaatccctttacgctggggcatcgctggctggtggagcaagccgctcgccagtgcgactggctgcatcttttcgtggtgaaggaagatgcttcatttttcagctaccaggatcgcgtggcgctgatcgagcaggggatcgccgggatcgataacgtgaccctgcatccgggatcgtcctatctgatctcgcgcgccactttccccggctacttcctgaaagacaaaggcgtggttgacgattgccactgccagatcgatctgcagctgtttcgcgaacatttagctccggcgctgggggtcacccaccgctttgtcggcagcgaaccgctgtgcgaattaacccgtaattacaacctgcgtatgcgacagctgctggaagcgcccggcgacgcgccgaccattgaagtggttgagctggcgcgggttgagaaagagggcgcgccgatttccgcttcccgggtgcgcaagctgtatcagcagcgccagtggtcggctatcgagccgctggtaccgccgggaacgctcgcttttctgatgcatctggcggaaagcgaacgccagaccgcctga

SEQ ID NO: 172652 - DNA, 1341 bp, Klebsiella oxytoca
atgactaatatgagccaggctccttcgacggagaaaaatggtgtaagtgaactgctgaagtttaaaatcttcggcatgccgcttccgctatacgcgtttgcgttaatcactttactactttcacatttttataacgcgctgccgaccgacattgttggcggcttcgccatcatgtttattatcggcgccatctttggcgaaattggcaaacggctgccgatatttaataaatatattggcggcgcgccggtgatgatcttcctcgtagctgcttatttcgtttacgcaggcatttttacccaaaaagaaattgatgcaatcactaatgtgatggataaaagcaatttcctgaacttattcatcgcagttttgataactggcgcaattctctcggttaaccgtaaactgctgttgaaatcgctgctgggttatattccgacgatccttatggggatcctcggcgcatctatcttcgggattatcatcggcctgtgcttcggtatttccgtagaccgcatcatgatgctgtacgttctgccgattatgggcggcggcaacggcgcaggcgcggttccgctgtccgaaatttatcactccgtcaccggccgctcccgtgaagagtactactccaccgcgattgccattctgaccatcgccaatatcttcgccatcgtttttgccgcactgctcgatattatcggtaaaaaacacacctggctgagcggggaaggcgaactggtacgtaaagcctcctttaaagtcgatgatgatgaaaaagcaggccagattacccatcgcgaaacggcggtcggcctggtgctcgccaccacctgtttcctgctggcctacgtcattgctaagaaaattttgccaagcattggcggtgtctcaatccactatttcgcctggatggtgctgatcgtcgcggcgctgaatgcttccggcctctgctcgccggagatcaaagccggggccaaacgcctgtctgacttcttctctaagcagctgctgtgggtactgatggtcggcgtcggcgtgtgctacaccgacctgcaggaaattatcgacgcgattaccttcgcgaacgtcatcatcgctgcggtaatcgtcgtaggtgctgtcgtcggggcggccgtcggcggctggatgattggcttcttcccgatcgaatccgccatcaccgcaggcctgtgcatggctaaccgcggcggctcaggcgacctggaagtgctctctgcctgtaaccgtatgaatcttatctcttatgcgcaaatctcctcccgtctgggcggcggtattgtgctggtcatcgccagcattgtgttcggcatgatgatgtaa

SEQ ID NO: 172653 - DNA, 1401 bp, Klebsiella oxytoca
atggccgtattcgcccttcagaatcccggcggtctccttcgcgatggttttgtagcgctcgccggtcagcacgttcagcaccgcctgggtgccgacaatctgcgaggtcggggtgaccagcgggatgaagccgaggtcctcgcgcacgcgggggatttccgccagcacctcatccagacggtgggcggcgttctgctgcttcagctggccctcgaggttggtgagcatcccgcccggcacctgggccacgaggatacggctgtcggtgcccttcagctggccttcaaaggcgtggtatttcctgcgcacctcgcggaagtacgccgcgatgctttcgagcttcaggatatccagcccggtgtcgtgctcagtacccgccagggtggcgaccagcgcctcggtggccgggtggccgtaggtggcgctcatggaagagatggcggtatcaacgccgtcgacgcccgcctcgatggccttcagcagggccatctccgccatcccggtggtggcatgagcatgcaggtgcagcttcacgtcgtagcgttttttgatttcactcaccagcgcaaaggcggcccccggggtgagaatgccggacatgtctttaatcgcgatggagtcgacgccggtctccagcagctgttcggtcaggtcaagccaggtctgcagggtgtgggccggactggtggtgtaggagagcgtgccctgggcgtgggcgccgtggctgcggacggcctgcagggcggctttcatattgcgcgggtcgttcatggcgtcgaagacgcggaacacgtccatgccgtttttgacggcgcgctcagtgaagcgctccaccacgtcatcggcgtagtggcggtagccgagcaggttctggccgcggagcagcatctgcagcggggtcttcggcatggcctttttgagctcgcgcaggcggacccacgggtcctcgccgaggaagcggatgcaggcgtcaaaggtggcgccgccccagcattcaagggaccagtagcccgcgtcgtcgagctgagcggcaaccggcagcatatcgtcgaggcgcaggcgggtggcgaaaagggactggtgggcgtcgcgcaggacgacatcggtaatggcaacggtcatggattcctccgtgaattaagggttaagtcggcgatggtggtggagagcggcggcaatcaccggcttcaagcgggcgaaatcgtcggcgggcgcggcgggggcgcaggtgccgccttcggggccggagccggttcagggaagaagcggttgacggcggcggacatgccctggatggcgaaaatcagcagaaacagaaacgccagcacgaaccccatgccgaggaacatcagggtgaagccttcacccagcagtacagcttcagtcattgaaaaaccctaa

SEQ ID NO: 172654 - DNA, 1065 bp, Klebsiella oxytoca
gtgattgcggcgaagctcaactgcgcgccggacgtccacgccatcaaagaggcgctggccctggccctgccgtcggtgcaggggcagatggaggacctcgccgtggatatgggctactccgccggggtgctggcgattttctataaggtcgccatcggctcgggcatcgccccgctggtgatttttatgggcgtcggggcgatgaccgacttcggcccgctgctggccaacccgcggaccctgctgctgggggcggcggcgcagttcggcatcttcgccacggtgctgggggcgctgacgctgaactacttcggcatcatcagcttcaccctgccgcaggcggcggccatcggcatcatcggcggcgcggacggcccgacggcgatttacctctccgggaaactggcgccggaattactcggcgccatcgcggtggcggcgtactcgtatatggcgctggtgccgttaatccagccgccgattatgaaggcgctgaccagcgagaaggagcggaaaatccgcatggtgcagctgcgcacggtgagtaagcgggaaaaaatcctcttcccggcggtgctgttgctgctggtggcgctgctgctgccggacgcggcgccgctgctggggatgttctgcttcggcaacctgatgcgcgagagcggggtggtggagcgcctgagcgacacggtgcagaacgggctgataaatatcgtgacgatattcctcggattatcggtgggggcgaagctggtggcggacaagttcctgcagccgcagacgctggggatactggtgctgggggtgacagcgttctgcgtgggcacggcggcgggcgtgctgatggcgaagctgctgaacctgtgcagccggcacaaaatcaacccgctgattggctccgccggggtgtcggcggtgccgatggcggcaagggtgtcgaataaggtggggctggagtcggacgcgcagaacttcctgctgatgcacgcgatggggccgaacgtggcgggggtgattggctcggcgattgccgccggggtgatgctcaagtacgtgctggcgatgtga

SEQ ID NO: 172655 - DNA, 702 bp, Klebsiella oxytoca
atgaatgaaaccataacattacgccccgaaagcagggcatcgacaaaagatgtcattatcgattacatgctggcatcagtagatgaagttgaacaactgcagcccgcgcttaacctgttagcgcacccatcggttgcccgcggaggccatgatttttttgtccattgctatgaggcgggtacgcaaaataaagcagctgaaacagaaccggcgctacctgatacggtatttcgggactccacgccgtggatgcaaagaagtgggctgctgtgtgccgcagcgggtcatctggatgcccgggggctggcgctgacgcacaatcgtctgtgcgacctggccggtcagtattgtgccggcgcggcggatgccgatgctgaaatccgcagcggattttataccgtgcgcagcatatcgctgccggtttaccggcgactgctgcgggacaagcatcctcatggcgtctgcctgcagcagtcgctgctgcatctgctggcctggaagagcgaatcaccctgggcgcggcagcaggctcaacggttgctctggcagggcggcgtactgggtgataacggcgaatttgcgctgatgacgctcgatgacgagctgcgggagcggcagtttgcctggccggggctgtggtcgctgctggccgtcaccgggtttctggcgaaattcccggccgggccgatttttgctgattaa

SEQ ID NO: 172656 - DNA, 1119 bp, Klebsiella oxytoca
atgtccggacaagtcgtgttatgcttcgcctgtctatccatcaaagatatctgcatcatgcctgcaaagcttttacgttcgatacttatcggtttgatcgtcggcggtttgctgctggccgtcatgccttccctgcgccagtggcagctttcgccgaccacgcaatacgatagcgcggatgaatcccccgccagctataattccgccgtccgtcgcgcggcgcctgcggtcgtcaatgtctataaccgcgcccttaacagcaccagtcataatcagttaacgctcggctccggcgtgatcatggaccagcgcggctatattctgaccaacaagcacgtcatcaacgatgccgatcagattattgttgccctgcaggatggccgggtctttgaagcgctgctggtcggctcagataccctcaccgatctggcggtattaaaaatcaacgccagcggcggtctgccggttattccgattaacccgaaacgcgtgccgcatatcggtgacgtcgtgctggcgattggcaacccgtacaacctcgggcaaaccattacccagggcattatcagcgccaccgggcgtatcggtctgaaccccactggacgccagaacttcctgcagaccgatgcgtcaatcaaccacggtaactccggcggcgcgctggtgaactcgctgggcgagcttatgggtatcaataccctgtcatttgataaaagcaacgatggcgaaacgccggagggcatcggctttgcgattcctttccagctggcgaccaagattatggataagctgatccgcgatggccgcgtgattcgtggctacattgggatcagcggccgcgaaattgcgccgctgcacgcgcagagcggcggcggtatcgatcaattgcaggggattgtagtcaatgatgtggcgccggaaggcccggcagcccaggcagggatccgcgccaatgacgtgattatttcggttaacgataaacccgccgtttccgccctggaaaccatggatcaggtcgcagagatccgtccgggctcggaaattccggtggtgattatgcgtgacgataaaaaaattacgctgcatatcgccgtacaggaatatcctgcgaccaactaa

SEQ ID NO: 172657 - DNA, 1368 bp, Klebsiella oxytoca
atgaataaaccaactttgctgttgagtgcgttagcgttaagcattgggttgtcgttgtcagccttacctccggcagcagcgtctttaccgacacaagttccgggccagggcgcgctgccaagcctcgcgccaatgctggaaaaagtgttgccggcggtggtgagcgtacaggttgagggtaccgcgtcacccgcgcaggatatgccggaagagttgaaaaaatattttggcgacaacgcgccgcaagagcaggcgcagccttttgaaggactgggttctggggtcatcattgatgccgcaaaaggctacgtgctgaccaataatcacgtcattaatcaggcccagaagatcagcgtccagctcaacgacgggcgtgagttcgatgccaaactggtcggcagcgacgagcagagcgatattgcactgctgcagatcctcaagcccagtaatttgacgcaaatcgctatcgccgactcggacaagctgcgggttggcgacttcgccgtcgccgtcggtaacccatttggcctgggtcagaccgccacatccgggattgtttccgcccttggccgcagcggcctgaaccttgaggggctggaaaactttatccagaccgatgcttccattaaccgcggcaactccggcggcgcgctgctgaacctcaacggcgagctgattggcatcaacaccgccattctggccccgggcggcggcagcgtcggcattggtttcgccattcccagcaatatggcaaaaatcctctctcagcagcttatccagtttggcgaaatcaaacgcggcctgttgggtattaaaggaatggaaatgagcgcggatatcgccaaagcgatgaatcttgacgtccagcgcggcgcattcgttagcgaagtcctgccaaactcggggtcggctaaagcgggcgttaaatctggcgacgttatcgtcagcctgaacggcaaaccgctcaacagcttcgccgaactgcgttcacgcatcgccacgaccgagccgggaaccaaggtgaaattaggactattgcgtgaagggaaacccgttgaagtggaggtcacgctggacaagagcacctcgtcttccgccagcgcagagcttatcgctccggcgctacagggcgcatcgttaagcgacggtcagatgaaggatgggaccaaaggcgtcatcattgataacgtcgataaaggcagccctgccgcgcaggccggcctgcataaggacgatatcattattggcctcaatcgcgaacgcgtgcgctcgattgccgaactgcgaaaagtactcgaaagcaaaccgacggtcattgcactgaacgtcgttcgcggcagcgaaagcatctatctactgctgcgctaa

SEQ ID NO: 172658 - DNA, 399 bp, Klebsiella oxytoca
atgacctgggaatacgcgctaattgggctagttgtcggcatcattatcggtgccgtcgcgatgcgttttggcaatcgtaaattacgccaacagcaggcgctgcagtttgaactggaaaagaataaagcagagctggaggagtaccgcgaagagctggtgagccatttcgcccagagcgccgagcttctggataacatggcgcatgattaccgccagctgtatcagcatatggcgaaaagctccagcaacctcctgccggacaccatggcggacgctaatccgttccgcaatcgtctggaagagtccgaagcgggcaacgatcaggctccggtccagatgccgcgcgactattctgaaggcgcatccggtctgctgcgcggcggtgtaaagcgcgattga

SEQ ID NO: 172659 - DNA, 1134 bp, Klebsiella oxytoca
atgcaaagcctgtccccaacatcgcgttacctttccgctctcaaagagggaagccatcaacctgacgacgttcagcgagaagcggtcagccgcctcgatacgatttatcaagaattgcagaataaaccttcggtagcgccgcaaaccggcggcggtctgcgggcgaaattcggcaagctgctgggcaagcgtgaacccgctgtcgaaacggccgcagttcgcggtctctatatgtggggtggggtcggcagagggaaaacctggctgatggatctgttctttcaaagtctgccgggagaacgtaaacaacgtctgcattttcatcgctttatgctgcgggtacatgaagagttaaccacgctgcaggggcacagcgatccgctggaaatcgttgcggaccgttttaaagctgaaaccgatgtgctctgctttgatgagttttttgtctctgacattaccgatgcgatgctgctgggcggtctgatgaaagcgctgtttgcccgcgggataaccctggtggcgacgtcgaatattcctcctgacgaactgtaccgtaacggtctgcagcgcgcccgcttcctgcctgcgatcgacgcgattaagcagcactgcgatgtgatgaatgtcgacgccggcatcgattatcgtctgcgcacgctgacccaggcgcacctgtggctgtcgccgctgaacgctgagacccgccagcagatggacaaactgtggctggcgctggcgggcgcaaagcgcgagcagatgccaacgctggagataaaccaccgcccgctgccgacgttaggcgttgagaaccagacgctggcggcttcctttgcgacgctgtgcgtggatgcgcgtagccagcacgactatattgcgctttcgcgtctgtttcataccgtcatgctctttgatgtgccggtgatgaccgggctgatggagagcgaggcgcggcgctttatcgccctcgtcgatgaattctacgaacgccacgtcaaactggtggtcagtgcggcggttccgctgtatgagatctatcagggcgagagattaaaattcgagttccagcgctgtttatcgcgcctgcaggagatgcagagcgaggagtatctgaagcgagaacacctggcggggtaa

SEQ ID NO: 172660 - DNA, 429 bp, Klebsiella oxytoca
atgaaaacttttacagctaaaccagaaaccgtaaaacgcgactggtatgttgttgacgcgaccggtaaaactctgggccgtctggcttccgaactggctctgcgcctgcgcggtaagcacaaagcggaatacactccgcacgttgataccggtgactacatcatcgttctgaacgcagaaaaagttgctgtaaccggcaacaagcgcgaagacaaaatgtactatcaccacaccggccacatcggtggtatcaaagaagcgacctttgaagagatgattgcccgccgtcctgagcgtgtgattgaaatcgcggttaaaggcatgctgccaaaaggcccgctgggtcgtgctatgtaccgtaagctgaaagtttacgcgggtaacgagcacaaccacgcggcacagcaaccgcaagttcttgacatctaa

SEQ ID NO: 172661 - DNA, 393 bp, Klebsiella oxytoca
atggctgaaaatcaatactacggcaccggtcgccgcaaaagttccgcagctcgcgttttcatcaaaccgggcaacggtaaaatcgttatcaaccagcgttctctggaacagtacttcggtcgtgaaactgcccgcatggtagttcgtcagccgctggaactggtcgacatggttgagaaattagatctgtacatcaccgttaaaggtggtggtatctctggtcaggctggtgcgatccgtcacggtatcacccgcgctctgatggagtacgatgagtccctgcgtggcgaactgcgtaaagctggtttcgttactcgtgatgctcgtcaggttgaacgtaagaaagtcggcctgcgtaaagcacgtcgtcgtccgcagttctccaaacgttaa

SEQ ID NO: 172662 - DNA, 639 bp, Klebsiella oxytoca
atggctgtcgctgccaacaaacgttcggtaatgacgctgttttctggtcctactgacatctatagccatcaggtccgcatcgtgctggccgaaaaaggtgttagttttgagatagagcacgtggagaaggataacccgcctcaggatctgattgacctcaacccgaatcaaagcgtgccgacgcttgtggatcgtgagctcactctgtgggaatctcgcatcattatggaatacctggatgagcgtttcccgcatccgccgctgatgccggtttatccggtggcccgtggggaaagccgtctttacatgcagcgtatcgaaaaagactggtattctctgatgaatactattcagaccggtaccgcttcgcaggccgatactgcacgtaagcagctgcgtgaagagttgcaggccattgcgccggtcttcacccagaagccctacttcctgagcgatgagtttagcctggtggactgctacctggctccgctgctgtggcgcctgccggttcttggcgtcgagctggttggtgctggcgcgaaagagcttaaaggctatatgactcgcgtatttgagcgcgactccttcctcgcttctttaactgaagccgagcgtgaaatgcgcctcggtcggggctaa

SEQ ID NO: 172663 - DNA, 492 bp, Klebsiella oxytoca
atgatggatgtatcacagctgacgcctcgtcgcccgtacctgctgcgggcgttctatgagtggctgctggataaccagctgactccgcatctggtcgttgacgtgactctgccgggcgtacttgtgccgatggagtatgcgcgtgatgggcaaattgttctcaatattgctccgcgtgctgtcggtaacctggagctggcgaacgacgaagtgcgttttaacgcgcgtttcggcggcgtgccgcgcaatgtctccgtgccgatggctgccgtactggcggtttacgcgcgtgagaacggtgcggggaccatgttcgaaccagaagccgcttacgatgaagatgtcaccagcctgaacgatgaagaagagctgcctgacagcgaaacggtcatgtcggtgatcgatggcgataagccagataatcacgacgacgatccggatgatacgccgccgccccgtggcggacgtccggcgctacgcgttgtgaagtga

SEQ ID NO: 172664 - DNA, 717 bp, Klebsiella oxytoca
atgttctctaaaaagtcgctttctgcgctatgcgtttgcgctgctattgtttctgctgcgggcgttaatgctgctacggatactactctcaccgttaaaggaacctttgttccggctgcgtgcaccccggagctgagcaacagtggtgttgttgattacggctctatgaacaactcggttctcgaaaagccggtcagcggtagcaccctggttcagttgggcaaaaaatccattacattaacggttagctgcgatgcggcgaccagcgtgggcatcgtggcgaaggataaccgtgccagttctaaagttgagatttcaagctcggcgtatattgctgactatatcccggggcaaaatatgacaacggaatctgcggcgtttggcctcggtaccgttaatgacatgaagatcggtgcttattccgttacggcaatgaaggatggattaactgctgatggcgcggcagtggatatgatcgtgaaaaatagaggcggggcaaatagctcgtgggagaatgcaaatagcggtgctttatattactccgacgctacccgtatcgttaccgttgctgaaaccggcaaaaccaccccaatgctgtttaaagatttagtgatgccgctggatatcgtttccgccgttcagaacaatggtgtactgggtgccggaacgcaaattgagctggatggtaatgccacgctgagtcttgtttatctctaa

SEQ ID NO: 172665 - DNA, 678 bp, Klebsiella oxytoca
atgaaaaaaacgctgctgttgtcgatattgatattgacgacccgggccaatgccagcggcatggtgcctgagacgtcggttttactcgttgatgagcaaaaaggtgaggtgtcgatgaacctcaccaattccgattcgcatccatctctgctttataccaaagtggttgatttagacgatagcgataaatctatccgcttaattgtcacgcagccggtagtacgcgtagagcaaggggacacgcaaaagatccgctttatattgcaaacgtctaaaccgctacaacaggaagagtttaaacgggtcacctttgaaggaataccgccgaaggaaaagggaaaactgaaaacaacggtcactattcgtcaggatttaccggtcattatccatccggctggcctggcggaggagcccgcgccgtggaaacatctggtctggcgcaaaaaggggggccagctggaaatcagtaatccgagcgactatgtcgtcaggatgacatccatgtttaatactttgccttcaggttctcccggcgagttagcgaaaacgtatctcctgccgcacaccagcgtcagcgtaaaattacctgctaaagcgggagcggatacgaaagtcgagtttttcccggcaagccgctatggatataaaggagatcgctacatcacctcgttgcagtga

SEQ ID NO: 172666 - DNA, 2379 bp, Klebsiella oxytoca
atgctcaggaaaaagctgttggcctgtcttatcgggttgggaagcgctcaactggcggtagctgaagaggccaaaaagagcgcgatagaatttgatagtgaaaccttaacgtctttgggcatcgatccgcaaattgcgcattatttctcctcagaagccaaattcctgccgggggcgagctcggttatgctgggcgttaacggtaaggataagggaaatatcgtcgcccactttgatgatgacggccagctgtgtttcgataaagcgtttatgcaacaggccggtattcgccaatccgtggtcgatagcgagggctgctatgactatttacaggcctatcctgaaacgatcctgaaagcgtcgcccggaaaagggcgaatcgatctgatattaccgcaggagcagttagtccaccaaagtaccgacctcagcggatacgacacgagcggtacggctggggtgctgaattatacctttttcgcttcgcgcaacgattatagcggcggtcattccgagtattcgcagctgatgctggacggcggtctaaacgtgaatacctggctgctgcgtagccatcagctattaagccgtgcgaataatcagtttaccagcgaaaattcgcagacctacctacagcgcacctttacgcagataaaaagcaccgtcaaggcgggtgaaataggcatgaataaccctttgctcgacggcaccgagctatacggtatctccttgatgccggagagcgcccttaacgatgccgggagcggcgtgctggtaaccgggatcgccagtaccccgcaggcgcgggttgagatccgccagcaagggatcatggtgtattccactttagtgcctgccggcccctttaccttaacggatattcccctgcgcaacgtcaccagcgatctgacggtcaccgttattgagaccgatggcagccagcatagccaggtggttcccgcctcattgtatcgctccgggctggggcctgcgggcggatatcaattttcattaggccgggtgagcgatgcatatagccagcagccctgggtagccagcctggctggcggctggaagctgaacgccaggcataatttaactagcggcgcgatcgttgcccagagctaccaggccttaggaatacgcgttgactcagtactgccgcaggaaatttcgctttctcttcagattaaccaggcgttcgatcgcgataatgcgcagcagggccagaagtacactctatcgacctcctgtgcaacacagtccggttttgggctgaatgcttcgttgagcaaatattctgaaaagtatcgtgagttttctcaggccattgataagagttttagcgccaccaataaaatggagtactcattgggtgcgagctggggacaccctgttataggtacgatgagcgccagcttctatgatgtaacagggttcgatagccaaaataattctcgctacgcgacgcttaactggggaaagagttttagcgcattttccgtatcggcaagctggcagcgccagctcagcggcgggagtatcgaacaaagcaatgataatattttttacctgaacctgaatattcccttccagcagcattcggtcaacgcttacgcgcgcagtgaaaaagggcggaagagatacggtacttcggtaacgggcactatcagcgatgacaccacttataccctcggcgccgaacgtgaccagaccgagagtcggaacagcttcagcggcgggataaatcagaatctgcattacacgcagctaagcatgaatgcgagtaccaacggttcgcagagccatagctattccggaacgctgcgcgggggaatggccgcccaccgccatggtgtgacttttacaccgtgggcgattcgcgacacctttgccattgccagcctggataagccggtttccggagtgcgcatcgagacatcgcaggggccggtgtggactgacttcagcggtcaggcagtcattccttccgtttcggcctggcgagaggcagccgttgaaatcaacaccgcgactttgccaaagaacatggatattggcaatgggctcagaatgctcaagcaaggccgaggggccgtaggcaaaatccgcttttctaccatcacggagcgccgggtgctgctggatgtcacgatggggaacggtgatccgctgccgaagggggttgccgtaacggattcagcgggcaattacttaacgacttccgtcgatgacggcgtgctttttttgaacaacctcacagggagacaaacattggtggcgaaactggaaaagggaagttgccgcatctcgctaacgctgcctgaagcgccagacgcagatgcgttctatgaaaatgccagcggggtatgtcaatga

SEQ ID NO: 172667 - DNA, 531 bp, Klebsiella oxytoca
atgattcgtctatggctgggccttagcctgctggcattttccggcgcccttctggccgaatgcgaattaaatagcacgcagcgttcggttgactatctgcccgttcgcccggcagaacgtcagcaggcgggagataagcctgtggtactgccggaaaagcagttcgtcctgcatgtacattgtgataagccacaacgtattcggcttttcttcggtagcgcctatgcgcaaaacggcaggttcgcacttggcaatcgtggggaaatgaatattaccgccgggcaagcggtggctgacgatcgcgacgtgatgctggtccctgtacggagcgccggggcgccgattaccgctgaagcagcaaagcgatcccgcattgtgctcaatcaagggatcgcctttgtacagggagaagagattgaagccagtcagctctctgtggttctgaacgtggcttcaatgatggagagccaggcgattacggatcgcgtaacgtatcgtgggaatctgcagatcagggtggtaactccatga

SEQ ID NO: 172668 - DNA, 696 bp, Klebsiella oxytoca
atgaggtacgcctttgttttattcgcgcttttactcagtccgatccttcacgccggcgacaaccttagtattgattttaccgtgaccgcagaagcggcggcgtgcacgccaacgctgagccataacggcatcgtagatttcggtgaacggcatgtcgggtcgctatcaacgtccgcatttacccagctaggcgtgcgggatattaccttaacggttacctgcgaatcctccaccgggatcgctattacggcaagagatgcgcgatccagttccgctatcacgggaaaagatacacacggccatgagggagtgctttttcaggtcaatggcggcggatacataagcgacaaatcacggctttttggtctgggtatgacgatggaaaataaacctattggcagctatgcgatgcaaatcgattccgccaataccatcgcggttgatgataaaaaagttgccgttgatatcgccggatcggccagcaaggagggaccgtgggaagtttcctcgcttttaccgctcccaacgggacaggactatttctatacctttgttaaaaaaggctcttcggtgccgcagccaatcacggcggcaacggtgcctctgcagataagcgcatcggtgggaagtaatctcaggagcgggcaaaaggtgacgttggacggcgaggcggtaatcagtattgtctatctctga

SEQ ID NO: 172669 - DNA, 1419 bp, Klebsiella oxytoca
atgagtcagaatgtctatcaatttatcgacttacagcgagttgatccgcctaaaaaagcgctgaagatccgtaaaattgaatttgtggaaatttacgagccgttttcagaaggccaggctaaagcacaggcagatcgctgcctgtcctgcggcaacccgtactgcgaatggaaatgcccggtgcataactacatcccgaactggctgaagctggctaatgaaggacgtattttcgaagcggctgagctgtcgcatcagaccaataccctaccggaagtctgcggacgggtttgcccgcaggaccgcctgtgcgaaggttcctgcaccctgaacgatgagttcggcgcggtaaccatcggtaacattgagcgctatatcaacgataaagcattcgaaatgggctggcgtcctgaccttagcggcgtgaaacaaaccggcaaaaccgtcgccattatcggcgcgggtccggcaggtctggcgtgcgccgacgtattgacccgtaacggcgtgaaggcggtagtcttcgatcgccatccggagattggcggcctcctgacctttggtattccagcctttaagctggaaaaagaggtgatgacccgtcgtcgcgagatctttaccggtatgggcattgagttcaaactcaataccgaggtgggtcgcgatgtacagctcgacgatctgctgaaagagtacgatgcggtattcctcggcgttggtacctatcagtcaatgcgcggcggtctggaaaacgaagacgccagcggcgtctttgatgcgctgcccttcctgatcgccaataccaagcagatcatgggctttggtgaaacggcggacgagccgtacgtcagcatggaaggcaaacgcgtcgtggttcttggcggcggcgacaccgcaatggactgcgtgcgtacctcgattcgccagaacgcgactcacgtcatctgcgcctatcgccgtgatgaagagaacatgccgggctcgaagcgagaagtgaaaaacgcgcgggaagaaggcgtggagttccagttcaacgttcagccgctgggcattgaagtgaatgccaacggtaaagtctgcggcgtgaagatggcgcgtacggagatgggccagccggatgcgaaaggccgccgccgcgcggaaatcgttgccggctcagaacatgtggtgccagcagatgccgtagtcatggcatttggtttccgtccgcacagcatggaatggctggcgaagcacagcgttgagctcgattctcagggccgcgtgattgcgccggaaggcagcgacaatgctttccagaccagcaacccgaaaatcttcgccggcggcgatatcgttcgcggctctgacctggtggtcaccgcgattgccgaaggccgtaaggcggctgacggcatcctgaactacctggaagtgtaa

SEQ ID NO: 172670 - DNA, 4461 bp, Klebsiella oxytoca
atgttgtacgataaatcccttgagagggataactgtggtttcggcctgatcgcccacatagaaggcgaacctagccacaaggtagtgcgaaccgctatacacgcactggcccgaatgcagcaccgcggcgcgattcttgccgatggaaaaaccggcgacggttgtggcttgctgctacaaaaacccgatcgtttcttccgaattgttgcggaagagcgcggctggcgtttagccaaaaattacgccgttgggatgctgttccttaataaggatcctgaactggcaaacgcggcgcgccgcatcgtcgaagaagaacttcagcgcgaaacgctgtctatcgtcggctggcgcgatgtgccaaccaatgaaggcgtactaggtgaaatcgccctctcctcgctgccccgtatagaacaaatctttgttaacgccccggctggctggcgcccgcgcgacatggagcgccgcttattcatcgcgcgccgtcgtatcgaaaagcgtctgcaggaagataaagatttttacgtttgcagcctgtcgaacctggtcaacatttataaaggtctgtgtatgccggcggatttgccgcgcttctacctggacctcgcggatctgcgcctggagtcagccatctgtctgttccaccagcgcttttccaccaataccgtgccgcgctggccgctggctcagccgttccgttacctggcacacaacggtgaaatcaacaccattaccggtaaccgccagtgggcccgcgcccgtacctataagttccagacgccgctaatccctgacctccacgacgccgcgccgttcgttaacgaaaccggctctgactccagctctatggataacatgctggagctgctgctggcgggcgggatggacatcattcgcgcaatgcgcctgctggttccgccagcctggcaaaataacccggatatggatcccgagctgcgctcgttctttgactttaactccatgcatatggaaccgtgggacggcccggcgggcatcgtgatgtccgatggtcgcttcgccgcctgtaacctcgaccgtaatggcctgcgtccggcacgctatgtgatcaccaaagataagctcatcacctgcgcatccgaggtgggtatctgggattatcagccggatgaagtcgttgaaaaaggccgcgtcggtccaggcgaactgatggttatcgatacccgcgaggggcgtattctgcactccgcggaaaccgacaacgatctgaaaagccgtcacccgtataaagagtggatggcgaaaaacgtccgtcgtctggtgccgttcgaagaactgccggacgaagaggtcggtagccgccagctggacgatgataccctcgccagctatcagaaacagttcaactacagtgccgaagagctggattccgtcctgcgcgtactgggtgaaaatggccaggaagcggtcggctcgatgggcgatgataccccatttgccgtgctctccagccaaccgcgtatcatttacgattacttccgccagcagttcgcgcaggtcactaacccgccgatcgatccgctgcgcgaagcgcacgttatgtcgctggccaccagcatcggccgtgaaatgaacgtcttctgtgaagcggaaggccaggcgcatcgcctgagcttcaaatcgccgattctgctgtactcagattttaaacagctgaccaccatggaagaagagcactatcgcgccgacgtcctggatatcacttttgatgccgccgaaaccacgctggctgaaaccgtgaaggcgctgtgcgataaagccgagcagatggtgcgtaacggtaccgttctgctggtgctctcagaccgtaacatcgctaaaaaccgtctgccggtaccggcaccgatggcggtaggcgcgatccagacccgcctggtcgataagagcctgcgctgcgatgccaacattattgtcgaaaccgccagcgcccgcgatccgcaccactttgccgtgctgctcggcttcggcgcgacggctatctatccgtacctcgcctatgaaaccctggcgaagctggtcgataataaagccatcgacaaagagtaccgcgcggtgatgctgaactatcgtaacggcatcaacaaaggtctgtataagatcatgtcgaagatggggatttcgaccattgcatcctatcgctgctcgaagctgtttgaagcggtcggcctgcatcgcgaagtctccgatctgtgcttccagggcgttgtcagccgtatcggcggcgcgggcttcgatgatttccagcaggatctgctgaatctgtcgaaacgtgcctggctggcgcgtaaaccgctggatcagggcggtctgctgaaatacgttcacggtggcgaatatcacgcctacaacccggacgtggtgcgcactctgcagcaagcggtacaaagcggtgagtacagcgattatcagcagtacgcgaagctggttaacgagcgcccggcggcaacgctgcgcgacctgctttccgtcacccccgacggaaccaccgtgaacctggacgacgttgaaccggcgagcgaactgttcaaacgcttcgataccgcggcgatgtctatcggcgcgctgagcccggaagcgcacgaagcgctggcggaagccatgaacagcctcggcggcaactccaactccggcgaaggcggcgaagacccggcgcgctacggcaccaataaagtgtcgcgcattaagcaggtcgcctccggccgcttcggcgtgactccggcttatctggtcaacgccgacgttatccagattaaagtcgcccagggcgctaagcctggcgaaggcggccagttacccggcgataaagtgactccgtatatcgccaaactgcgctattcagtacctggcgtaacgttaatttctccgccgccgcaccacgatatctactcgatcgaggatctggcacagctgattttcgacctgaaacaggtcaacccgaaagcgatgatctccgtgaagctggtctctgaaccgggcgtcgggactattgccaccggtgtagcaaaagcttacgcggatttaatcaccattgccggctacgacggcggcaccggcgccagcccgctatcgtcagtgaagtacgcgggatgtccgtgggagcttggactggttgaaacccagcaggcgctggttgccaacgggctgcgccataaaattcgtctgcaggtcgacggtgggctgaaaaccggcctcgatatcatcaaagcggctatcctcggcgctgagagcttcggcttcgggaccggaccaatggtggcgctgggctgtaaatatctgcgtatttgtcacctgaacaactgcgcaaccggcgtagcaacccaggatgacaaactgcgtaagaaccactaccacggtctgccgtttaaagtgaccaattactttgaattcatcgcccgcgaaacgcgcgagctgatggcacagctgggcgtgaagcgtctggtggatctgattggccgtaccgatctgctgaaagagctggacggttttaccgccaagcagcagaagctggatctgagcaagctgctggaaaccgcggagccgcatccaggcaaagcgctgtactgcacggagaacaacccgccgttcgataatggcgtcctgaatgcgcagctgctgcagcaagcaaaaccctttgttgacggcaagcagagcaaaacgttctggttcgatatccgcaataccgaccgttccgtaggagcctcgctgtccggctacatcgcccagacccacggtgaccagggcctggcagcagatcctattaccgcccacttcagcggtaccgcaggtcagagcttcggcgtgtggaatgccggcggcgttgagctgcatctgaccggcgacgcgaacgactacgtgggtaaagggatggccggcggcctgatcgccattcgtcctccggtaggctcggccttccgtagccatgaagccagcattatcggcaacacctgtctgtacggcgcgaccggcggtcgtctgtatgctgcgggtcgtgcgggcgagcgtttcgcagtgcgtaactccggggctatcaccgtcgtcgaaggtatcggcgacaacggctgtgaatatatgaccggcggcatcgtctgcgtgctgggcaaaaccggcgtcaacttcggcgcaggcatgaccggtggctttggttacgtactggatgaagacggcgacttccgtaaacgcgtgaactctgaactggtagaagtgctggacgttgactctctggccatccatgaagagcacctgcgcggtttaattaccgagcatgtgcagcttaccggttcacagcgcggtgaagagattctggccaactggccggccttctcggcgaagtttgcgctggtcaaaccgaagtccagcgatgttaaagcactgttgggtcaccgtagtcgttccgcagctgagctgcgggtgcaggcgcagtaa

SEQ ID NO: 172671 - DNA, 924 bp, Klebsiella oxytoca
atgcagttacaaaaattagtcaacatgtttggtggggatcttgcgcgccggtatggagaaaaggttcacaaactgacgctgcacggtggatttagctgtccaaatcgcgatggcaccattggtcgtggcggctgtaccttttgtaatgtcgcttcttttgccgatgaagagcagcagcaccgttcgattgctgagcagctagcccatcaggcgcagcgggtaaaccgggctaagcgctatttggcctatttccaggcctataccagtacgtttgccgaagttcaggtactgcgatccatgtatcagcaggcaatcagccaggccagcatcgtcgggctgtgcgtgggcacccgcccggactgcgtccccggagccgtattggacctgctgagtgagtatcgggagcagggctacgaagtatggctcgagctgggtttacaaaccgcgcatgataaaacgctgcaccgaattaaccgcggccacgattttgcctgctatcagcgaaccacccgcctggcacgcgagcgcgaccttaaagtgtgtagccaccttatcgtgggcctgccgggcgagggacagggtgaatgcctggagaccttagagcaggtagtggagaccggcgtagacggcattaagctgcatccacttcatattgtgaaggggagcattatggccagggcctggcaggcaggaaggttaaacggtattgcgctggacgactatacggttaccgcaggagagatgatccgtcacacccctccggaagtgatttttcaccgtatctccgccagcgcgcgccgcccaacgctgctggcgccgctgtggtgtgagaaccgctggaccgggatggttgaactggataaatacctcaatgaacacggcgtgcaggggtctgctctcggtcgtcgctggatctctccatag

SEQ ID NO: 172672 - DNA, 1065 bp, Klebsiella oxytoca
atgcaaatgacaatgcgttggtttgggccggaggaagacaaggtctctctggaatatatccgccaggttcccggtattgaaggcgtggtgggggcgctctatgatgtcgcggttggtgaggtctggccgctggaaaaaatccagcgcctggtaaatcaggttcatgatgccgggctaaaaatggaagttatcgaaagcgtcaatattcatgacgatattaaaatagggctgccttcccgcgatcgctatattgccaactatcaacagactatccgtaatcttgccgagtttggcgtaaaagtgatttgctataacttcatgccggtttttgactggatgaagaccgatatgaactatgttctgccggatggctcccggacgatggcttttgaaaaaaaagacattgataagagcctggaagaggtggtgaaagaggttctggataactcaaatggttttgcgctgccgggctgggaacctgagcgtctggccaaagttcaggagctgtttgcgcagtacaaagatgttgatgacaagacgctgcgggagaatctggtctattttctgaaggcggttatccccgtctgcgaagaggtcggcgtgaaaatggctattcacccagacgatccgccgtactctatttttggcttgccgcgtatcgtgaaaaatcgcgacgatctggattggatctgccgggcggtagattctgaggccaatggcatcacgctctgcaccggttcaatcgcggaagatcctgccaatgacgtctactcgattctggccgagtttacacggcgcaagcgtatccattttgcccatgtgcgtaatattaatcttattaaagataaagacttttatgaatgcgctcatccgtcagaatttggctctttggacatgtataaagtgatgcaggcgctctatgacaatggttttagtggctatatacgcccggatcatggacgttttatctggggtgaaacagggcggccaggttatggattgtacgaccgtgcgctgggcgtgacctacctgaaggggctgtgggaagcgctcagtaaacgctaa

SEQ ID NO: 172673 - DNA, 2340 bp, Klebsiella oxytoca
atgaagcaaatccgtatgctggcgcagtattatgttgacctgatgatgaagctgggtctggtgcgcttttcaatgctgctggcctttgcgctggtggtgctggcgatagttgtgcagatggccgttacgatggtgctgcatggccaggtggaaagtattgatgtgatccgctccatcttcttcggcctgctgattaccccgtgggcggtctatttcctttcggtggtggttgagcaactggaagagtcccggcagcgcctctcgcggctggtagagaaactggaggagatgcgcgagcgcgatctcaagctgaatgtgcagcttaaggacaatatcgcccagcttaatcaggaaatcggcgaacgtgaaaaggcggaagcggaacgtgaaacgacgcttgagcagctcaaaattgagatgaaagagcgtgaagaggcgcaaattcagcttgagcaacaatcctcttttctgcgctccttccttgatgcttctccggatctggttttctatcgtaatgaagataaagagttttccggttgtaaccgtgcgatggagcttttgacaggcaaaagtgaaaagcagcttatccatctgaagccgcaggatgtttataccgaagaagtggcggaaaaggtgctggaaacggatgagaaagtcttccgccataacgtctcactaacctacgaacagtggctggattatccggacgggcgtaaggcctgctttgaaatccgtaaggttccttattacgaccgcgtaggtaagcggcgcggcctgatgggttttggccgcgatatcacggagcgtaagcgctatcaggacgctctggagcgagccagccgagataagaccacctttatctcaacgatcagccacgagctgcgtacgccgcttaacggcattgtagggcttagccgaattctgctggataccgatttgaccggcgaacaggaaagatacctgaaaaccatccatgtctcagcggtaacccttggtaatatcttcaatgatattattgagatggataagatggagcggcgtaaaattcagctggacaaccagccggttgattttaccggtttccttgcggacctggaaaacctctccggcctgcaggcgcagcagaaaggcctgcattttgtgctggaacccacgcttccgctgccgcataaagtgatcaccgacggaacgcgtttacgccaaatcttgtggaatcttattagtaatgcggtgaaatttactccgcaaggcgggaatgtgaacgtccgcgtgcgctatgacgaggggaatatactgcacttcgaagtggaagattcaggtatcggcatccctgaagcggagcaggataagattttcgccatgtactaccaggttaaagatagccagggcggcaagcctgcgacgggcaccggtatcggtcttgccgtatcacgtcgcctggcgcgaaatatggggggggatatctgcgtttccagcctgccgggtaaaggcgcgacatttaccctcaccgtacatgctccggccgttgcggaagaggttgaagatacgctggcggaagatgaaatgccattacctgcgctgaacgtgctgctggtggaagatattgagctaaacgtgatcgttgcgcgatcggtacttgagaagcttggcaatagcgtcgatgtggcgatgaccggtaaggctgcgctggagatgttcgtccccggcgaatacgatctggtgctgcttgatatccaactgccggatatgaccggccttgatatctctcgtcagcttaaacagcgctttgccgccgacgagcttccgccgttggttgcgcttaccgctaacgtactgaagaacaagaatgagtatctggaagcgggaatggatgatgtcctgagtaagccgttatcggttccggcattaaccgcgattatcaaaaaattctgggatgcgccggaagaagaggagaatgagatgccatctgtagatagcagtaaatcggcttcagtactggatattccgatgcttgagcagtacatcgaactggtagggccgaagcttatttatgacggtctggccgtctttgaaagaatgatgccgggctatatggcggttctggagtctaatttaaccgctcgcgaccagaaaggaattgttgaagaggggcacaagattaaaggggctgcgggctcgatcggtttgcgccatattcaacagttaggtcagcagatccagacgccggatttacccgcatgggcggataacgttggcgaatgggttgaagagatgaaatcagaatggcaaagcgatgtcgcggtactgaaagcgtgggtcgcggcggcagataaaaaatga

SEQ ID NO: 172674 - DNA, 654 bp, Klebsiella oxytoca
atgaagaaaattggtgtcgtgctgagcggatgcggcgtttatgacggaagtgaaatccatgaagccgtcattaccctgctggcaattgcccgcagcggggctcaggccgtttgctatgcgccggataaaatacaaaccgatgttatcaatcatctgaccggcgaagcgcaggcggaaagccgtaatgtgctggtggaagcggcgcgtatcgcgcgcggagagattcagcctttggccaatgcccgagcggatgagctggacgcgctgattgtgcccggcggttttggcgcggcaaagaatctcagtagctttgcctcgcaggggagcgaatgtgaagtggatagcgatcttaaagcgttggctctggcgatgcatcaggccggtaagccgctgggctttatctgcatcgctccggcgctgttgccgaaaattttcgctattccgctacgcgtgaccatcggtaccgatctcgataccgccgatgcggtagaggaaatgggcgctgagcacgtgccttgcccggtggatgatattgtagttgatgaagataacaaagtggtgacgactccggcgtacatgctggcgcagaacatcgcggaggcggcgaacggaattgaaaaactggtcgctcgcgtcctggtgctggccgcatga

SEQ ID NO: 172675 - DNA, 729 bp, Klebsiella oxytoca
atgaccctccgcttttcgccgctgcggatgatgaagcgttttgttctgaggctgctgttggcttgcgtggtgctttggggcggcggaattgcgctgtttagtatcgtgcccgtccctttttcggcagtgatgctggagcgccaggtcagcgcctggctttccgggaattttcattatgtcgcccattccgattgggtggggatggatgaaatctcgccgtggatggggcttgccgttattgctgcagaagatcagaaattcccggagcactgggggtttgatgtttcggccattgagaaggcgctggcgcataacgagcgcaatgacagccggatccgcggagcgtcaacgctgtcgcagcaaacggcaaaaaacctgttcctgtgggatggccgcagctggctgagaaaagggctggaggcggggctgaccgtcggcatcgagacggtctggagcaaaaaacggatcctcaccgtttatctcaatattgctgagtttggcgacggaacgtttggcgtagaagccgcatcgcagcgctattttcacaaacctgccagtagactgacggctgcagaagccgcgcttttagctgcggttttgcccaatcccattcgctttcgcgccgatgcgccgtcgggttatgttcaccgccgtcaggcgtggatcctgcgccagatgaggcagttaggtggggaaggttttatgcgggcgaataagctacatcaataa

SEQ ID NO: 172676 - DNA, 273 bp, Klebsiella oxytoca
atgaccgttaagcaaaccgttgaaatcaccaataagctgggcatgcacgctcgcccggcgatgaagctgtttgaattaatgcagaactatgatgctgaagtcctgctgcgcaatgatgaaggtactgaagctgaagcgaatagcgtgattgccttgctgatgctcgactcggctaaaggccgtcagattgagattgaagccaacggcccgcaggaggttgaagcgctggccgccgttatcgcgctcttcaacgccgggtttgatgaagactag

SEQ ID NO: 172677 - DNA, 855 bp, Klebsiella oxytoca
atggtactgatgatcgtcagcggccgttcagggtcggggaaatccgtcgccctgcgagcgctggaagatatgggtttttactgcgtcgataacctgccggttgtgctgttgccagagctggcgcgttcgctcgccgacagaaacatctcggcggccgtcagtattgacgtgcgaaacatgcccgaatcgccggaaatcttcgagcaggcgatgaaaaatctgcccgcagagttttcacctcagctgctgttccttgatgccgatcgtaacaccctgattcgccgctatagcgacacccgtcgtttacatcctctatcaagcaaaaacctgtcgctggaaagcgccattgatgaagagagcgatctgctggaacctctgcgctcccgcgccgacctgatcgtcgatacttctgaaatgtcggtgcatgagctggcagaaatgttgcgcacgcgtttgctgggcaaacgcgaacgcgaactgacgatggtatttgaatcctttggctttaagcacggcatccctatcgatgccgactacgtttttgacgtgcgctttctgccgaacccgcactgggatccgaagctgcgcccgatgaccggccttgataaacccgtggccgctttcctcgaccggcacacggaagttcataatttcatttaccagacccgcagctatcttgagctatggttacctatgctggagaccaataaccgcagctatctgacggtagctattggttgtaccggtggtaaacaccgttcggtttatatcgccgaacagctggctgactacttccgctcgcgcggtaagaacgtgcagtcccgtcatcggacgctggaaaaacgcaaatcatga

SEQ ID NO: 172678 - DNA, 489 bp, Klebsiella oxytoca
atgataaataacgattcggctctacaactgagcaatgtccttaaccaggaatgtacccgtagccaggttcactgccagagcaaaaagcgcgcgctggaaatcatcagcgagctggcggcaaagcagttaggcttagcgccccaggtggtgttcgaggcgattctcacccgtgagaaaatgggcagtaccgggattggtaacggcattgcgatcccccacggtaaactcgaagaggatacgctgcgcgccgtgggcgtttttgttcaactggaaaccccgattgcctttgatgctatcgacaatcaacctgtcgatctgctgtttgcccttctcgtcccggccgatcaaactaaaacgcatctgcatacgctctcgctggtggcgaagcgcctggcagataaaactatttgccgccgtctgcgcgctgcacaaagtgatgaagagctctatgaaatcatcactgaagcgggaagcaacaatgaggcataa

SEQ ID NO: 172679 - DNA, 288 bp, Klebsiella oxytoca
atgcagctcaacattacaggacacaacgtcgaaataactcccgccatgcgcgatttcgtgacggcgaagttcagcaaactggagcagtttttcgacaggatcaatcaggtctatattgtgttaaaagtggagaaggtgacgcaaattgcggacgccaatctgcatgtcaacggtggcgaaatccatgccagtgcggaagggcaggatatgtatgctgctatcgatggccttatcgataagctggcaagacagttaacaaaacataaagataaactgaaacaacactaa

SEQ ID NO: 172680 - DNA, 1434 bp, Klebsiella oxytoca
atgaagcaaggtttgcaattaaggctaagccaacagcttgccatgacgccacagctgcagcaggcgattcgtttactgcagttgtctacgttagaactccagcaagaactccagcaggcgctggacagcaacccgttgctggagcaaaccgatcttcacgatgaggtagaaaccaaagaggccgaggatcgcgaatctctggataccgtcgatgcccttgagcagaaagagatgcccgacgagctgccgcttgatgccagctgggatgagatctataccgcgggaacgccctcaggcaacggcgtcgattatcaggatgatgaactgcccgtctatcagggcgagaccacgcaaagcctgcaggattacctgatgtggcaggttgaactcacgccatttaccgataccgatcgcgccattgcgacctcaatcgtcgatgccgttgatgacacagggtacctgactattcctgtcgaagagatcgttgaaagtattggcgatgatgaaatcggacttgaagaagttgaagcggtgctcaagcgcatccagcgtttcgaccccgtcggcgtggcggcgaaagacttgcgcgattgcctgctggttcagctttcacagtttgccaaagagacgcagtggattgatgaagctcgcctgatcatcagcgatcatctcgatctgctggccaaccatgacttccgtactctgatgcgcgttacccgcctgaaagaagaggtgttaaaggaagcggtgaatctgatccaatcgctggatccgcgcccgggccagtcgattcaaactggcgagccggaatatgtcatccctgacgtgctggtgcgtaaggttcacgatcgttgggttgtcgaactcaattcagatagccttccccgcctgaagatcaatcagcactatgcggcaatgggcaacagcgcgcggaatgatgctgacggccagtttatccgcagcaatctccaggaagcccgctggcttatcaagagcctggagagccgcaacgacaccctgctgcgcgtcagccgctgcatcgtcgaacagcagcaggccttttttgaacaaggtgaagagtttatgaagccgatggtgctggcggatatcgctcaggccgtcgaaatgcatgaatccactatttcacgcgttaccacgcaaaaatacctgcacagtccacgcggtatttttgagctgaagtatttcttctcaagccatgtgaacaccgaaggcggcggcgaagcatcgtcgacggccattcgcgcgctggtgaagaaattaatcgccgcggaaaaccccgcgaaaccattgagtgacagtaagctcaccaccatgctgtccgatcagggtattatggtggcgcggcgaaccgttgctaagtaccgagagtctttatccatcccgccgtcgaatcagcgcaagcagctggtttga

SEQ ID NO: 172681 - DNA, 726 bp, Klebsiella oxytoca
atggcaacattaactgcaaagaaccttgctaaagcctataaaggccgccgcgtcgtggaagatgtcagtctgaccgtgaactcgggcgaaattgtaggcctgctcggcccaaacggcgccggtaaaacgaccaccttctatatggtcgttggcatcgtaccgcgcgacgcagggaacattatcatcgatgacgaagacattagcctgctgccgctgcacgcgcgcgcgcgtcgcggaatcggctatctccctcaggaagcctctatttttcgccgcctgagcgtatacgataacctgatggcggtattgcagattcgcgacgacctgagcaccgaacagcgtgaagatcgcgcgaaagagctcatggaagagtttcacattgagcacctgcgcgacagtctcggtcaggcgctctccggtggtgaacgccgccgcgttgaaatcgcccgcgcgctggccgctaatccgaaattcatcctgcttgatgaacccttcgccggcgttgaccccatttccgttatcgacatcaaacgtattattgaacacctgcgcgacagcggcctcggcgtgttgattaccgaccataacgtcagggaaacgctggccgtttgcgaacgcgcttatatcgtcagccagggccacctgattgctcacggtacgccacagcaaatccttgaagacgagcaggttaagcgcgtgtatcttggggaagacttcagactctga

SEQ ID NO: 172682 - DNA, 546 bp, Klebsiella oxytoca
atgaaattcagaacaaacaaactcagccttaagattgcgctcgccagcgccttactggcggccagcctgtcggctcaggcaaagacgggtgataccgatcagccgattcacattgaatccgatcagcagtcgctggatatgcagggcaacgtcgtgacctttacggggaatgttgtcgtcactcagggaaccatcaaaatcaatgccgacaaagtcgttgtgacccgtcctggcggcgaaaaaggtaaagaggttatcgatggctacggtaaccctgccaccttctaccagatgcaggacaacggcaagccggtgaaaggccgcgcgtcgaaaatgcattatgaactgcaaaatgactttgtcgtcctgaccggcaatgcgcatctggagcaggtcgatagcaatatccagggtgacaaaatcacttacctggtgaaagaacaaaaaatgcaggctttcagcaataaaggcgggcgcgtgaccacggttctggttccttcgcagctgcaggacaaaagtggcgatcagtcaaagaaaggtaagtaa

SEQ ID NO: 172683 - DNA, 576 bp, Klebsiella oxytoca
atgagtaaaaccagacgttgggttatcattttactgtcgctggtcgcgctgattctgatcggcctgaacctggcgagtacggacgatacgacccagcaagcgatcaatcctgatgacccaacgtataccagcgaacataccgataccgttgtgtatagtcccgagggggcgcttaactaccggctcatcgctgaacacgtggagtacttctccgcgcagcagctgtcgtggtttgccaaaccggtgatgaccacctttgatacgaataaagcaccaacctggtctatcaaagcggataaagctaagttgaccaatgatcgcatgctgtatctttacgggcacgttgaagtcgatgcgctgtcggctgactctcaactgcgcaaaattacgacggataacgcccagataaacctggtgacgcaggatgttacctccgatgacatggtgacgttgtacggaacaacatttaattccagcggcctgaaaatgcgcgggaacctgcgcagcaaaaatgccgagctgattgaaaaggttagaacctcatatgaaattcagaacaaacaaactcagccttaa

SEQ ID NO: 172684 - DNA, 567 bp, Klebsiella oxytoca
atgaataatgctgatgccctgatcgcgacctgctatgggccggtgagccaggactttattgaccgggcggcaaaaatccgtttactcatacttgatgtggacggcgttctatccgacggcgttatctacatgggcaataacggtgaagagctgaaagcgtttaacgtgcgcgatggctacggcatccgctgcgccctgacttcagatattgaagtggcgataattaccgggcgaaaagctaaactggtggaagatcgctgccaaacgctgggcatcaggcatctgtaccagggacagtccgataagctgctggcgttccatgaactattgaataagctggccgttgatgctgatgaagtcgcctacattggcgacgatctgattgattggccggtgatggctaaagtgggtttaagtgtagcggtagccgatgcgcatccgttgctgctcccgcgcgcggattacgtcacgcgtattaacggcggtcgcggagcggtacgggaagtatgcgatttgctactattggcgcagggcaagctggatgaggccaaagggcaatctatatga

SEQ ID NO: 172685 - DNA, 1005 bp, Klebsiella oxytoca
atgattcgggataacattatgtcgcaaacagatttgccagcggattttgactttcaacgggcaggccgtaaggttctggaaattgaacgtgaaggtctggcccagctcgatcaatatattaatgaagattttacccgtgcctgtgagaccatcttccgctgtaacggtaaagttgtggtgatggggatgggcaaatccggccatatcgggcgaaaaatggcggcgacgtttgccagcaccggtacttcatctttcttcgttcaccccggagaggccgcgcacggcgatttgggtatggtcaccccctgcgatgtggtgattgcgctgtccaactccggcgaatcaaacgaaatcctcgccctgatcccggtgcttaagcgccagcaggtgtcgctgatttgtatcaccagccgaccggacagcagcatggcgcgcgcggcggatattcatctgtgcgtaaaggtgcccaaagaggcttgcccgttagggctggctccgacatccagcaccaccgccgcgctggtcatgggcgatgcgcttgccgtagcgctgctggaagcccgcggttttaccgcagaggattttgcgctatcgcatcccggcggcgcgctgggccgtaagctactgctgcgggtcaatgatatcatgcacaccggtgatgaaattccgcacgtgagcctggaggctacgctgcgcgatgcgctgctggaaatcacgcgcaaaaatttaggcatgactgccatttgcgatgatgagatgaatatcatcggcatcttcaccgatggcgatctgcgccgcgtatttgataccggtattgatatgcgtaacgccagcattgccgaggtgatgacgcgaggcggtatccgtatccgtcccggcactctggccgttgatgcgctcaacctgatgcagtcccgtcatatcacctgcgtgctggttgccgatggcgaccgcctggtaggtgtgatacatatgcacgatctcctgcgcgcgggcgtagtgtaa

SEQ ID NO: 172686 - DNA, 978 bp, Klebsiella oxytoca
atgctcttagcgacggctctgttaattattggtttattgctggttgtctacagcgccgatcgtctggtctacgccgcttcaatactctgccgtatgctggggatccctcccctgattattggcatgacggtggtaagcatcggaaccagcttaccggaaacgatcgtttccgccgccgcttctctgcatgggcaaaccgatttggcgatcggaacggctctcggatcgaatatcaccaacatcctgctgatcctcggcctcacggctttgtttcaaccttttaccgtgcattctgatatcctgcgccgcgaattgccgttaatgttgctggtcagtttactggcgggattcgtgctgtacgatgggcagctcacgcggatagacggcctttttttgctggcgctggccatattatggctgctgtttaccattaaaatcgcccgcctggcagagcgtcaggggaacgacagcctgacccgcgaacagctggcggagctgccgcgggagggttcgcttcccgtcgcgctgctctggttgggcgttgcgatgatagtgatgccgatggccacgcgaatggtcgttgataacgccacggttctggcgaacttttttgccatcagcgaactgaccgtcggcttaacggtcgtcgcgataggcaccagcctgcccgagctggctaccgccattgccggtgcgcgcaaaggcgagaacgatatcgccatcggcaatatcattggcgctaatattctgaatattgtactggtcctcgggctccccgcgctgattgcgccgggtacctttgccgccgaggcctttacccgcgactatggcgttatgctgctggtcagcctgatcttcgctgcgctgtgctggcgccgtaagcagcagccaggtcgccttgccggcgccctgctggttggcggttttatgctttggttagcgatgctgtactggacagcgccgctcttcgttgaatga

SEQ ID NO: 172687 - DNA, 813 bp, Klebsiella oxytoca
atgagccagagtttggcgaatctagtcgaagtgcgcggtattcgcttctcgcggggcgatcgcgtgatcttcgatgatatctcgctatcggtaccccgtggaaagatcaccgcgattatggggccatcagggatcggcaaaaccaccctgttacgcctgatcggcggccagatcccgccggacaagggcgagatcctgtttgatggtgaaaacgtaccgcagatgtcgcgctcgcgcctgtacaccgtgcgcaagcgtatgagcatgctgtttcaatccggcgcgctgttcaccgacatgaacgtgtttgataacgtcgcctatccgctgcgcgagcatactcgtctgccggaagcgctgctgcacagcacggtaatgatgaagctggaagccgtcggccttcgcggagccgctaagctgatgccttccgaactttcgggggggatggcgcgccgtgctgcgctggcgagggcgattgcgctggaacctgatctcatcatgttcgatgagccctttgtcggacaggaccccattacgatgggggtactggtgaaattgatttctgaactcaacagcaccctgggtgtcacctgtatcgtagtttcgcatgatgtgccggaagtgctcagcattgcggactttgcgtatattgtagcggacaaaaaagtcgtggcgcatgggagcgcgcagtcgctgcgtgaaaatgccgatcctcgcgttcgtcagttcattgatggtatcgctgacggcccggtgccgttccgctatccggcgggtgattatcatcatgatttattgggcaaagggagttaa

SEQ ID NO: 172688 - DNA, 783 bp, Klebsiella oxytoca
atgttgttaaatgcgctagccgcgctcggacatcgcggtattaaaactatcgcgacgttcgggcgtgctggattgatgctcttcaacgcagttgtgggcaagcctgagtttcgcaagcatgcgccgctgctggtacgccagctgtataacgttggcgtgctgtcgatgctgatcattattgtatcggggctgttcatcggtatggtgctgggtctgcagggctatctggtgttaaccacctatagcgctgaaaccagcctcggcatgctggtggcgctgtcgctgctgcgtgaactggggccggttgttgccgcgctgctgtttgccggacgtgccggttcggcattgacggccgaaattggcctgatgcgcgccactgaacagctctccagcatggagatgatggcggtcgacccgcttcgccgcgtgatttcaccgcgtttctgggccggggtgatttcactgccgttactaaccattatttttgtggcggtcggcgtatggggcggttcgctggttggggttaactggaagggcattgatgccggcttcttctggacggcgatgcaaaatgccgtcgactggcggatggatctggtcaactgcctgattaagagtctggttttcgccattacggtaacatggatcgcgttatttaacggttatgacgctatccccacttccgccgggattagccgggcgacgacgcgtacggtagtacatgcgtcgctggcggttctggggctggattttgtgctgactgcgctgatgtttgggaattga

SEQ ID NO: 172689 - DNA, 552 bp, Klebsiella oxytoca
atgcaaacgagaaaaaatgaaatctgggttggggtattcttactggtggcgctgctggcggcgctgtttgtctgcctgaaggcggcaaacgtgacctctatacgtactgaaccgacctaccggctctatgccacttttgacaatatcggcggtctgaaagcgcgctcaccggtgcgaattggcggcgtggtcgtaggacgcgtggcggatattaccctcgatcctaaaacctacctgcctcgcgtggctctcgatattgatgagcgctataaccatatccccgataccagttcgctggcgatcagaacttccggtctgctgggcgaacagtacctggcgatgaacatcgggtttgaagatcctgagctgggaacggctatccttaaagatggcggcaccattcaggacaccaaatccgccatggtgctggaagatttgataggccagttcctctacaacagtaaaggtagtgacaataagaattctggcgatgaacaggctgctggagagagtcatactgacgctacgccgcctgccggcacgacgcattaa

SEQ ID NO: 172690 - DNA, 636 bp, Klebsiella oxytoca
atgtttaaacgcttactaatggtcgccatgctggtgattgccccattgactgcggctaccgccgcggaccagtccaatccgtataagctgatgaacgaagcggcgcagaaaaccttcgaccgcctgaaaaacgagcagccgaagattcaggctaacccgaactacctgcgcgaaatcgtcgatcaggaattgctgccgtacgttcaggtaaaatacgccggtgcgctggtgctggggcgttattacaaagaagcgaccccggcgcagcgtgaagcctattttgccgccttccgtgaatatctgaagcaggcctacggccaggcgctggcgatgtaccacggtcagacctaccagatagcgccggagcagcctctgggcgatgcgactattatccctatccgcgtcacgatccttgacccgaatggtcgtccgccggtgcgcctggatttccagtggcgtaaaaatacccagaccggcaactggcaggcgtacgacatgattgcggaaggggtgagcatgatcaccactaaacaaaatgagtggagcgacctgctgcgcaccaaaggcgttgatggtctgacggcgcagctgaaggcaagctccgcgcagccgattaccctggaacagaaaaaataa

SEQ ID NO: 172691 - DNA, 291 bp, Klebsiella oxytoca
atgaccgggcagctgagctgggctcgcgatggtgagacgctggcgctgcgcggagagctggatcaggatctcctggtcccgctgtgggatgcacgcgctcaggcgacggatggcgtgtcggcaattgacctgagcgcagtgacccgcgtggataccgccggactggcgctattggtgcattttatcgcgctgattcgtcggcagggtcgggaagcgaaattgatcggtaagagtgaaaatctgcaaaccctggtcaggttgtataaccttcctgctgatatgatcccataa

SEQ ID NO: 172692 - DNA, 255 bp, Klebsiella oxytoca
atggaaaatcatgaaattcagaccgtgctgatgaacgcactctcccttcaggaagtccacgtctctggcgatggcagccactttcaggttattgctgtgggtgagatgttcgacggcatgagccgggtcaagaagcaacaggctatctacgccccgctgatggaatatattgccgataaccgcatccatgctctgtcgattaaagcgtttactccgcaggagtgggcgcgagaccgcaaacttaatggcttataa

SEQ ID NO: 172693 - DNA, 1260 bp, Klebsiella oxytoca
atggataaattccgtgttcaggggccgactcgccttcagggcgaggtcaccatttccggcgcgaaaaacgccgccctgccaatcctcttttccgcgctattagccgaagagccgattgagatccaaaacgtaccgaagctgaaagacatcgataccaccatgaaactgctgagccagctgggcgcgaacgttaagcgcaacggctccgtctggattgatgccggcccggtcgacgttttctgtgctccgtatgatctcgttaaaactatgcgcgcgtctatttgggcgctggggccgctggtggcccgctttggccagggtcaggtttcactgcctggcggctgcgctatcggcgcgcgccccgttgatttacacattaccggccttgagcagctgggcgcggaaatcaaactggaagaagggtatgttaaggcgtcggtcaacggccgtctgaaaggcgcgcatatcgtgatggacaaggtcagcgttggcgcaaccgtgaccatcatgagcgcagcgacgctggcggaaggcacgaccgttatcgaaaacgccgcgcgtgagccggaaattgttgataccgcaaacttccttaatacgctgggcgcgaaaatcaaaggtcagggtaccgatcgtatcaccatcgaaggcgtagcgcgcctcggtggcggcgtgtaccgcgttctgccggatcgtattgaaaccgggacgttcctggtggcagcggcgatttctggcggtaagattttgtgccgcaatgctcagcccgataccctggatgcggttctggcgaagctacgtgatgccggcgcggatatcgaaacgggcgaggactggattagcctcgacatgcatggcaaccggccgaaggctgtcaacgtgcgtactgccccacacccgggcttcccgaccgacatgcaggcccagttcacattactgaatctggttgctgagggaacaggggtgatcaccgagacgatcttcgaaaaccgttttatgcatattccggaactgatccgtatgggtgcgcatgcggaaatcgaaagcaacacggcgatttgccacggcgtgcagcagctttctggcgctcaggtaatggcgacggatctgcgcgcgtcagccagcctggtactggcgggctgtatcgcggaaggtacgacgattgtcgatcgtatttaccacattgaccgcggctacgagcgtatcgaagacaaactgcaggcgctgggcgcgaatatcgaacgcgtcaaaggcgaataa

SEQ ID NO: 172694 - DNA, 273 bp, Klebsiella oxytoca
atggataagttcatcgactggcatccggcggatattattgccggattacgcaaaaaagggacgtcgctggcagctgaatcgcggcgtaatggtttaagttcttcaacgcttgccaacgcgttgactcgtccctggcccaaaggcgagctgattattgcgaatgcgctggaaaccgatccgtgggtgatatggccatcgcgctatcacgatccccatacccatcagtttatcgacagaacgcagatgatgcgtcagaggaagaataacaagtaa

SEQ ID NO: 172695 - DNA, 972 bp, Klebsiella oxytoca
atgaatttagaaaaaatcaatgagttaaccgcgcaggatatggcgggcgtcaatgcgacaattcttgagcaactcgactctgatgttcagcttatcaatcagttaggctattacattgttagcggaggcggtaaacgcattcgtccgatgatcgccgtactggccgcgcgtgccgttggatatcagggcaacgctcatgtcgccattgccgcgctgatcgaatttatccacaccgccaccctgctgcatgatgatgtcgtcgatgagtctgatatgcgccgcggaaaagccacagcaaacgccgcttttggtaatgccgctagcgtgctggttggtgatttcatctacacccgcgcctttcagatgatgaccagccttggctcgctgagagttctggaagtgatgtcggaagccgttaacgttatcgctgaaggcgaagtgctgcagttgatgaacgtcaacgatccggacatcaccgaagaaaactacatgcgggtcatttacagcaagactgcccgtctgtttgaagctgcagctcagtgctccggtattctggccgactgtaccgcggaacaagaaaaagcgttacaggattacggacgctatctggggaccgctttccagctgatcgatgatttgctggactacagttcagacggcgagcgtctcggtaaaaacgtcggtgacgatctgaatgaaggcaaacctacccttccgctgctgcacgcgatgcggcacggcaacgccgaacaatccgccatgatccgcggagcgattgaacagggtaacggtcgtcatcttcttgaagccgtgctggaaaccatggccacctgtggttcgcttgaatggacccaaaaacgcgcggaggaagaagctgataaagctattgccgcgcttcaggtccttcccgattctccatggcgggaagcgctaattggcctcgcccacatcgctgtacagcgcgatcattaa

SEQ ID NO: 172696 - DNA, 312 bp, Klebsiella oxytoca
atgtacgcggttttccaaagtggtggtaaacaacaccgagtaagcgaaggtcaaaccattcgcctggaaaagctggacatcgcaactggcgaagctgttgagttcgctgaagtgctgatgatcgcaaacggtgaagaaattaaaatcggcgttcctttcgttgagggcggcgtaattaaagctgaagttgttgcacacggtcgtggcgagaaagttaaaatcgttaagtttcgtcgtcgtaaacactaccgtaagcagcagggccatcgtcagtggttcactgatgtgaaaattactggcatcagcgcctaa

SEQ ID NO: 172697 - DNA, 258 bp, Klebsiella oxytoca
atggcacataaaaaggctggcggctcaactcgtaacggtcgcgattcagaagctaaacgcttgggcgttaagcgtttcggtggcgaatccgttctggcgggtagcatcatcgttcgtcaacgtggtaccaaattccacgctggcactaacgtaggttgcggtcgtgaccacactctgtttgctaaagcagacggtaaagtgaaattcgaagttaaaggcccgaacaaccgtaaatacatcagcatcgttgctgagtaa

SEQ ID NO: 172698 - DNA, 966 bp, Klebsiella oxytoca
atgaagcagcaggccggcatcggcattattttagcgctcaccacggcgatgtgttggggcgctttgccgatcgcaatgaagcaggttcttgaagtgatggaaccgccgacggtggtgttttaccgctttttgatggcaagtattggtctcggcgccattctggccatgaaaagaaaactgcctccgctgcgtatttttcgcaagccgcgctggttgatactgctggtcattgcgacgggtggtttgttcggtaacttcattctgtttagctcttccttgcaatatctcagccccaccgcttctcaggtgattggccagctgtccccggtcggcatgatggtggccagcgtttttatccttaaagagaaaatgcgcggcacccaggttgcgggagcgctaatgctggtgagcggtctggtgatgttttttaacaccagcctgattgagatttttacccgcctgacggactacacatggggggtaattttcggcgtaggcgccgcgacggtgtgggtgagttacggcgtcgcgcaaaaggtgttattacgccgtctggcatcgcagcaaatcctttttttgctgtacactttatgtacgatatcgctattgccattagcaacgccttcacaggtgctggcattaagcgactggcagctggcctgtctggttttttgcgggctcaataccctggtgggctacggtgcgctggcggaagccatggcgcgctggcaggcggcgcaggtgagcgcgttgattaccttaacgccgttatttacgctgctattttcagatttattatcactggcctggcccgacgttttcgccagaccgctgttgaacctgatgggttatctcggtgcgtttgtcgtggttgcgggcgcgatgtattccgccgtcggccaccgtctttggggacggtggcgtaagcgagaagcggttgtgccgctcccccgctcaggcgaatga

SEQ ID NO: 172699 - DNA, 1173 bp, Klebsiella oxytoca
atgaagtttgttgatgaagcaacgatcctggtcgtagcaggtgatggcggcaatggttgcgttagcttccgccgcgaaaaatatatcccgaaaggcggccccgacggcggcgacggcggcgacggcggtgatgtctggctcgaggcggacgaaaacctgaataccctgatcgactaccgttttgagaagtctttccgcgccgaacgcgggcagaacggccagagccgcgattgtaccggcaaacgcggtaaagacgtgacggtgaaagtgccggtagggacccgcgtgattgaccagggcaccggcgagacgatgggtgatatgaccaaacatggtcagcgcctgatggtcgccaaaggcggctggcacggtctcggcaacacccgtttcaaatcgtccgttaaccgtactccgcgtcaaaagacgatggggacgccgggcgataagcgcgatctgcagctggagctgatgctgctggcggatgtcggaatgctggggatgcctaatgcgggtaaatcgaccttcattcgcgccgtttccgcggcgaagcctaaagttgctgactacccgttcactacgctggtaccgagcctcggcgtggtgcgtatggacaacgagaagagcttcgtggtggccgacatccctgggctgattgaaggcgcagctgaaggcgcaggcctcggcattcgcttcctgaagcacctggagcgttgccgcgtactgctgcatctcatcgatattgagccgattgacggttccgatccggttgagaatgcgcagatcatcatcggcgagctggaaaaatacagtgagaaactggcttctaagccgcgctggctggtctttaacaagattgacctgatggataaagctgaggcggaagagaaagcgaaagccatcgcgcaagcgctgggctgggaagataagttctatctgatttccgccgccagccagcagggcgtaaaagacctgtgctgggatgtcatgacctttatcatcgaaaacccgatagtgcatgcggaagaagcgaagcccgcagaaaaagtcgagtttatgtgggatgactaccaccgtcagcagcttgaagaagctgaagtggaagatgatgaagactgggatgacgattgggacgaagacgacgaagaaggtgtcgaattcatctataaacgttaa

SEQ ID NO: 172700 - DNA, 1434 bp, Klebsiella oxytoca
atgcgatttcccagatttatcatcggattgactgccggtatagcgattagcgctcatgcggcgaatattgacgagtacatcaatcagcttcctgcgggcgcaaaccttgcctttatggcgcagaaggtaggctccccgacgccggagatagactaccatagccagcagatggcgctacccgccagcacccaaaaagtgatcaccgcgctggccgcactgctgcagctgggtccggatttccgcttcaccacgacgctggaaacgaaaggcagcctcagcggtggcatcctgaaaggagacctgattgcgcgctttggcggcgaccctaccctcaagcgccaggatattcgtaatatggttgccacgctgaagaaagcaggcgtccagcgaattgaaggcaatgttctgatcgatacctccattttcgccagtcatgataaagcgccaggctggccatggaacgatatgacgcaatgctttagcgcacctccggcggcggcgattgtcgatcgaaactgtttctccatctcgctttatagcgcgcaaaagccgggcgatttggcgtttatccgcgtggcgtcttattacccggtgaccatgttcagccaggtgcgtaccctcgctcgcggctcttctgaagcacaatactgtgagctggacgtggttcccggcgatctcaaccgttacaccctgaccggctgtctaccgcagcgcagcgagccgctgccgctggcttttgccattcaggatggcgccagctatgccggcgcgattctgaaagcggagctgaccgacgccgatatcacctggagcggtacgctgctacgtcagacgctggcaaacgagccgggtaccgtactggcgagtacgcaatctgcgccgctgcacgatttgctgcgtattatgttgaaaaaatcggacaacatgatcgccgatacggtgtttcgcaccattggccatgctcgcttcggcgtgccgggaacctggcgagccggatccgatgccgtacggcagatcctgcgtcagcaggccggtgtcgatctcgggaatacgatcattgccgatggctcaggcctgtcgcgtcataacctgatcgcgccagcgacgatgatgcaggtgctacagtacatcgcccagcatgataacgcgctcaactttatctcgatgctgcccctggctggccacgatggctctctgcaataccgcgcgggtctgcatcaggcaggcgttgacggcaaagtttcggcgaaaacgggctcactgcagggggtgtataacctggctggattcattaccacggccagcgggcagaagatggcgttcgtgcagtatttatcaggctacgccgtgcctccggccgaccagcgtaaccgacgtattccgctggtgcgcttcgaaagccgcttgtataaagacctgtatcagaataattaa

SEQ ID NO: 172701 - DNA, 477 bp, Klebsiella oxytoca
atgcaagctattccgatgaccttacgtggcgctgaaaaactgcgcgaagaactggatttcctgaagtccgtacgtcgtcctgaaatcatcgcggctatcgctgaggcgcgcgagcacggcgatctgaaagaaaatgctgagtatcacgctgcccgcgaacagcagggtttctgtgaaggacgcatcaaggatatcgaggcgaagctgtctaacgcgcaggtcatcgatatcaccaaaatgcctaacaatggccgagtgatttttggttccacagtcagcgttctgaatcttgataccgatgaagagcaaacttatcgtatcgtcggcgatgacgaggccgattttaagcaaaatctgatctctgtaaactcaccgattgcgcgtggtttaatcggtaaagaacaggatgatgttgtcgtcatccgtacaccgggcggtgaagtcgaattcgaaattatcaaggttgagtacctttaa

SEQ ID NO: 172702 - DNA, 333 bp, Klebsiella oxytoca
atgaaccgttttcaatcccaacgtaagcaaaaaaatacgatgaatctgagtactaaacaaaaacagcacctgaaaggtctggcacatccgctcaagccggtagttatgcttggcaacaatggtttgaccgaaggggtactggccgagattgaacaagcgttagagcaccatgaacttatcaaggtgaagatcgcctcggaagatcgcgaaactaaaaccttgatcgtggaagctatcgtgcgcgaaaccggcgcctgtaatgtacaggtcatcggtaaaacgctggttctgtaccgcccgactaaagagcgtaaaatctcgctgccacgctaa

SEQ ID NO: 172703 - DNA, 630 bp, Klebsiella oxytoca
atgacaggtaaaaagcgttctgccagctcaagtcgttggcttcaggaacactttagcgataaatatgttcagcaggcacagaaaaaggggttacgttcccgagcctggtttaaacttgatgaaatacagcaaagtgacaagatttttaaaccggggatgacgatagttgacctcggcgctgcacccggtggctggtcgcaatacgcggttacgcagatcggtaacagcggccgcatcattgcttgcgatcttttacctatggatccaatcgttggtgtggacttccttcagggcgactttcgtgatgaattagtcctgaaagcgttacttgagcgtgtaggtgacagtaaagtacaagttgtcatgtccgatatggcgccaaatatgtgtggaacaccggcggtggatattccccgggccatgtatctggtggagctggcgcttggaatggctcgagatgtattagcgccaggtggtagttttgtagtgaaggtgttccagggcgaaggcttcgatgagtatctaagagagattcgctccctgtttacgaaggtcaaagttcgtaagccggactcttctcgcgcccgttcgcgtgaagtgtatattgtagcgaccgggcgtaaaccatag

SEQ ID NO: 172704 - DNA, 1944 bp, Klebsiella oxytoca
ttgagtgacatggcgaaaaacctaatactctggctggtcattgccgttgtgctgatgtcagttttccagagctttgggcccagcgagtcgaatggccgaaaggtagattattcaaccttcctgcaagaggtcaatcaggaccaggttcgcgaagcgcgtatcaacggacgtgagatcaacgttaccaagaaagatagtaaccgttacacgacttacattccggttaacgatccgaagctgcttgataacctgttgacgaaaaacgtcaaagtggttggcgaaccgccggaagagccaagcctgctggcttctatcttcatttcctggttcccgatgctgcttcttatcggcgtctggatcttcttcatgcgtcagatgcagggcggcggtggcaaaggcgccatgtcgttcggtaagagcaaggcgcgcatgctgacggaagaccagatcaaaaccacttttgccgacgtcgccggttgtgacgaagcgaaagaagaagtcggtgaactggttgaatacctgcgtgaaccgagccgtttccagaagctgggcggcaagatcccgaaaggcgtcctgatggtcggccctccgggtaccggtaaaaccctgctggccaaggccattgcaggcgaagcgaaggttccattctttacaatttcaggttctgacttcgttgaaatgttcgtgggcgttggcgcatctcgcgtgcgcgacatgttcgaacaggccaagaaagcggcaccgtgcatcatctttatcgatgaaatcgacgccgtaggccgccagcgtggcgcgggcttaggcggcggtcacgatgaacgtgagcagacgctgaaccagatgctggttgagatggatggttttgagggtaacgaaggtatcatcgttatcgcggcgaccaaccgtccggacgttcttgaccctgcgctgctgcgtccgggccgctttgaccgtcaggttgttgttggtctgccggatgttcgcggtcgtgaacagatcctgaaagtgcatatgcgtcgcgtaccgctggcgccggatatcgatgcggcaattatcgcccgcggtacgccaggcttctccggtgctgacctcgcgaacctggtaaacgaagctgcgctgtttgccgctcgtggcaacaagcgcgtggtctcgatggttgagttcgagaaagcgaaagacaaaatcatgatgggtgcggaacgtcgctccatggtgatgacggaagcgcagaaagagtccaccgcgtaccacgaagcgggtcatgcgattatcggtcgcctggtgccggaacacgatccggtgcacaaagtgacaattattccgcgcggtcgtgcgctcggtgttaccttcttcctgcctgaaggcgacgctatcagcgccagccgtcagaagctggaaagtcagatttcgaccctgtacggcggtcgtctggcagaagaaattatctacggcgtagagcatgtttctaccggtgcgtctaacgacataaaagtcgcgactaacctggcgcgtaacatggtgacccagtggggcttctctgacaaactcggcccgctgctgtatgccgaagaagaaggcgaagttttccttggccgcagcgtcgcgaaagcgaaacatatgtccgatgaaacggctcgtatcatcgaccaggaagtgaagtcactgattgagcgtaactacaatcgtgcacgccagcttctgaacgataacatggacatcctgcacgcgatgaaagatgcgctcatgaaatatgagaccatcgatgctccgcagattgatgacctgatggctcgccgcgatgttcgcccgccagctggctgggaagaaccgggttcgtccaacaattctgacaataacggcacgcctcgtgcgccgcgtccggttgatgaaccgcgtacgccaaacccgggtaataccatgtcagaacagctgggcgacaaataa

SEQ ID NO: 172705 - DNA, 849 bp, Klebsiella oxytoca
atgaaacttgaagcccagggttcaaccctcgatctctcccacccccatgtaatgggaattcttaacgtcaccccggattcgttctctgacggcgggactcacaatacgctggtagaagccgttaaacatgccaatctgatgattaatgccggagcgactattattgatatcggtggggaatcgacgcgcccgggggccgcagatgtcagcgttgaggaagagctcgctcgagtcattccgacggtagaagccattgcccagcgcttcgaagtgtggatctccgttgatacctctaaaccggaggtgattcgtgaatcagcgcgcgtgggggcgcatatcatcaatgatatccgttcgttaaccgagccgggagcgctggaggctgcggcggaaaccggcttgccggtgtgcctgatgcatatgcagggccagcccaagaccatgcaggatgcccctaaatacgcggatgtctttgctgacgttgaacgcttttttgtcgaacatattgtgcgctgcgagcgggccggtatcgcaaaagataaattgctgctcgacccgggattcggtttcggtaaaaatctttcccataattatgaactgcttgcccgactcagcgagttccatcatttcggtcttccgctactggtcggtatgtcgcgtaagtcgatggtaggccagttgcttaatgtcgggccgaaagaacgcctgaatggcagcctggcttgcgcagtcattgctgcaatgcagggcgcgcagattattcgcgtccatgatgtcaaagaaacggtagaagcgctgcgtgtggtggaagctaccctggccgctaaggaaaataaacgttatgagtaa

SEQ ID NO: 172706 - DNA, 1338 bp, Klebsiella oxytoca
atgagtaaccgcaaatattttggtactgatggtatccgtggccgcgtaggcgatgcgccaataacgccagaatttgtcttaaagctgggttgggcggctggaaaggtgctggcgcgccacggttcgcgcaagattattatcggtaaagatacccgtatttcaggctatatgctggagtccgcgctggaggctggcctggctgccgcagggttatccgcttctttcaccggcccaatgccaacgccggcaattgcctatctgacgcgaaccttccgcgcggaggccggaattgtgatctccgcttcgcataatccgttctatgataacggtattaaattcttctctatcgaagggactaagctcccggatgaagttgaagaagccattgaagccgaaatggagaaagagctgacctgcgttgattccgccgagctgggcaaagccagccgtatcgtcgacgcggctggtcgctatatcgagttttgcaaaggcacctttccgaacgagctgagcctcaactccttgaaagtggtggtcgattgcgctcacggcgcgacttaccatatcgccccgagtgttttccgcgagctgggcgctcaggtgatcgccatgggctgtgagcctgatggactcaacatcaatgaagaagtcggagcgacggatgttcgtgctctgcaggcgcgcgtgctggaggaaaaagccgacctgggtattgcctacgatggcgatggcgatcgggtcataatggtggaccatgaaggcaataaagtcgacggtgatcagatcctctacatcatagctcgcgagggtctgcgccaggggcaactgcgtggcggcgccgtcgggacgctcatgagcaacatggggcttgaactggcgctcaaacagctgggtattcctttcgttcgcgcgaaggtaggtgaccgttatgtgctggaaaaactgcaggagaaaggctggcgcatcggtgccgaaaactccggccatgtgatcctgctggacaaaaccaccacgggggatgggattgtcgccagcctgcaggtggtggcggcgatggtgcgtaaccatatgagcctgcacgatctgtgtagcggaatgaaaatgttcccgcagctgctggttaatgtccgctttaccgaaggtagcggtaacccgctggaacatgaacatgtaaaagcggtcacggcagaagtggaggccgagctgggcaatcgtggccgcgtactgctgcgtaaatcaggcaccgagccgctgattcgcgttatggtggaaggcgagcatgaagaaaaggtgcacgagttcgcccatcgtatcgctgatgccgtaaaaagcgtgtaa

SEQ ID NO: 172707 - DNA, 330 bp, Klebsiella oxytoca
atgtacgaagctcttttagttgttttccttattgtggcaattggccttgttggtctgattatgctgcagcaaggtaaaggcgctgatatgggagcctccttcggagcaggcgcttccggcactctgtttggatccagcggttctggtaacttcatgacccgcatgactggtatcctggctgcgctgttcttcatcatcagtctggcgctgggtaatatcaacagcaacaagaccaacaaaggaagtgagtgggataacctgagcgctccgaaaaccgagcaaactcagccgacagctccggcacagccgagcagcgacatcccgcactga

SEQ ID NO: 172708 - DNA, 1344 bp, Klebsiella oxytoca
atgacgacgattctcaagcatctcccggtaggacaacgtattggtattgctttttctggtgggctggataccagcgccgcgctgctgtggatgcgtaaaaagggagcagtcccttatgcatataccgctaacctgggacagccagacgaagacgattacgaagccattcctcgtcgtgccaaagagtatggtgctgaaggagctcgtctgatcgactgccgtaagcagctggttgcggaaggtattgctgcaatccagtgcggcgcgtttcataacaccaccggcgggttgacctactttaataccactccgctgggccgcgcagtgaccggtactatgctggttgccgcgatgaaagaagacggcgttaacatctggggcgacggcagtacctataaaggcaacgatatcgaacgtttctatcgttacggcctgctgaccaacgcagagctgaaaatttacaaaccgtggctggatagcgactttatcgacgagttaggcggccgccaggaaatgtcagaatttatgatttcctgcgggtttgactataaaatgtccgttgaaaaagcctactcaaccgactccaatatgctgggagctacgcacgaggctaaagatcttgagttcctgaactccagcgtcaagattgtgaacccgattatgggcgtgaagttctgggatgaaagcgtcaaaattcctgcggaagaagtcaccgtccgctttgaacaaggccacccggttgcgctgaatggacagacctttagcgatgacgttgagctgatgctggaagctaatcgcatcggcggccgccatggactcggcatgagcgatcagatcgaaaaccgtatcatcgaagcgaagagccgcggcatttatgaagcccccgggatggcgctgctgcatattgcctatgagcgtctgctgaccggtattcataatgaagataccatcgaacaatatcacgcacacggtcgtcagctgggtcgtctgctgtatcaggggcgctggttcgactcacaggctctgatgctgcgcgacggcctgcagcgctgggtggccagccaaatcaccggcgaagtgacccttgaactgcgtcgcggcaacgactattccatcctgaataccgtgtcagataatctgacctataaagcagaacgcctgaccatggaaaaaggcgactcaatgttctccgctgaggaccgtatcggccagctgacaatgcgcaatctggatatcaccgatacccgcgataagctgtttggctacgctcagtccggactgctgaccgcctcttccgccaccggcttgccgcaggtggaaaacctggaaaataaagctaagtaa

SEQ ID NO: 172709 - DNA, 423 bp, Klebsiella oxytoca
atgctcacagcgccagttgaagcgcttggctttgagctggtcggcatcgaatttattcgcggtcgcacatccacactgcgcatctatattgatagtgaagatggcatcaatgttgatgattgtgctgatgtgagtcaccaggtcagtgctgttatggacgtagaagacccgattacagtcgcttataacctggaagtttcttcccctggtctcgatcgtcctatgtttaccgccgaacactatgagcgtttcatcggcgaagaagtttcgctggttttgcgcatggcggtacagaaccgacgcaaatggcagggccttatcaaagcggtagacggtgagatgatcacggtaaccgtcgaaggcaaagatgaagtgttcgcgctgagtaacatccagaaggcgaacctggttccccacttttaa

SEQ ID NO: 172710 - DNA, 1488 bp, Klebsiella oxytoca
atgaacaaagaaattttggctgttgttgaagccgtttccaacgaaaaggcgctgccgcgtgagaaaattttcgaagcgttggaaagtgcgttagcaacggctactaagaaaaaatatgaacaagagatcgacgttcgcgtagaaatcgatcgtaaaagcggtgatttcgacacattccgtcgctggctggttgtggaagaagtcacccagccgacgcgcgaaatcacgctggaagctgcgcgtttcgaagatgaaagcatgaatcctggcgattacgtcgaagaccagattgaatctgtcacctttgaccgtatcactacgcagactgcgaagcaggttatcgtacaaaaagtacgtgaagccgaacgcgcaatggtcgttgatcagttccgtgagcacgaaggtgaaattatcacgggcgtagtgaagaaagtgaatcgcgacaacattacgctggatctgggcaacaacgctgaagccgtgatcctgcgtgaagacatgctgccgcgtgaaaacttccgtccgggtgaccgtatccgcggcgtactgtacgcagtccgcccggaagcgcgtggcgcgcagctgttcgtgacgcgttccaagccggaaatgctgattgaactgttccgcattgaagttccggaaattggtgaagaagttctcgaaattaaagcggcggctcgcgatcctggctctcgtgccaaaatcgcggttaaaaccaacgataagcgcatcgatccggtgggtgcctgcgtcggtatgcgcggcgcgcgcgttcaggcggtctcgactgaactgggcggcgagcgtattgatatcgtgctgtgggacgataacccggcgcaatttgtcattaacgccatggctccggctgacgtcgcctctatcgtggtagatgaagacaagcacaccatggatatcgcagtcgaagcgggcaacctggcgcaggccattggccgtaacggtcagaacgtccgtctggcgtctcagctgagcggctgggaactgaacgtcatgaccgttgatgacctccaggctaagcatcaggctgaagcccatgcagcgattgataccttcactaaatatcttgatattgatgaagatttcgccacgctgctggttgaagaaggtttcgccactctggaagaactggcctatgtgccaatgaaagaactgctggaaattgacggtctggatgaaccgaccgttgaagcacttcgtgagcgggcgaaaaacgcgctgaccacgctggcgctggccaaagaagagagcctgggagacagcaaacctgccgacgatctgttgaatctggaaggtatggatcgcaccctggcattcaccctggccgcccgtggtgtttgtacgctggaagatctcgccgagcagggcattgatgatctggctgatatcgaaggcttgaccgacgagaaagccggagaacttatcatggccgctcgtaatatttgttggttcggcgacgaagcgtaa

SEQ ID NO: 172711 - DNA, 2691 bp, Klebsiella oxytoca
atgacagatgtgaccattaaagcgctggcctcagagattcagacctctgtggatcgcctgatacagcaatttgctgatgcagggatccgcaaatcggctgatgattctgtgaccgcgcaagagaagcaaaccttgttgacgcacctgaaccgtgaacacggctcagcgcccgacaagctgacgctgcagcgcaaaacgcgcagcacgttaaatattccgggtaccggtggaaagagtaagtcggtacaaatcgaagtccgcaagaaacgcacctttgtgaaacgcgatccgcaagaggccgaacgccttgccgcggaagagcaggcgcagcgtgaagcggaagagcaagcccgtcgtgaggcagaagaagctgccaagcgcgaggcgcaattaaaagctgaacgtgaggccgcagaacaagcgaaacgtgaactcgccgataaagcgaaacgtgaagccgcggaaaaagacaaagtgagcaatcaacaaaccgacgatatgaccaaaaccgcccaggctgaaaagcaacgccgcgaaaacgaagctgcggagctgaagcgcaaatcggaagaagaagcacgccgcaaacttgaagaagaagcgcgccgtgtagcggaagaagcacgccgtatggctcaagaaaacgaaaagaactggactgaagcgccagaaacgcctgaagagaccactgactatcacgtaacaacttctcagcatgcgcgtcaggctgaagacgataacgatcgtgaagttgaaggcggtcgcggccgtggacgtaatgcgaaagcagcgcgtccggctaagaaaggcaacaaacacgctgaatcgaaagccgatcgtgaagaagcccgtgcggccgttcgcggcggtaaaggtggtaaacatcgtaagggttcggctctgcagcaaggcttccagaagccggctcaggcggttaaccgtgatgttatcatcggtgaaaccatcaccgttggcgatctggccaacaagatggccgttaaaggttctcaggtcatcaaagcgatgatgaagctgggcgctatggcgacgattaaccaggtcatcgaccaggaaaccgcacagctggttgccgaagagatgggccacaaagttatcctgcgtcgtgaaaacgagctggaagaagcggtaatgagcgaccgtgacaccggcgctgcggcggaaccgcgcgcaccggttgtgactatcatgggtcacgttgaccacggtaaaacctctctgctggactacattcgttcaacgaaagtggcctctggcgaagcgggcggcattacccagcatatcggtgcgtaccacgtcgaaaccgacaacggtatgatcaccttcctggataccccgggccacgccgcgttcacctctatgcgtgctcgtggtgctcaggcgacggatatcgtggttctggttgtggcggcagacgacggcgtgatgccgcagaccatcgaagctattcagcacgcgaaagcggcgggtgtgccggtcgtggttgcggtgaacaaaatcgataagccggaagcggatccggatcgcgttaaaaacgaactgtcccagtacggcattctgccggaagagtggggcggtgaaagccagttcgtccacgtgtctgctaaagcgggtaccggcatcgacgaactgctggacgcaatcctgctgcaggctgaagttctggagctgaaagcggttcgtaaaggtatggcgagcggcgcggttatcgaatccttcctggataaaggtcgtggtccggttgctaccgttctggtacgcgaaggtacgctgcacaagggtgacatcgtcctgtgcggtttcgaatatggtcgcgttcgtgcgatgcgtaacgaactgggtcaggaagtgctggaagcgggtccatccattccggtggaaatcctcggcctgtcaggcgtaccggctgccggtgacgaagtgaccgtcgttcgtgacgagaagaaagcacgtgaagttgcgctgtatcgtcagggtaaattccgtgaagttaagctggctcgtcagcagaaatctaaacttgagaacatgttcgccaacatgaccgaaggcgaagttcacgaagtgaacatcgtcctcaaagcggacgtgcagggttctgtggaagcgatctccgactccttgctgaaactgtctactgacgaagtgaaagtgaagattatcggttccggcgtaggtggtatcaccgaaaccgacgcaaccctggccgctgcctccaacgcgattctggttggctttaacgttcgtgctgatgcatccgcacgtaaagttatcgacgcggaaagcctggatctgcgctactactccgtcatctatcatctgatcgacgaagtgaaagcagcgatgagcggcatgctgtctccggaactgaaacagcagatcattggtctggccgaagtccgtgatgtgttcaaatcgccgaaattcggcgccatcgcaggctgtatggttactgaaggtacgattaagcgccataacccaatccgcgtactgcgcgacaacgtggttatctatgaaggcgagctggaatccctgcgccgcttcaaagatgacgttaacgaagttcgtaacggcatggagtgtggtatcggcgttaagaactacaacgacgttcgcgttggcgatatgatcgaagtgttcgaaatcatcgagattcaacgtaccatcgattaa

SEQ ID NO: 172712 - DNA, 402 bp, Klebsiella oxytoca
atggcgaaagaatttggtcgcccgcagcgcgtggctcaggagatgcaaaaagagatcgcaatcatcctgcagcgcgaaattaaagacccgcgtctgggcatgatgaccacggtttcaggcgtcgagatgtcccgcgacctggcctatgccaaagtgtttgtgaccttcctgaacgacaaagacgaagccgccgtgaaagcgggcatcaaggctttgcaggaagcgtctggttttattcgctcgctgctgggcaaagcaatgcgcctgcgtatcgtgccggaactgaccttcttctacgacaattcattagtcgaaggaatgcgcatgtcgaacctggtgaccagcgtggtgaaacatgacgatgagcgtcgtgtgaacccggacgacagtaaggaggactaa

SEQ ID NO: 172713 - DNA, 945 bp, Klebsiella oxytoca
atgagtcgtcctcgtcgtcgcggtcgcgacgtgcacggcgtactgttgctggataaaccgcaaggcgcatccagcaacgacgtgctgcagaaagttaaacgactttataatgctaaccgggcagggcatacgggagcgctggatccgctggcgaccggcatgttgccgatttgcctcggggaagcgacaaagttttcccagtatctgcttgattctgacaagcgctaccgcgtgattgctaaacttggccagcgcaccgatacctctgatgccgacggccaggtggtggaagaacgtccgctgacttttagtcctgagcagctggcagccgcgctcgatggctttcgtggtgaaacccagcaggtgccgtcgatgtattcggcgctgaaataccaggggaaaaaactgtacgaatatgctcgtcaggggattgaagtaccgcgtgaatcccggccgattacggtttacgagctgctgtttatccgccatgaggggacggagcttgagctggaaattcattgctccaaaggcacctacattcgcacgattattgatgatttaggcgagaagcttggatgcggcgcgcacgtcactttcctgcgtcgcctggcggtcagtaaatatcccgtcgaacggatggtgacgctggagcagctgcaggcgctggttgaacaagccaatgcgcaggatattcccgcagcccagctgttggacccgctgttgatgccgatggacagcccggcttcggattacccgctggtgaatattccggaaacctccgccatctactttaaaaacggtaatccggtgcggacatcgggtgcgccgctgcaggggctggttcgcgtcactgaaggtgatgacgagaagtttcttggcatgggggaaatcgatgatgaaggccgcgtggcgcctcgtcgtctggtggttgaataccctgcctga

SEQ ID NO: 172714 - DNA, 270 bp, Klebsiella oxytoca
atgtctctaagcgttgaagctaaagcaaaaatcgtttctgagttcggtcgtggcgaaaacgacagcggttctactgaagttcaggttgcactgctgactgcacagatcaaccacctgcagggtcactttgcagagcacaaaaaagatcaccacagccgtcgtggtctgctgcgcatggtttctcagcgtcgtaaactgctcgactacctgaaacgtaaagatgttgcacgttactcttcgctgatcgagcgtctgggtctgcgtcgctaa

SEQ ID NO: 172715 - DNA, 2139 bp, Klebsiella oxytoca
ttgcttaatccgatcgttcgtaaattccagtacggccaacataccgtaacgctggagaccggcatgatggcgcgccaggcaactgccgccgttatggttagcatggatgacaccgcggtattcgttaccgtagtcggccagaaaaaagcgaagccaggccaggatttcttcccgctgaccgttaactatcaggagcgtacttacgctgctggtaaaatcccgggtggtttcttccgtcgtgaaggccgtccgagcgaaggcgaaaccctgattgcgcgtctgattgaccgcccggttcgcccgctgttcccggaaggcttcgttaacgaagttcaggttattgcgaccgtcgtttccgttaacccacaggttaacccggatatcgtcgcgatgatcggcgcttccgctgcgctgtctctgtccggtattccgtttaacggcccaattggcgccgcgcgcgtgggttatattaatgaccagtacgtgctgaacccgacccaggaagagctgaagtccagcaaactggatctggttgttgcgggtaccgaagccgcagtactgatggttgaatccgaagctgaactgctgagcgaagaccagatgctgggcgcggtcgtgtttggtcacgaccagcagcaggttgttattcagaacatcaacgacctggtgaaagaagccggtaaaccgcgttgggactggcagccggaagtggttgatgccgcgctgaacgcgcgcgtcgctgcgctggctgaatctcgcctgagcgatgcgtaccgtatcaccgacaaacaggagcgttatgctcaggttgacgtgatcaaatccgaaactatcgcgaccctggttgcggaagatgaaaccctggacgctaacgaactgggcgaaatcctgcacgcaatcgagaaaaacgtggtgcgtagccgcgtactggccggtgagccgcgtatcgatggtcgtgaaaaagatatgattcgtggtctggacgttcgtaccggcgttctgccgcgtacccacggttcagcactgtttacccgtggtgaaactcaggcactggttaccgcgaccctgggcaccgcacgtgacgcgcagaacatcgatgagctgatgggcgagcgtaccgactctttcctgttccactataacttccctccgtactccgtaggcgaaacgggaatggtcggctctccgaagcgtcgtgaaatcggtcacggtcgtctggctaagcgcggcgtactggccgtgatgccgactatcgaagagttcccgtacaccgtacgcgtggtttctgaaatcaccgaatcgaacggttcctcctccatggcttccgtttgtggcgcttctctggcgctgatggacgcaggtgtgccggtgaaagccgccgttgcgggtatcgcaatgggtctggtgaaagaaggcgacaacttcgtcgtgctgtctgacattctgggcgatgaagatcacctgggcgatatggacttcaaagttgcgggttcccgtgaaggtatctctgctctgcagatggatatcaaaattgaaggtatcaccaaagagatcatgcaggttgctctgaaccaggctaaaggtgcgcgtctgcacatcctgggcgtgatggaacaggcgattaacgcgccgcgcggcgatatctctgagttcgcaccgcgtattcacacgatcaagatcagcccggacaaaattaaagacgttatcggtaaaggcggctccgttattcgcgcgcttaccgaagaaaccggcaccactatcgaaatcgaagatgacggtaccgtcaaaatcgcagcaaccgatggcgacaaagcgcagcacgcgattcgtcgtatcgaagagatcaccgctgagatcgaagttggccgtatctataacggtaaagtgacccgcatcgttgactttggcgcattcgttgccattggcggcggtaaagagggtctggttcacatctctcagatcgccgacaagcgcgttgagaaagtgaccgactatctgcagatgggtcaggaagtgccggttaaggttctggaagttgaccgtcagggccgtgtccgtctgagcatcaaagaagcaactgaacaaactcagcctgcggctgcgccggaagctccggctgccgaacagcagggcgagtaa

SEQ ID NO: 172716 - DNA, 885 bp, Klebsiella oxytoca
atgaagccttttttgcgctggtgtttcgtggcgacagctctcacgctggcaggatgcagcaactctgcctggcgtaaggacgcagtcctcgcggtgccattgcaaccgactttgcagcaggaagtgattctggcgcgcatggaacaaattcttgccagtcgggctttaaccgatgacgaacgcgcacagcttttatatgagcgcggagtgttgtatgatagtctcggtctgagggcattagcgcgaaatgatttttcacaagcgctggcaatccgaccggatatgcctgaagtattcaattacttaggcatttatttaacgcaggcaggcaattttgatgctgcctatgaagcgtttgattctgtacttgagcttgatccaacttacaactacgcgcacttaaatcgcggcatcgctctgtattacggcggtcgtgctaagttagcgcaagatgatctgctggcgttttatcaagacgatcccaatgatcctttccgaagcctgtggctttatctcgccgagcgtcagctcgatgagaagcgggcgcttgaagcactgagacagcgcttaaacaagtcggacaaagaacaatggggatggaacattgtcgggttctaccttggcgacattagcgaaaaagagctaatggaccgtctgaaggcagacgcaacggataacacctcgctcgctgagcatctcagtgaaaccaacttctatttaggtaagtactacctaagtctgggggacaaggacagcgctacggcactgttcaaactggcggtcgcaaacaacgttcataactacgttgagcaccgatacgcattgttggaattatcgctcttgggccaggagcaagatgacctggcagaatcggaccagcaatag

SEQ ID NO: 172717 - DNA, 1953 bp, Klebsiella oxytoca
atggctgaattcgaaaccacatttgcagatctgggcctgaaggctcccatccttgaagcgcttaacgatctgggttacgaaaaaccatctccgatccaggctgagtgcattccgcatctgctgggcggccgcgacgttctgggtatggcccagacgggtagcggtaaaaccgcagcgttctctttaccgctgctgaacaacattgatcctgagctgagagcaccgcagattctggtgctggcgccgacccgcgaactggcggtacaggttgctgaagcaatgacggagttctctaaacatatgcgcggcgtaaacgtggttgccctgtacggcggccagcgttatgacgtgcagctgcgcgcactgcgtcaggggccgcaaatcgttgtcggtaccccgggtcgtctgctggaccacctgaaacgcggtacgctggatctctctaaactgagcggtctggtactggatgaagctgacgaaatgctgcgcatgggcttcatcgaagacgtagaaaccattatggcgcagatcccggagggtcatcagaccgctctgttctctgccaccatgccggaagcgattcgtcgtattacccgccgctttatgaaagagccgcaggaagtgcgcatccagtccagcgtcacgactcgcccggacatcagccagagctactggactgcttacggtatgcgtaaaaacgaagcgctggtgcgtttcctggaagcggaagattttgatgcggcgattatcttcgttcgtaccaaaaatgcgaccctggaagtggccgaagcgctggagcgtagcggctatagcagcgctgcgctgaacggcgacatgaaccagtccctgcgtgagcagactctggagcgtctgaaagacggtcgtctggatatcctgattgcaaccgacgttgcggctcgtggcctggacgttgagcgtattagcctggtggttaactacgatatcccgatggattccgagtcttacgttcaccgtatcggccgtaccggtcgtgcgggtcgcgctggccgcgcgctgctgttcgttgagaaccgcgagcgtcgtctgctgcgcaatatcgaacgtacgatgaagctgaccattccggaagttgaactgccgaacgcagagctgctgggcaaacgtcgcctggaaaaatttgccgcgaaagttcagcagcagctggaaagcagcgatctggatcagtaccgcgcgctgctggcgaaaatccagccgtctgccgaaggcgaagagctggacgtggaaacgctggccgcagcgctgctgaaaatggcgcagggcgaacgtccgctgatcctgccgccggatgcgcctatgcgtcctaagcgcgagttccgcgaccgtgacgatcgtttcgaacgtcgtggcgaccgtaacgatcgtggcccgcgcggcgatcgcggtggcgaagatcgtccgaagcgtgagcgtcgtgacgttggcgatatggaactgtaccgcattgaagtgggccgtgatgacggcgttgaagttcgtcatatcgttggcgccatcgcgaacgaaggcgatatcagcagccgttacattggtaacatcaagctgtttggttctcactccaccatcgaactgccgaaaggcatgccgggcgaagtgctgcagcactttacgcgtacccgcatcctgaacaagccgatgaacatgcagttgctgggcgatgctcagccgcgccctgagcgcagcggcgaacgtcgtggcggcggtgagcgtcgtgaaggcggccgtagcttcggcggcggtgaacgtcgtgaaggtcgtggtttcggcggtgagcgtcgcgaaggcggccgtggtgaaggtcgtcgtttcagcggtgaacgtcgcgaaggtggccgcgcgccgcgccgcgatgatgcttcagcgccgcgtcgtgacgactccgcaggtcgtcgtcgtttcggtggcgatgcataa

SEQ ID NO: 172718 - DNA, 1245 bp, Klebsiella oxytoca
atggcgacacttaccactacggcaacccgaccgtccttatttggcggcgtagtgattatcggcgggacaattattggcgcgggcatgttttcgctgccggttgtaatgtccggcgcatggttcttctggtctctggcggcgctggtttttacctggttttgtatgctgcattccgggttgatgatcctcgaagcgaacctgaattatcggattggttcgagcttcgataccattactaaagatctgctcggtaaaggctggaatctggttaacggcgtgtcgatcgcctttgtactttatattctgacttacgcctatatctccgccagcggctcgatcctgcaccatacgtttagcgaaatgtcgctgaacgtaccggcaagggcggccggttttggttttgcgctactggtggcgtttatcgtctggttgagcaccaaagcggtgagccgcatgacggccattgtgctgggagctaaggtcattaccttctttctgacctttggcagcctgttggggcacgtccagccgaccacgctgtttaacgtggctgaacaaaatgcctcgtatatgccctatctgctgatgacgctgccgttctgtctcgcatctttcggctatcatggcaacgtgccgagcctgatgaagtactacggcaaagatccgcgcacaatcgtgaaatgcctggtttacggtacgctgctggcgctgggtctgtacgtggtgtggctgctggtgacgatgggcaatatcccgcgccctgaatttatcggcatcgcgcagaaggggggcaatatagatgtcctggtccaggcactcagcggagtgctgaacagccggagcctggatctgctgttagtcatcttttcgaactttgccgttgccagttcattccttggcgtaacgctggggctgtttgattatctggcggatctgttcggcttcgatgactccgcgctgggacgttttaaaacagcggtactgaccttcgttccgccgatggcgggaggcttgctgtggccgaacggattcctctatgcgatcggctatgcaggtctggccgcgacgatctgggcggcaattgtaccggcgctgctggctcgcgcatcgcgtaaacgttttggcagcccattgtttcgcgtttggggtggaaagccgatgatcgctttggtgctgctgtttgggctgggtaacgttatcgtgcatttcctctcaagctttaacgtattacccacctatcaataa

SEQ ID NO: 172719 - DNA, 1008 bp, Klebsiella oxytoca
atgactgacaaatctgtttcattctcggtgctcgacctggcgccaatcccgcaaggatcttccgcaaaggaagctttctcccactctttagatctggcgcagctggcggaaaaacgcggttatcatcgctactggctggccgagcaccataatatggtcggtattgcgagcgccgcgacctcggtgctgattggctatcttgccgcccataccaccactctgcatctgggctccggcggcgtgatgctgcctaaccattcgccgctggtgattgccgagcagttcggcacgctcaatacgctctaccccggtcgtatcgatctcggccttgggcgcgcgccaggtagcgatcagccgaccatgcgcgcgctgcgtcgccatatgagcggcgatgttgataacttcccgcgcgatgtcgcggagctggtggactggttcgacgcccgcgatcctaatccgcacgtacggccggttcccggctatggcgagaagatacctgtctggctgctcggctcaagcctttacagcgctcagctggcggcgcagctggggctgccgttcgcctttgcctcgcacttcgcgccggatatgctcttccaggccctgcacctctaccgcacccacttccagccgtcagaacggttagagaagccgtatgcgatggtatgcattaacattattgccgccgatagcgacagagatgcggaatttctgtttacgtccatgcagcaggcgttcgtcaaactgcgccggggcgagaccggacaactgccgccgccggtgcaaaatatgcatcagctgtggtccgcttcagagcagtacggcgttcagcaggcgctgagcatgtcgctggtcggcgataaagcgaaaatccgccacgggctggcatcgattctacgggagacccaggctgatgagatcatggttaacggccaaatcttcgatcatcaggcgcgcctacattcatttgatttggcgatgcaggtgaaagaagagctgatcgggtag

SEQ ID NO: 172720 - DNA, 879 bp, Klebsiella oxytoca
atgaaatattcattagggccggtgctttattactggccaaaagagacgctggaagatttttaccagcaggcagccagctgcagcgcggacacgatttatctcggcgaagcggtatgcagcaaacgccgcgccaccaaagtcggcgactggatcgagatggcgaaagcgctggcgggaagcggcaaacagatagtgctttccaccctcgcgctggtgcaggcgtcctcggaactgggcgaactgaagcgctatgtcgataacggcgaatttctgattgaagccagcgatctcggcgtcgttaacctgtgcgcggaacgtaaactgccgttcgtcgccggccatgcgctcaactgctacaacgccgtcaccctgcgtctgctgcttaagcaaggtatggtgcgctggtgtatgccggtcgagctttcccgcgactggctggcgaacttgctgacccagtgcgacgaactgggcattcgcaaccagtttgaggtagaggtgctgagctacggccatctgccgctggcctactccgcccgctgctttaccgcccgttcggaagaccgacccaaagacgagtgcgaaacctgctgcataaaatatcctaacgggcgcgatgtgctctcgcaggagaaccagcaggtattcgtcctcaacggcattcagaccatgagcggctacgtctataacctcgggaatgagctgagcaccatgcacgggctggtggatatggtccgcctgtcgccgctgggcagcgagacctttgcgatgctggacgccttccgggcaaatgagaacggcgcagcgccgctaccgctgacggcgaacagcgactgcaacggctactggcggcggctggccggactggaactgcagagctga

SEQ ID NO: 172721 - DNA, 996 bp, Klebsiella oxytoca
atggagctgctctgcccagccggtaaccttccggcgcttaaggcggccatcgaaaacggcgccgatgccgtctatatcgggctgaaagatgacaccaacgcccgccactttgccggccttaatttcaccgaaaagaaactgcaggaagccgtcagctttgtgcaccagcatcgtcgtaaactgcatattgccatcaataccttcgcgcatcctgatggctatacccgctggcagcgcgcggtagatatggcggcccagctgggcgccgacgcgctgatcctcgccgatatcgcaatgctggagtatgccgccgagcgctacccgcacatcgagcgtcacgtttccgttcaggcctcggccactaacgaagaagcggtaaaattttatcatcgcaactttgacatcgcccgcgtggtgctgccgcgcgtactgtcgattcaccaggtcaaacagctggcccgcgccacgccggtgccgctggaggtcttcgccttcggcagcctgtgcattatggcggaaggccgctgctatctttcctcttatctgaccggcgaatcaccgaataccgtcggcgcctgttcgccggcacgcttcgtgcgctggcagcaaacgccgcagggactggaatcacgccttaacgaagtgctgatcgaccgctatagagatggtgaaaatgccggctatcccaccctctgtaaagggcggtatctggtcgacggcgagcgctaccacgcactggaagagcccaccagcctgaacaccctggagctgctgccggagctgatggcggcaaatattgcctcggtcaaaatcgagggccgccagcgcagtccggcgtacgtcacccaggtggcgaaagtctggcgtcaggcgatcgatcgctgcaaagccgatccgcaaaacttcgtgccgcagtccgcgtggatggagaccctcggttcgatgtccgaagggacgcaaaccacccttggcgcctatcaccgtaaatggcagtga

SEQ ID NO: 172722 - DNA, 525 bp, Klebsiella oxytoca
gtgttggataaactgcgttcccaactggttcactttggcccgtcgttaataagcgtgccggttaagctggcgccttttgccctcaagcgccaggtgctggaacaggtattaagctggcagtttcgccaggcgctggcggatggggagctggattttctcgaggggcgctggttaagtattcatgtgcgtgatatcggcctgctgtggtatacctcggtgattaacggccgtctggtggtcagcccggcggctgaagcggacgtcagctttagcgccgacgccagcgacctgctgatgattgcggcacgcaagcaggatccggatacgttgttcttccagcgtcgcctggttatcgaaggcgataccgagctgggtctttatgtaaaaaacctgatggatgccattgagctggagcagatgcccagggcgctgcgtattatgctgctgcagctggcggactttgttgaagcaggcctgaaaggcccgcagaaacctgaacagacatcggtaggtgaggcatgctga

SEQ ID NO: 172723 - DNA, 504 bp, Klebsiella oxytoca
atgctgattcgagtagaaattgggattgatgcaccgggaatcgacgcgctattgcgtcgtaccttcggcagcgatgcggaagcgcagctggtgcacagcctacgtgaagatggcctgatcacgctgggcgtggtggcgacggatgacgaaggtcaggtcgtgggctatgcggcctttagcccggttgccgttgaaggcgaagagctgcagtgggttggactggctccgctggcggtcgatgaaagctaccgcggtcagggcatcggtcgtcagctggtctatgaagggctcgattcactgaacgagtttggctatgccgctgttgtcacccttggcgatccggcgctttatggtcgtctgggctttgaacccgcagcgcgttttaatctgcactgccgttggccggatagcgcggaagctttccaggttcaccgtctggccgataacgcccttgatggcgtcagcgggctggtcgaatacagcgaccactttaaccgcttctga

SEQ ID NO: 172724 - DNA, 285 bp, Klebsiella oxytoca
gtgtgctggtttctctatctgattcgtaccgccgataatcgcctttataccgggattactaccgatgtctcacgccgcttttgccagcaccaggacggcaaaggcgcgaaagcgctgcgtggtaagggagagcttcagctggccttcagccgggaagttggtgagcactcactagcactgcgactggagtatcgtatcaagcagctaacgaagcgccagaaagagcgcctcgttgccggagacggttcgtttgaggcgctgttgaaaagcctcagaagcggttaa

SEQ ID NO: 172725 - DNA, 444 bp, Klebsiella oxytoca
atggatacgctcgccgctatcagccgttggctgggaaagcagcatgtcgtgacctggtgcgtcgcccgcgatgacgaactgtggtgcgccaatgccttttacgtttatgacccggaaaaggtcgccttttatttgcttagcgatgaaaaaacgcgccacggccagatgaccgggaaaggcgccagggtggccggaacggtaaacggccagccgaagaccgtcgccttgatccgcggcgtccagtttaaaggccaaattcgccgcctgtccggggaggaagaggcggcgatgcgtaagcgttacgtcagccgttttccggttgcccgcatgctatcggcgcccgtctgggagattctccccgatgagcttaagttcaccgataacacgctgggctttggtaaaaagctgcactggctgcgtgaatcaggcaccgagcagacgtaa

SEQ ID NO: 172726 - DNA, 519 bp, Klebsiella oxytoca
atgagtaagaagatagccgttttaattaccgacgactttgaagactcggagttcacctcacccgcggacgcctatcgtctggccggtcatgaggtcgtgacgattgaaaaacaggcggggaagaaggtaaaagggaaaaaaggggaagctgaagtcgttatcgataaagccattgatgacgtcacccctgccgacttcgacgctctgctgctaccgggcggttattcaccggacgcgctgcgcggagacgaacgctttgtcaccttcacccgcgattttgtgaacagcggcaaaccggtattcgccatctgtcacggtccgcagctgttgattagcgccgatgtgattcgcgggcgtaagctgacagccgtgaagcctatcatcgtcgacgtgaaaaacgccggtggcgaattctacgatcaggaagtggttatcgacaacgagcagctggtgaccagcagaaccccggacgacctgccggcgtttaatcgagaagctttacgtctgctcggtgcctga

SEQ ID NO: 172727 - DNA, 651 bp, Klebsiella oxytoca
atgagtcaggtactgataacgggggcaaccgggttagttggcggtcacttacttcgaatgctactcaacgcgccgggcgttaagtccgttgccgccccgacgcgtcggccgctggccgatatctccggcgtctttaacccccacgatccgcagctaacggacgccctggcgcaggttgtcgatccgatagatatcgttttctgctgtctggggactacccgccgggaagcgggtagcaaagaggcgtttgtgcatgccgattatacgctggtcattgataccgcgctggtgggaaaaaagctgggcgcgcagcatatgctggtcgtcagcgcgatgggggccaatgcgcattcgccctttttctataatcgtgtaaagggtgagatggaagaggcgctgattgcgcagcagtggccgcgcctgaccattgcccgcccgtcaatgctgataggcgagcgcgaaaaaaaacgcgccggcgaaacgctctttgcgccgcttttcaatctgctgccgggaaatctgaagtcaatagaggcgcgggacgtggcgagcgcgctactcgcggaggcgctatcgcccacgcaggagggcgtacaaattctctcttcgtcgcagctgcgcgaaagggcggcacgctcgggggattactga

SEQ ID NO: 172728 - DNA, 1041 bp, Klebsiella oxytoca
atggctggtcagtcttcatctcaggtggcatcaccgtttcaatggtggaagcccgcgctcttttttctcgtcgttatcgttggtctgtggttcgttaaatggcaaccctactatggcaaagccttcactgccgcagagacgcacagtatcggcaaatctatccttgctaacagtaacgataaccctttcgctgcggcctgggattacgccctggtctatttcctggccgtatggaaagcggcggtcctgggcgtgctgctgggttcgctgattcaggtgctgatcccgcgtgactggctgctgcgcacgctggggcaggcgcgttttcgcggtacgctgctgggaaccgtattctctctgccgggcatgatgtgcacctgctgcgccgcgccggtggcggcaggaatgcgtaaacagcaggcctcgatgggcggcgcgctggcgttctggctgggcaatccgctgctcaatccggcgacgctggtgtttatgggctttgtgctgggctggcagtttgcgctggtgcgcctgctggctggtctggcgacggtgctggtggtcgcaacgctggtgcagaaatgggtaaaagaggcggcgacgcagccggtttcggtgcctgaacagccggttgcaaccgtgcaggacggtttctttagccgctggctgcgcgctctctggacgctgttctggaacactatcccggtttatattctggcggtgctggtgctgggagccgcgcgggtgtggttattccctcatgccgatggggtggtagataacacgctgttctgggtgattgctatggcgattgccggctgcctgtttgttattccgacggcggcggagattccgatagtgcagacgatgatgctggcaggtatgggcgtggcgcccgcgctggcgctgctgattacgctgcctgctgtcagcgtaccgtcactgattatgctgcggaaagcgtttccggcgaaggcgctgtggctcaccggcgggctggtggcgctgtgcggcgcggtggttggcgggctggctttaatctga

SEQ ID NO: 172729 - DNA, 159 bp, Klebsiella oxytoca
atgactttcccggaggcggcgctgcgcgcctgtccgggcttgctgatgaccttcccggaggcggcgctgtgcgcctgtccgggctacgggtctacagcaggcgatgaacccgtagcccggctcagcaaagcgcaagccggggggttaacgtttacttga

SEQ ID NO: 172730 - DNA, 576 bp, Klebsiella oxytoca
atgaaggctctctcgcccctcgccattctgctgtctgcgctactgcttcagggatgcgttgccgcagcggtagttggcacggcagcggtcggcaccaaagccgcgacggacccgcgtacggtaggtactcaggtggatgacagcacgctggagctacgcgtcaacagcgcgctatccaaagatgaacaaattaagaaacaggcccgcatcaacgtgaccgcctaccagggtaaagtcctgctgaccggtcagtctccaacgccagacctctccgcgcgcgcgaagcaaatcgcaatgggcgtagaagggacaacggaggtgtttaatgaggtgcgtcagggccagccgatcggcttaggtaccgcctcttcggatacctggatcaccaccaaagtccgctcccagctgctgggtaccgaccaggtgaaatcctccaacgtgaaggtaacaaccgaaaatggcgaagtgttcctgatgggtctggttaccgatcgtgaaggacgcgcggcggcggatatcgccagccgggtaagcggcgtgactcgcgtcaccaccgcttttacctatatcaagtaa

SEQ ID NO: 172731 - DNA, 591 bp, Klebsiella oxytoca
gtgctcgacagaatcaaagcctgcttcaccgaaagcattcaaacccaaattgcagcagcggaagcactcccggacgccatctcccgtgcggctatgacgctcgtacaatcgctgctgaacggcaacaaaattctctgttgtggtaatggcacttccgccgccaacgcacagcattttgctgccagcatgattaatcgtttcgaaactgaacgccctggtttacccgccattgcactaaataccgataatgtggtcttaaccgcaattgccaacgatcgcctgcatgatgaaatctatgccaagcaggtgcgtgcgttgggacacgccggcgacgtactgctggcgatttctacgcgcggcaatagccgggatatcgtgaaagccgtggaagcggcggtcacccgcgatatgactatcgtggcgttaaccggttatgacggcggtgaactggctggcctcttagggcagcaggacgtcgaaatccgcattccctcgcatcgcagcgcgcgaattcaggaaatgcatatgctcaccgtcaattgtctgtgcgatttgatcgataacacgctttttccacaccaggacgattaa

SEQ ID NO: 172732 - DNA, 387 bp, Klebsiella oxytoca
atggctcaaataccagggtgggcaaatcgtcgcagccaactaagtaaacagaccggcgatgcctgggaaatgcaggcgcgccgctggctggagcgccagggtttgcgctttatcgccgccaacgtccgcgagcgcggcggcgagattgacctcatcatgcgcgacggtagcgtcaccgtatttgtcgaagtacgctatcgtcgcagcgcaagctacggcgatgccgcttccagcgtcacgccgcaaaagcaacaaagactgctcaaagccgcgcgtctgtggctctgccgacagaatgggagctttgagactgtggattgccgtttcgatgtggtagccttcaccggaaacgacatccaatggctaaaaaacgcctttggcgaatag

SEQ ID NO: 172733 - DNA, 2064 bp, Klebsiella oxytoca
atggtaccgtcaacatttcttcgttctaaacccgtgcgttgtctgcccgtactgctggccgctctgatctttgccggctgcggtacccacaccccggaccaaagcacggcgtatttgcagggtacggcacaggcagactccagttactatctgcaacagatgcagcaaagctcgaatgatagcaagaccaactggcaattactcgccattcgtgcactgctgaaagaaggtaagaaaccgcaggccgttgagctgttcaaccagctgccgtccggtcttaacgctgcgcaaagtcgcgaacggtcgttgctggcggtagaagtgaagctggcgcagaacgacttccagggcgcgcaggcgctgctgagcaaactcgatccggcaagctttgagcagaaccagctgccgcgctactggcaggcgcaaattgacgccagccaggggcagccttcgctgaacctgctgcgggccctggtcgctcagcagccgctgctgagcctggccgcgcaaaagcagaagaacatcgacgcgacctggaaagcgctcaccgcgatgaccaaagatcaggcctacgcgctggtgattaacgccgacgagaacgttctgcagggctggctggacctgcagcgcatgtggtttgataaccgcagcgatccgacaatgctcaaagcaggcatcaaagactggcagacccgctatccgcaaaacccgggcgcgaaaatgctgccgacgcagctcgtcaatatgcaaaactaccaggccgcatcgaccaataaaatcgcgctgctgctgccgcttaacggccaggcggccatttttggccggactatccagcagggctttgaagcggcgaaaaacggcgcgcctgccgtttccggaagcgcggtgcccacccaggtcgcccaggcggcgaatgttgccgatagcgcagtggtaagcccgtcgcaggcggaagtaaccgatctgacggcgacgaacagcgctcaggcgccggtacaaacgccagctgccgaccaggcgcaagctcaggcgccggtcaccgcaccggcgccggagaccaccagccagccggtacaggcaccgcagactcaggctgtgtccgccaccccggctaacccggccgccgagctgaaaatctatgacaccaccacgcaaccgatgagccagctactggctcaggtacagcaggacggcgcgaccatcgtcgtcggcccgctgctgaaagataacgtcgaacaggtcatcaagagcaatacctcgctgaacgtgctggcgctcaaccagccggagaaaatcgaaaaccgggttaatatctgctatttcgccctctctccggaagacgaagctcgcgacgcggcgcaccacatacacgatcagggtaaacagactccgctgctgctggtgccgcgcggcgcgctgggcgatcgcgtggttaatgcctttgccaatgagtggctgaagctggggggcggcacggtactgcaacagcgtttaggttccacagccgagctgcgcggcagcgttaacagcggtatttcattaagcggtacgccggtttctaccctgccgtcagcgcaggatagcgctctgggaagcccgagcgatgtgccggtcagcagcaccagcggcgtcgacgccgcttacatcctggcgacgccggaacaaattgcttacgtcaagccgatgattgccctgcgtaacggtagccagagcggcgtgacgttgtacgccagctcccgcagcgcccagggaacctccggcccggacttccgtctggagatggaaggcctgcaatacagcgaaatcccgatgctggcgggaagcaacccggcgctgcagcagcaggcgctggccgccgttcgtaacgactactcgctggcgcgcctgtacgccatgggcgccgacgcctggtctctggccaaccacttctcgcagatgcgccaggtgccaggctttgagctgaacggcaataccggcgatcttacggccacgcaggattgcgtgatcaacaggaaactgtcatggctcaaataccagggtgggcaaatcgtcgcagccaactaa

SEQ ID NO: 172734 - DNA, 861 bp, Klebsiella oxytoca
atgaaacaacacgaatcagcagataattctcagggacagctctatattgtgcccactccgatagggaatctgtctgatatcacgcaacgcgcgctggaagtgttgcaaaccgttgatttagttgcggccgaggatacccgccataccggtttgctgctgcagcattttgcgattaacgcccggttatttgcgcttcatgaccataacgagcagcaaaaagcggaaacgctggtggcgaagctaaaagaggggcaaaacatcgccctggtttccgatgccggaaccccgctgattaacgatcccggttaccatctggtgcgcacctgccgcgaggccaatatccgcgtggtgccgctgcccggcccctgcgcggcgattgcggcgctgagcgcggcggggctgccgtcggatcgtttctgctacgaaggttttctgcctgcgaagtctaaagggcgtcgcgatacgctgaaggcgctggaagaagagccgcgcaccattatcttctatgaatcgacccaccgcctgctggaaagcctggaagatatctgcacggtactgggcaagtcccgctacgtggtgctggcgcgagagctaaccaaaacctgggaatcgattcacggcgcgcccatcggcgagctgctggcatgggtgaaagaagatgaaaaccgccgtaaaggcgagatggtgctcatcgtcgagggttttaaagcgcaggaagaggcgctgccggcggtggcgctgcgcacgctggccctgctgcaggccgagctaccgttgaaaaaagccgctgccctggccgcagaaattcacggcgtgaagaaaaacgcgctgtataagtatgctctggagcagcaggggtaa

SEQ ID NO: 172735 - DNA, 1080 bp, Klebsiella oxytoca
atgaaaaacgcgatttatcttttaaccggcggcattgctctcgccctgtttgccgcagcaccggcacgcgcggcgatgggcggctgcgaagccgtaggcgggcctgttaattttatcaccagctttgccaacgactggacaaaagagcaaaacgtcgccgggactttaatagacatgacctccggcaccacctctggcggtagctataaaatggtttgcgactgtcccgccaacaccggggttaatctctactattcagcaaccacgccgttagctagctccggctattctggatttcaaaaattaaatgataatctggatattaaaacggtgattaccgatgtacctggcgtatcggcgcttacggttcctactaacataaactcaccggttaggggagaaggttattttaaggctgcaaacgataatggcgtatgtaatggggatcctgacgaacagcgcgccgggacatttaccgtaggcagtaacgtcagcattacctttcgcgtcacgcaatcttttttaggccggatggagatcccgagcacgcatattgctaccctccagtcggcctggagtagcaccgttagttatgcaaaaaacgtctacaaagatattgccgatatctatctcgagggcagcatcaccgttccgcaaagctgtaagattaacgaaggcgatgtcattcgggtcgaccttgggcaaatcagcgcctcaaaattcaccactaaggaccacatgcctgacggatatacgcctgtaaagtttgatattgtctacgattgtggggatgcgtcattatatcaaaaatctgacactcttgaacttgttgtgcagggtgatgacgtcgtgagtcagtacgtgctcgcagcccgccgcagggaatcagataatgttgctgatgttggtattatgatgcgccataacgtcaatatacccatgaatggtggatcgataactttagataaatcagctccaggcgctgtacagctgcaagcccaacccattaatctggtcggcggagtactgcagccaggcccgttccacggctcagtgaccctcaccgcaacggttagatag

SEQ ID NO: 172736 - DNA, 2526 bp, Klebsiella oxytoca
atgcaaagcaacaccacagggaaaaaaaacgtgctggcgcttaaaagccttgcttacagggtcaggcacgctttgccgatgatgctggccggcagcggcctgatatgccatgtcgcgcaggccgacgacttttatttcgatccttcgctgctggaaaccaacaaaagcggcctgcaaacggtagatctatcagccttctctcaggacagcgcccagctacccggcgagtatatcgttgatatttatattaataataagaagctgacgcagcgtaaaatcccgtttgtcgccggagataaccaccagcttatcccccagtttaccgtcggccagctgcgcgagctgggctttaaagttgatgagatcccggagctggcgaagctggacgatgcagcaaaagtcaccaacctcgcgcaaacggtgccgaacagcagcagcgagctggatctcaaccacggtaagctgaacatgagcgtaccgcaaattatgctctaccgcgatgccagaggctatgttgacccctcccgctgggacaatggcatcccggtgctgttcaccaactataactttaccggttcagagagccgctacgacggcggcgagcgcagcaggcgccagtatctgaacatgcagaacggcgccaacctcggcccgtggcggctgcgcaactactcgacctggacgcacaacagcgacacttcgcagtgggacagcattaatacctggctgcagcgggatatcaaaagcctcaaatcgcagctggtgatgggcgaaagcgcgactgacggcagcgtgttctccagctatcagtttaccggcgcgcggctctattccgatgacagcatgctgcctaacagccagcgcggctttgcgccgacgatccgcgggatcgctaactccagcgctatcgtgacggttcgtcagaacggttacaccatttaccagagcaccgtgcctgccggcgctttcgagatcaacgatctgtacccctcctcattcagcggcgatttagacgtgacgattgaagaggctgacggcaccacgcgccattttgtacagccgttctcctccctgccgatgatgcagcggccggggcacctcaaatatagcgtcaccgccgggcgctttcgggcggcaggctcggaggacagtaaagaaccggagtttattgaaactacggggatttacggcctgagtaacacctttacgctgtacggcggcctgacgggctccgaggattaccaggcgttaactctgggtatcggcggtacgctgggagagtttggtgccctgtcgatggatattggccgggcggatacccgctttgataacggcgacagcgattccggctacagctggcgcacccagtacattaaagatattccagagaccggcaccaatctatcgctgggctattaccgctataccagcactggctacttcacgttctcagatgccaaccagcgggatatcgacgctgacgatcggcagagcagcgaaatccagttcagcattaatcagaatctgtttaccggcgtcagtttttacgcttccggttcgcagcaggaatactgggacaaagggcagaaggacaaaaacctgtcgattggcctcagcggcaacctgtggggtgtcagctataacgtcagcggccagtttaccgactatgccgatcgcgacagcgatcgttcgctgtccatcagcctcagcgtaccgctggaccgctggctgccgcacgctaacgccaactggcggatcaccagccagaaggagcaagcgacccagcatgaagtcggaatcaacggctctctactggaagatagccgtctgagctacagcctgaaacagcggcagagcaagaataacgacagcaacggcagcagcctctacggcagctatcgttccgcctacggcaccgtcaacgccggttacgattacagttccgataaccaccagatgagctatggcctggccggcggcatcgtggcgcacagccacggcgtcaccttgtcgcagccgctgggtaacgcctttgcgctgattgatgccgatggcgcctctggtatacgcgtcaaaaactatcccggaatcgctaccgactacttcggctatgccgtgatcccctacctgacctcttatcaggagaaccgtatctatctggataccaccacgatgccggatgacgtcgacgtcacccagaccatgaagctggtggttccgagtcagggagcggctgtgaccgcgcagtttagcgccaaaattggccagcgcgtgctgctgacgctgacctacagaaacggtaaaccgctgccgtttggcgcgatggccagcagcgaaagccagcagcagcagagcattgttgatgaaggcggcgtgctctatctcaccggcgtcaacgaacggccgcaggcctggaacgtgcgctgggggaatgaagagcatcagcagtgccgatttacgtttagcctgcccgctaacggccagcgcacagcctccgttattcgggccacgacaacatgccgctaa

SEQ ID NO: 172737 - DNA, 693 bp, Klebsiella oxytoca
atgaaagggaaaaccctggtagcattggccttgttgcttggaggatgggtcagccaaagcctggccggcgggatcgttctgcaaaccacgcgggtgatttacgacgccagtaaaaaagaggccgccctgcccgttgccaatcacagcagcaaaatgccctatttattgcaatcatggattgataatccgcaaggaacaatccgcgggccgtttattatgaccccgccgctgtttcgcctgaatgccggcgacgactcctcattgcgcattattaaaaccgaaggcaatttgccggaagataaagagtcgctgttttacgttaacgtgcgggctattccggcccaatcgaaaagtgaagcggaaaaaaccaacgcgctgaccctggtatttaaaaccagaataaagcttttctatcgcccggcgcatcttaaaggcgccccgcaggatgcgtggaaatctatacaatataagcgaacgaataataccttagatatctataacccatccgcctattacgtggtatttgccggcatcgcattgggtaaaacagatttaaccaatcaggttgactatatcgctcccggcgagcacaaacaaattccgctacctgccgcatcgggtaataccgtgcagtgggccgccatcaatgactatggcggtaccacggcaaaagaaactcgggtactgcaataa

SEQ ID NO: 172738 - DNA, 570 bp, Klebsiella oxytoca
atgaatgtaattgcaaagtccgttgcagttggattactggcaatggctgcaggcagcgcctgggcaagcgatggtactattgaattcacgggtgaaatcaccacctctacctgtgaattcgctaacggcgatacggtaaatgttgaactgggccattactctaatacccagtttaaaaccgtaggcgacaaatcaccgactaccccgttcaccattccgctgaccaattgcccaactgaagcctggaaacatgttgatggcagcgaaagcaagtcgttccagctctggctggaaacgcgtaatggcggtactacgggcgcaaataacgatctggttgcagtaacgggttcggccacgcctgcgaccggcgtcggtattcgcatcgaccgcgcttccgacggagcccagctggcgctcaataaactgaacgacaccccggtcacttttgatatcacgggtgaacaaacggacgtcaatctgcaggcttactacgtctctaccgttgaatcttcggccatcaccgccggggaagcgaacgcttccgtcgacgttaccatcgattatcgttaa

SEQ ID NO: 172739 - DNA, 774 bp, Klebsiella oxytoca
atgaactcattcgagcgaaggaacaaaattgtcgaaatggtcaatacgcagggtagcgtattggtgctggacctttcgaatctctttggcatctccgaagtgactatccgggccgatctccgcttgctggaggaaaagggattactcacccgctttcacggcggcgccgcgaggcccggcagcaatttaaccgaaggagatagccaggaagtggtgctggaagagcgttatcaactggccagcgacccgaaaaagcgaatagcccaggccgcggcggcaatgattagcgaaggcatgacggtgatcctggatagcggcagcaccaccctgctgattgccgaggcgctggtacgtatgaccaatattacggtgattaccaatagcttacccgcagcgtttacgctttcagaaaataaagatatcaccctggtggtgtgcggtggcaccgtgcgccacaaaacgcactcgatgcacggcaccatcgctgaacgctcgcttcagggcatcagcgccgatctcatgttcgtcggcgcggacggtatcgacaccaccaacggcatcacgaccttcaacgaaggctactccatcagcggcgtcatggcagccgctgcgcataaggtcgttgccgtgctggatgccagcaaatttaatcgtcgcggcttcaaccaggttctgccgatggagaaaataaactgcgtgattaccgatgacgggattagcggggaatatctcgcagagttaaaaaacacacccattgagttacaaatcgtctag

SEQ ID NO: 172740 - DNA, 1044 bp, Klebsiella oxytoca
atgcaatcagtggttatccatgctgaggggacagtgtgcgttgaagaacgcccgataccggccctacaaacggaaaacgatgtcctggtcaaagtcgtcagctctggattgtgcggttctgatattccgcgcatcttcgccaaaggcgcccactactatcccatcaccctgggtcacgagttcagcggttatgttgaatcttacggctcagcggtgaccgacctgcaaccgggcgacgcggtagcctgcgtgcctctgctcccctgctttagttgtccccaatgtcagcgcgaatatttctctctctgcaagcagtatcagtttgtcggttcgcgcagcgaaggcggaaatgcgcagtacgtggtagttaaacgcgccaacctgttccgtctgccggatcagatgccgattgatgacggcgcgtttattgaaccgattaccgtcggtctgcacgcctttcatctggcgcagggctgcgaagggaaaaacgtgattattattggcgcaggcacgattggcctgctggcgctgcagtgcgcccgcgaactgggcgccaaaagtattacggctattgatatcaacccgcagaagctggagctggcaaaaacgctcggcgcaacgcacgtctttaacagtaaggagatgagcggcaaacagattcaaacggcgctggaagagattcagttcgaccaactggtgctggaaaccgccggcacgccgcaaaccgtggcgctgggcattgaggtcgccggaccgcgtgcgcagctggcgctggtgggcacgttgcaccatgatttgacgctgccttccgccacctttggccagattctccgtaaagagctgactatcgttggtagctggatgaattactccggtccgtggccgggagaagagtggcaaacggcggctcggctgctgacggaaaaacgcattcagcttgccccgcttatcgcccacatcggcgatgccgaaagctttgcccgcgaagtccaggcgctcaacggcgcgccgatgcaggggaaaatcctgcttaaactctcctga

SEQ ID NO: 172741 - DNA, 1374 bp, Klebsiella oxytoca
atgtttagcgaaatcatgcgttatatcctcgatcttggtccgacggtgatgctgcctatcgtgatcattatcttctccaaaatactggggatgaagctcggggattgttttaaatctggcctgcatatcggcattggctttgtcggtatcggcttggttatcggcctgatgctcgactctatcggcccggcggcaaaagcgatggctgagcatttccagattaacctgcacgtgattgatattggctggccggggtcgtcaccgatgacctgggcgtcgcaaatcgcgctggtggcgattcctatcgccatcgcagtcaacattttcatgctggtcactcggatgactcgcgtcgtgaacgtcgatatctggaacatctggcatatgacctttaccggcgccatgctgcatatcgcgaccggttcttactggattggtattcttggcgtagtggtgcatgcagctttcgtttacaagctcggcgactggtttgcgaaggatacccgcgactttttcggccttgatggcatcgccataccgcacggtagctcggcttatttagggccgatagcggtgctggtcgatacgattatcgaaaaaatccccggcctgaaccgcattcacttcagcgctgacgacattcagaaacgcttcggtccgtttggcgaaccggtcaccgtcggttttgtgatgggtctggtcatcggcgcgctggcgggctacgacctgaagggaattctccagctggcggtcaaaaccgcggccgtcatgctgctgatgccgcgcgttatcaaacctatcatggatggcctgaacccgattgccaaacaggcgcgtaaacgtctgcaggcgaagtttggcggccaggatttcctgattggtctcgatccggcgctactgcttgggcatacctcggtcgtatcggccagcctgatctttattccgctcactattctgatcgcggttgtggtgccgggcaaccaggtcctgccgttcggcgatctcgcgaccattggattcttcgtcgccatggcggtggcggtacaccaggggaacctgttccgcacgctgatttccgggatcaccctgatggggatcacgctatggattgcgacgcagaccatcggcctgcatacccagctggcggctaacgccggggctctgaagacaggcggccttgtggcctctatggaccagggcggttcaccggttacctggctgctcattcagctcttcacctggcaaaacgtggtgggctttgtggttatcggcgtcatctatgtcgccggcgtgctgttgacgtggcgtcgggcgcgcagcttcgccgccgcagagaaagccaccgccgcgcagcaaagcccgagcgtttcttaa

SEQ ID NO: 172742 - DNA, 285 bp, Klebsiella oxytoca
atgaaacgcaaagtaatcgtcgcctgtggcggcgctgtcgccacctcgaccatggccgcagaagagatcaaagatctgtgcgcggaccacagcatcgagctggacctggtgcagtgccgggtgaatgaaatcgaaacctatatggacggcgcacacctcatttgcaccaccgcccgggttgacagaacctttggcgacattccggtggttcacggtatgcctttcatatccggcgtaggcattgaagagctgcagcaaaaaatcctgaacatcctgacggagtaa

SEQ ID NO: 172743 - DNA, 468 bp, Klebsiella oxytoca
atgagtcaattgtttgttcgtaccggcattcattttcgttccagccagcaggcgctggaacacattggcgaagagatgctggcgcgcggcgtcgtgcacgatagctatccgctggcgctgctcgaacgagaagcgactttcccaaccggtattgcgctggagcagcatgcggtcgcgattccccactgcgaggcggtacatgcgaagtctccggctatctacctgattcgcccggacaatccggtcccttttcagcgtgctgacgacgacggcgaaatcgacgtttcgttaatcatcgcgctgattgtagaaaatccgactgcacagctacagctgctgcgccggttatttagtgagctacagaacccgaccacgctagaagcattgctcgctgcctcgcaggagcagctgcccgagctgtttcggcgctctatccttgagtcagagccgaacgctcaggctttataa

SEQ ID NO: 172744 - DNA, 1272 bp, Klebsiella oxytoca
atgaaagatattatttcccgccacaaagctggcgaacacatcggcatctgctcagtttgttccgcacacccgttggtcatcgaagccgcgctacgtttcgatctgcataccaacaataaggtcctcatcgaggccacctctaaccaggttaaccagtttggcggctacaccggaatgcagcctgcggacttccgtgatttcgtaaataaaatcgcccgcgaagtcggtttcccgtcagaacgcatcatcctcggcggcgaccatctcggccccaactgctggcagggcgaacccgccgctgaagcgatggaaaaatcagtcgatctgattaaagcctacgtcgccgcaggattcagcaaaatccatctcgatgcttcaatgtcctgtgcagacgatccggtgccgctgaacccggccgtcgtcgccgaacgcgccgctcgcctgtgccaggctgcggaagagaccgcaaccgacgagcagaaacgccatctgacctacgtcatcggcaccgaagttccggttcccggcggcgaagccagcaccatcggcagcgtccacgtgacccgcgcccaggatgcggcggcaacgctggaaacccatgaagccgcctttcgtaatctggggctgaacgccgcgctggatcgcgtcatcgctatcgtggtgcagcccggcgttgagttcgaccatacgcaaattattcattaccaaccggaggcagccaaagcactctccgcgtggatcgaaagcacgcccatggtctacgaagcgcactcgactgactaccagtcccgtcaggcctaccgggcgctggtacgcgaccattacgccatcctgaaagtggggccggcgctaaccttcgcgctgcgtgaagccatctttgctctcgcgcaaatggagaatgaactggtcgctccggagtctcgcagccgcgtaatggaagtgattgatgaagtgatgcttaacgaaccgggctactggcagaagtactatcgtccgacctggagccaggcaatggtggatattcacttcagcctgtccgatcgcattcgctactactggccgcatccgcgtattcgccagagcgtggaaaagttaatggcaaacctgaccgaaactaagctgcctttgggccttatcagccagtatatgcccgtgcagtttgaacgactgtcgttaaacgaactcgccgccgtaccgcacgacctcatcctcgacaaaattcaggatgtgctgcgtgcctaccgttacggctgttcatctgaaatcgcctga

SEQ ID NO: 172745 - DNA, 816 bp, Klebsiella oxytoca
atgcaactgacttgcgcagatatccatttcgatcgcgcgatcaaaacgaaagatgaagcgctgcaacgcgtcgttggcaaattaaccgaagccgggcataccacgcccgcttatctgagcggcatgcgcgaccgtgaaggacaaatcagcacttacctcggcaacggtatcgcgatccctcacggcacgccacagagccgcgatgcggtactgaaaaccggtgtcaaagtactggcctgcccgcagggtgtggattggggagaagaacaaacggcatatctgattgtgggcatcgccgcccaggataacgaacaccttgatattctccgccagcttacccacgccctgagcgatgagcgcgtgccggcagcgctttcgcgcgctgagagcccacaggcggtgctggagatactggccggcaatatcttcccggccggaggagaagagacggaaccgcccccgatgttcgacgaagaggcgacctttaccctgcgcaatccccacggactgcacgcgagaccaagcgcggtactggtgaaagcggtgaagcagtggcagtcgcaaatccgggtggaaaatctcgacacgcgttccgccattgttgacgccaaaaatctgatgcgggttgtctctctcggtgcaaaacagggccatcggctgcactttatggccagcggagaggatgctcatcaggcgctggaggctattggcgcggcctttaatgccggattaggcgaaatcgccgctcagccgcagcgtgccgttccgcccgtagaaaaacctaaacggagctggctgtctcgattatttagttaa

SEQ ID NO: 172746 - DNA, 1413 bp, Klebsiella oxytoca
atgaaaaaaatcattgcagttaccggctgccctacgggtattgcacatacttttatggctgaagaggccttaaaaaccgcagcaaagaaattaaatgtcgatattaaagtggaaaccaacggcgcttccggcgttgaaaacgcgattacccccgcggatttaaaagatatttatggcgtgattatcgccgccgataaagacgtgaacgccgagcggtttaatggcctgccggtcattgaggttccggttaaagaagccattcaccatccggccgatttaattaataaagtgatcggcggtcaggcggcgcgtcgccagggaatttctgcttccgccgagtcaacggagaaatacgagcaagagtctttcggccgtcaggtttataagcacctgatgagcggcgtgtccaacatgctgccgtttgtcgtagcgggagggattttgattgccatctccttcctgtggggcatctactccgccgatccaaactcgccgcaatataacgcgatcgccgcaacgctaatgaaagtgggccaacaagccttctcaatcatggtaccgattttcaccgcctatatcgcctggtctatttccgggcgtcccggtatggtcgcgggcttcgtcggtggcttactggccaatgcgaccggcgcaggctttctcggcggaattatcgccggttttgccgccggttattttatgctgctgatccgcaatatgctcaacggcctgccgcgacagtatgaagggctcaaatcgatattcattatgccgctcatcggcgtgctggtgattggtgtaatgatggtcctcctcggtcaacccgtcgccgccatcaataacgcgatgatgaactggctaagttcattacaggaagcaaacccgattctgttaggtattgtggtcggcgcgatgtgctccttcgacttcggcggcccggtgaataaagccgcctacgtcaccggtacgctgctgcttggccagggcaactacttctttatggccggggtttccgccgcctgcatcacaccgccgctggttatcgctttggcaacgaccttcttcccgaaagggttcagcgaagaagagcgcgccgccgggatggtcaactatattctcggctgcacccatattactgaaggcgctattccgttcgccgcgaaagatcctttacgcgttatccccatgatgatgatcgcctcttccatctctgcggttcttagctacagcctgcatattcaggttcccgctccgcacggcggcttcctgatcctgccgctggtgagcaaaccactgatgtgggtgctgtgcattctcgccggttccgcctgcggcgcggtcatgctgggatgctggaggctgtggcaaaagcgggccctggaagcaacatcgctggccggcgctattaaataa

SEQ ID NO: 172747 - DNA, 915 bp, Klebsiella oxytoca
gtgatccataccctgacactcaatactgcaatcgatatgaatatcttttgcgatccgctgaagccgtcggcagtgaaccgaacccggcacacggaatattgcccgaatggcaaaggagtgaacgtttcgctgatattaaatcactatcagcagcccactcacattatgggcattttcggtggtttcactggccgttatattgtggaagagttacgtcagaaaaacattaaagtgacgccggcatgggtctctgagccaacccgaattaatatttttattaatgacggagctgaggaatataagctcgttaatcccggagcaaaaattgatgatgagtgcaaacaacaggttattcatcatctgcaatgcgtcacttccggggattatttagcgatcagcggcagcctgccgccgggaattgaaagccgattttatgctgaaatcattgaattatgccagcagaaaggctgtgaagttattctcgatatcagccatccggtactgcgccagctgctggaattgcggccattgttgattaaacccaacgatgacgagctgcgggaaatcttcggtcttgacgtcagtagccgccagcaggtgcgtgaggccatgcgcacgctgcatcaactgggcgctcgcaacgtgctgctgacgatgggagccgagggtctctacttttccaacggcgaaggcgtgtggttttgctccgcaccgaaaattgaactggtcagctccgcctgcgctggtgacgccgcactgggtgcttttctcagtaaatggcttaacaaagaagatgtcactcacgctctggcattagccagcgcgaccggcgccgatgtcgccgcttccgccgggttaggcaaattacaacgcacagaagaattattacaacaaattcaggtcgtccaattataa

SEQ ID NO: 172748 - DNA, 855 bp, Klebsiella oxytoca
atgtacattatctcgagtaaaaacatgctgttgaaagctcagcggcttggatacgctgttccggcctttaatatccacaacctggaaacgatgcaggtggtggtagagacggcggccgagctgcgttctccgctgatccttgccggcacccctggaacttatagctatgcaggaaccggtaacgtggtggcgatcgctcgcgatctggctaagatctgggatctccctttagcggtccacctcgatcaccatgaagatctggccgatatcacacgtaaagtacaggccggtatccgctcggtcatgatcgacggttcacacgcaccttttgaagaaaacgtcgcgttagtcaagagcgtggttgaactgagccaccgttatgatgccagcgtcgaagccgagcttggtcgcctgggcggtgtggaagatgatctcgtggtcgatgcaaaagatgcgctgtataccaacccggaacaggcgcgtgaatttgtcgcccgcaccggtatcgactcgctggcggtcgctatcggtactgcccacggcatgtacgctgcagaacccaagctcgattttgaccgcctcgccgccattcgcgatcgcgttgaggttcctctggttcttcatggcgcatcgggtctggccgatagcgatatccgccgggcaatctcgttgggcgtgtgcaaggtcaacgtcgccaccgagctgaaaatcgccttctccgatgccctgaagcactatttcgaggaaaatccagacgctaacgatccgcgtcattatatgaaaccggcaaaagcggcgatgaaggatatcgtacgcaaagtcattcacgtttgcggctgtgaaggacaactgtaa

SEQ ID NO: 172749 - DNA, 831 bp, Klebsiella oxytoca
gtggcaaaaccgtctacaagtctgctgaaaaggcgcctggacatcgcggagatcgtgcgcaaaaacggagagatcaaagtcgacgatctggctgaaatgctggctgtatctggggtaacgatccgtaatgacctgaactaccttgaacagcagggctaccttaagcgctcgtttggcggcgcaatttacacttcccaggccgggaccccgatcgccttggctcaggaggctccggtagtaacggataaagccctggagaccgaaatggctcgccagatcgccgtgcagatcgaagatagcgaaacgctctttctggggcaggggtcgatcttacgcaaagtgatcccgttccttgctggctatgacgagctttgtctgctgttaaacgacctggcgcatgtgccgctggcgcaggagtttctgaatggggaaaccgtgctgctcggcggcgtactcgggagcagcggcaaaatagtcgaaggcgatctggcgctgaacgcgctgggtcaatatcgcccctcacgagcgctgatcgctgtcgaccacattgcggaagatggcaccttgagcgtcagacaggaagccagcgctcgcctgctgagcgaagcggtggcgcaaagtgagagggtgattgcggtcgttgcgcatcgtccggtgtatggcgataaacgctacgcgattggcgacttgcagcaaattagcggcatcgtgacgccgcaggtggtcgccgcggagtatcacgcccgccttctcgccgctggcatgactaacagctataccaacaacgagtgcctgacatggctcaaccctgctttgcagaaggcaaagtaa

SEQ ID NO: 172750 - DNA, 948 bp, Klebsiella oxytoca
atgaatgtgaccatttgcaccatcggcgaactactggtggagtttctggcaaaagaagagaaccagggtttttctcgcccgggtgaattttgggggccatatcccagcggcgccccggcaattttcgccgatcaggtggcaaagctggggctgggctcggtgcttttcagctgtgtcggcaacgatgcgtttggtgaaatgaatatcgcgcggctggaaagcgacggcgtaaacgttaatgggatcgccatactgcaaaaggcgaccaccggcagcgctttcgtgagctaccgtagccaggcgcagcgcgattttatttttaatatgccgaacagcgcctgtggtttgctaaccgctgaccatattgacgaccgtctgcttaaccagtgcaatcattttcacattatgggctcttcgctgttttcgtttcgcatgatcgacgcgatgcgtaaagcgattgaaaatattaaagcgcgcaacggcacggtttcgttcgatccgaatatccgcaaagagatgctcaacatccctgaaatgtcgcaggcttttgaatatatccttgattatacagatatttttttgcccagcgatggcgaactggattactttggcctcaaccctgggcgcaatgagcaggtgctggtggataagcttttaaagcgcggcgttaagcacgtggtaattaaacgcggcccgcgcggagcgagctattacagcgccagagaaacgcatcatgctgccggttttcatgtcccggttgtcgatccgacgggggccggcgactgctttggcgccacctttgtcagccttttcctgtccggcgcatcgccgcaggaggcgctgagatgggccaacgccagcggctctctggcgattacccggcgtgggccgatggaagggacttccaccaaagcgcagatagaggggtttctcaacgcgcatcaatag

SEQ ID NO: 172751 - DNA, 1572 bp, Klebsiella oxytoca
atggctgacattgaaattagacaagaatcgccaacggcgttttatataaaagtgcacgaaacggataacgtggcgattattgttaacgatcgaggtttaaaagccggaacgcgtttccctgacgggctcacgctggttgagcatatcccgcaaggccacaaggtcgcgctggtcgatattcctgtacacggtgaaatcatccgctatggcgaggtgattggctacgcggtacgcgatattccgcagggcagctggattgacgaatcgctggtggaactgccgaaggcgccgcctctgcacaccttacctctggcgaccaaagttccggcgccgctgccgccgctggaaggctataccttcgaaggctatcgcaacgccgacggcagcgttggcaccaaaaatctgctcggtattagcaccagcgtgcactgcgtggcgggagtcgtcgattacgtagtgaaaattatcgaacgcgatctgctgccgaagtatcccaacgtcgatggcgtcgtgggtctgaaccatctttatggctgcggcgtggcgattaacgctccggcagcggtcgttccgatccgcaccattcataacctggccctcaatccaaacttcggcggcgaagtgatggtgattggccttggctgcgagaaactgcagccggagcgcctgctggaaggcaccgacgatgtaaaaagcattcccgtagatagcgccagcatcgtcagcctgcaggatgagaagcacgtcggttttaaatcaatggtggatgacattctgcaggtcgccgagcgccatctggagaagctgaaccagcgccagcgcgaaacctgcccggcctccgaactggtggtcggtatgcagtgcggcggcagcgatgcgttttctggcgtgaccgccaacccggcggtgggctatgcctccgatctgctggtgcgctgcggggcgaccgtcatgttttccgaagtcaccgaagtacgcgatgcgattcatctgctgacgccgcgcgccatcaacgaagaagtcggcagacgcctgctggaggagatggcctggtacgataactatcttgatatgggtaaaaccgaccgcagcgccaacccctccccgggcaataaaaaaggcggtctggccaacgttgtagaaaaggcgctgggttctatcgctaaatccggaaagagcgcgattgccgaagtgctctctccggggcagcgcccgaccaaacgcggtttgatttacgccgcgacgccggcgagcgacttcgtctgcggtactcagcaggtggcctccgggatcactgtgcaggtctttactaccggtcgcggtacgccgtatggcctggtcgccgtaccggtgattaaaatggcgacgcgtaccgagctggcaaaccgctggtatgacctaatggatatcaatgcgggaaccatcgccaccggcgaagaaaccattgaagaggtagggctgaagctgtttgaatttattcttgatgtcgccagcggccgcaagaagactttctcagatcagtggggcctgcacaatcagctggcggtgtttaacccggcgccggtgacctga

SEQ ID NO: 172752 - DNA, 1335 bp, Klebsiella oxytoca
atgagtctggatgcaacaatagaacagaaaaaaagtgtgccaacccgctatttaattctgttaattatttttattgtcactgccgttaactatgccgaccgcgcgacgctttcgatcgccggtaccgaggtggcgaaagagctgcagctgagtgcggtctcaatgggctatattttctccgcttttggctgggcctacctgctaatgcaaatccccggcggctggctgctcgataaatttggatcgaaaaaggtctactcttacagcctgttcttctggtcgctgttcaccttcctgcaaggctttgtggatatgtttccgctggcgtgggcgggcatctcaatgttttttatgcgctttatgctgggcttctctgaagcgccatctttcccggcaaacgcccgtatcgtcgcggcgtggtttccgacgaaagagcgcggcaccgcatcggcgatctttaactccgcgcagtatttctccctggcgctgttctcgccgctgctgggctggctgacctttgcctggggttgggagcatgtcttcaccgtcatgggtgtgattggctttgtgctgaccggcctgtggataaaactgatccataatcccactgaccatccgcgcatgacgcaagaggagctgaagtttatctccgagaatggcgcagtcgttgatatggaccataaaaagcccggcagcgcggcggccagcggtccgaagcttcactatatcaagcagctgttgaccaaccgcatgatgctgggcgtattcttcggtcaatattttatcaataccattacctggttcttcctcacctggtttccgatttatctggtgcaggaaaagggtatgtcgattctgaaagtgggtctggtcgcatcgattccggcgctgtgcggttttgccggcggcgtgctgggcggcgtgttctctgactatctgattaaacgcggtttttccatcaccgtggcgcgtaagctgccgatcgtcctcggaatgctgctcgcttccaccatcattctgtgtaactacaccaataataccgcgctggtggtcaccctgatggcgctggcattcttcggtaaagggtttggcgcgctgggctggccggtgatttccgataccgcgccgaaagagattgttggtctgtgcggcggcgtatttaacgtatttggtaacgttgcttccatcgtaaccccgctggttatcggttacctggtgagcgaactgcactcattcaacgcagcgctggtctttgttggatgttccgccctgatggcgatggtttgctatctgtttgtggtcggcgacatcaaacgtatggaactgcagaaataa

SEQ ID NO: 172753 - DNA, 771 bp, Klebsiella oxytoca
atgaataacgatatcttcccgaataaatttaaggcggccctggcggcgcatcaggttcagattggttgctggtccgcgctggcgagcccaattagcaccgaagttttaggcctggccggtttcgactggctggtactggacggcgaacatgcgccgaacgatatctctacctttatcccccagctgatggcgctgaaagggagcgccagcgcgccggtcgttcgcgtaccgaccaacgaaccggtgatcattaagcgcctgctggatatcggtttttataacttcctgatcccgtttgtggaaacggaagagcaggcgattaacgccgttgcctcaacccgctatccgcctgaaggcattcgcggcgtatccgtctcgcaccgcgccaatatgtttggcaccgtgccggattacttcgcgcagtcgaacaaaaatatcaccattctcgtgcaaatcgagagccagcagggcgtggataacgttgatgcgatagccgccacgcctggcgtggacggtatttttgtcggcccaagcgatctggccgctgcgctgggtcatctgggcaatgcttcccatccggaagttcaaaaagcaatccagcatatttttgccagcgcgaagaagcacggtaagccgagcggtattctggcaccggttgaagccgacgcgcgccgctatctggaatggggcgcgacctttgtcgccgtcggcagcgacctgggcgttttccgttctgccacgcagaagctggctgactcctttaagaaataa

SEQ ID NO: 172754 - DNA, 891 bp, Klebsiella oxytoca
atgacaatgaaagttggttttattggcctcggtatcatgggtaaaccaatgagtaaaaacctcctcaaggcgggttactcgttggtggttgctgaccgtaatccggaagcgattgccgaagtgattgccgcaggcgcagaaaccgccgcatcagcgaaagcgattgccgagcagtgcgatgtgatcatcaccatgctgccgaactccccgcacgtgaaagaggtcgcgctgggcgaaggcgggatcattgaaggcgcgaagccgggcaccgttttgattgatatgagctccatcgcgccgctggcgagccgcgaaatcagcgaagcgctgaaagcgaagggcgtcgatatgctggatgccccggtcagcggcggcgaaccgaaggctatcgacggtacgctgtcggtgatggtgggcggtgataaagcgattttcgataaatattacgatctgctgaaagcgatggcgggatccgtggtacacaccggcgagatcggcgcgggcaacgtcaccaagctggccaaccaggtgattgtggcgctgaacattgcggcgatgtccgaagcgctgacgctggcgactaaagcgggcgtgaacccggatctggtttatcaggccatccgcggcgggctggccgggagcaccgtgctggatgccaaagcgccgatggtgatggatcgtaactttaagccgggcttccgtatcgatctgcatattaaagatctggcgaatgcgctggatacttctcacggcgtgggcgcccagctgccgctgaccgccgcagtaatggagatgatgcaggcgctgcgcgcggatggcctgggtaccgccgaccatagcgcacttgcatgctactacgaaaaactggcgaaagtggaagtcactcgctaa

SEQ ID NO: 172755 - DNA, 1146 bp, Klebsiella oxytoca
atgaaaatcgtaatcgccccagactcttataaagaaagcctctcggccaccgaggttgctcaggctatagaaaaaggttttcgggaaattttccccgatgcgctctacgtgaaggttcctctcgctgatggcggagaaggtaccgttgaggcgatgattgccgcgacgcagggaaccgagatgagcgcctgcgtgacggggccgctgggtctcccggttgatgcctgctgggggctttccggtgacggcaaaaccgcgtttatcgaaatggctgcggccagcgggctggggctcgtgccgcccgtacagcgtaacccgctattgacgacatcgcgcggtaccggcgagctgattctgcaggcgctggatcacggggcgaaaaatatcatcattggcattggcggcagcgccaccaacgatggcggcgcaggaatggtgcaggcgctgggcgcgcggctttgcgatgccaacggcgcagagattggcaacggcggcggtagtctgtgtagcctcaattcgatagatatctccggtcttgatgcccgactgcatgattgcgctattcgggtcgcctgcgatgtcaccaatccgctgatcggcgatagcggcgcgtcaagaatttttggcccgcagaaaggggctaccgaagcgatgatccgcgagctggacagcaatctggcgcactacgccgatattattaaggccgatctgcatgtcgatgtgaagcaggttgccggtgcgggcgcggcgggcggtatgggtgccgcgctgatggcgtttctgaaggctgaattacgcagcgggattgaaatcgtgacccaggcgctgaacctggaagagcatatccttgattgttcgctggtggtgaccggcgaaggtcggctggatagccagagtattaacggtaaagtgccggttggcgtggcaagcgtggcgaaaaagtatcataagccggtgattggcatcgccggtagtctgacccgggacgtcggtgtggttcaccagtatgggattgatgcggtgtttagcgtgctgaccagcgtaacgacgctcgaagaggcgtttcgcggcgcggcggacaatatttatcatgcgtcgcgtaatattgcggcgacattgcaggttgggatggcgacggaaggatga

SEQ ID NO: 172756 - DNA, 921 bp, Klebsiella oxytoca
atgtggaagctgaccgttaagccgctttctttcgggtatagcgtcgtggacagtcattcatctgccccatgtttcaacccgaagccagaagcaaaaacccccgccattgctggcaggggttttgctgaaaagttgaagctgaccgttaagccgctttctttcgggtatagcgtcgtggacagtcattcatctgccccgtgtttcaacccgaagccagaagcaaaaacccccgccattgctggcaggggttttgctgaaaagttgaagctgaccgttaagccgctttctttcgggtatagcgtcgtggacagtcattcatctgccccgtgtttcaacccgaagccagaagcaaaaacccccgccattgctggcaggggttttgctgaaaagttgaagctgaccgttaagccgggttctgtcgtggacagtcattcatctaggccagcaatcgctcactggctcaagcagcctacccgggttcagtacgggccgtaccttatgaacccctatttggccttgctccgggtggagtttaccgtgccgcgaactgttaccagacgcgcggtgcgctcttaccgcaccctttcacccttacctgatcccacttgcgtgggccatcggcggtttgctctctgttgcactggtcgtgggcttgcgccccccaggcgttacctggcaccctgccctatggagcccggactttcctcccctccgcccgtctcccccgaagaggacgacgacgaagcggcgactgtctggtcagcttcggcgcgaagtatagagggtttaccgacggttgtcatccttccgtcgccatcccaacctgcaatgtcgccgcaatattacgcgacgcatgataaatattgtccgccgcgccgcgaaacgcctcttcgagcgtcgttacgctggtcagcacgctaa

SEQ ID NO: 172757 - DNA, 411 bp, Klebsiella oxytoca
atgaaattaatgacccgcattgcattaacagccgctctcgccactgggttctccatggcggctcaggctgcggatgttaaggctgcacccgctccggcgcaggacccgattgtccagcacttaaaactgactaacgatcagataacaaaaattaaaagcctgcatcagcagctggaaaaaaacgttcagcagatttcccagaaagatattaaagacggcgtgttgtttgaggttattgattctggaaaatggaacgaaaaggcggtcaaagatcagctggcggcatttagccaggtagagcagcaggctcgctattatcgcgtgaagtactattttgatgtgaaccaggtgctgacgccagaacagcgtaagcaggtacaaaaagacttagctcaggagctgagtgagtaa

SEQ ID NO: 172758 - DNA, 162 bp, Klebsiella oxytoca
gtgggcaagaagaaaacaaaaaaagtggcgctatcggcgcaacagccgcaatcggaaaccgtcactacgatgagttttggctatgaagagatgttaagcgagctggaagcgatcgtcgcggaagcggagattcggctccaggaagaagagagcgtcgcctga

SEQ ID NO: 172759 - DNA, 702 bp, Klebsiella oxytoca
atgattacaacccgaacagccaaacagtgcggtcaagcagacttcggctggctgcaggcccgctacaccttttcctttggccactacttcgaccctaaattgctgggctacgcatcgttgcgcgtgctcaatcaggaaattctggcgcccggcgcgtcgtttcagccgcggacctacccgaaagtcgacattctgaacctgattctggaaggtgaagcggaataccgcgacagcgatggcaaccatattcaggcaaaagccggcgaagcgctgctgatatcaactcagcctggcgtaagctacagcgagcataacctgagtaaagatcgctcgctgacgcgaatgcagctgtggctggatgcctgtccacagcacgaaaacccgctggtgcaaaaaatcgctatcgccgccggatcgcagcagctgctggcttcgccggacggcagccagcatagcctccagctgcgccagcaggtatggatccaccatatcgacctggcgaaaggcgagcagcttaacgtgcagcttcacggcccccgcgcctacctgcagtcgattcacggtacggtgcatgcgcgggtgcaggaagaagagaagcaggctctgacctgcggcgatggcgcttttattcgtgacgaagctaacattaccctcgttgctgatacgccgctgcgcgctttgctgatagatttaccagtgtaa

SEQ ID NO: 172760 - DNA, 897 bp, Klebsiella oxytoca
atggctaaagagagagcattaacgctggaagcattgcgcgttatggatgcaattgaccgacgcggaagctttgcggcggcggccgatgagctgggtcgggtgccttcagcgctgagctataccatgcaaaagctggaagaggagctggacgtcgtgctgtttgaccgttcaggtcatcgaacaaaattcactaacgtgggccgaatgttgctggagcgcgggcgcgtactgctggaggcggccgataagctgacgacggatgccgaagcgctatcgcgcggttgggaaacgcacctcactatcgtcaccgaggcgctggtgcccaccaccgacctttttcctttaattgaaaagctggcgaccaaatcgaatactcaactgtcgattattaccgaagtactggccggggcatgggaacgccttgagcaggggcgggcggatattgtcgttgcgccggatatgcattttcgctcctcttcggaaatcaactcccgcaagctctattcggtgatgagcgtctatgtagccgcgccggatcatcctattcaccaggagccggagccgctttctgaagttacgcgcgttaagtaccgcggcgtggcggtcgcggataccgcccgcgagcgcccggtgttgaccgtgcagctgctcgataaacagccgcgcttaaccgtgagcaccatcgaagataagcgtcaggcgctgctggcaggattgggcgttgcgacgatgccgtatccgctcgtagagcaggatattgccgaagggcgtctgcgggtggtcagtccggaatacagcaacgagatcgacattattatggcctggcgtcgcgacagcatgggtgaggcgaagtcatggtgtctgcgggaaatcccgaagctgtttatgggaagataa

SEQ ID NO: 172761 - DNA, 369 bp, Klebsiella oxytoca
atggactggtatcttaaagtattaaaaaactacattggatttggcggccgcgcccggcgcaaagagtactggatgtttattctggtcaacatcatcctcaccggcgtactcagcatcattgataagatgctgggatggcagcgcgccggaggagaagggattctgaccactatctatggcgtgctgatattcttaccgtggtgggccgtgcagttccgtcgattgcacgataccgaccgctcggcatggtggctgttattgctgctgattcccgttatcggctggctggtgatcctggtattcaattgccagaacggcaccccaggaaataatcgcttcgggccggatcctaaaccgacttcttactaa

SEQ ID NO: 172762 - DNA, 987 bp, Klebsiella oxytoca
atgggacaattagttgacggcgtctggcacgacacctggtatgacaccaaatccaccggagggcgatttaagcgttctgtttccgcctttcgcaactggttaaccgccgacggcgcgccgggcccaagcggcgaagccggattcgctgcggagaaagatcgctatcatctgtacgtttctcttgcctgcccatgggcgcatcgcactttaattctgcgtagcctgaaagggctggagccgtttatctccgtctccgtggttaatcccttgatgttcgagaacggctggactttcgacgatagcttcccggcagccaccggcgatacgctctaccagcacgaatatctttatcagctttatctgcatgccgatccccactacagcgggcgcgttacggtgccggtgctgtgggacaaaaagcagcacaccatcgtcagcaatgagtcggcggaaatcatccgcatgtttaataccgccttcgatgggctgggcggccgcgcaggagattactacccgcctgagctgcgcgatcagattgatgagctgaacggctggatctacgataatgtgaataacggcgtctataaagccgggttcgccaccagccagcaggcctatgatgaagcggttgatgcagtgtttaccgctctggagcgtctggagcaaatccttggccagcatcgtttcctgacgggtaaccaactgacggaagctgatattcgcctgtggaccaccctggttcgtttcgatccggtgtacgtgacccactttaaatgcgacaaacgccgcatcagcgattacctcaacctgtatggcttcctgcgcgatatctaccagatgccgggcattgcggaaacggtggacttcgcccatatccgcaaccattactaccgtagccataaaaccatcaacccgaccgggattatctccgttggtccgcagcaggatcttaacgaacctcacggccgcgatcttcgtttccgctaa

SEQ ID NO: 172763 - DNA, 393 bp, Klebsiella oxytoca
atgaaaaaattagaagatgttggtgtactggtagcgcgcattctgatgcccattctgttcattaccgcaggttggggaaaaattaccgggtatgcgggtacacaacaatatatggaagctatgggcgtccctgggtttatgctgccgctggtgatcctgcttgaattcggcggcggtctggcaatcctgttcggtttcctgacccgcactaccgcgctgttcaccgccggcttcaccgtgctgaccgcgttcctgttccacagcaactttgctgaaggcgtgaactcgctgatgttcatgaaaaacctgaccatcgcgggcggcttcctgctgctggctatcaccggtccaggcgcctttagtatcgaccgcgtactgaataaaaagtggtaa

SEQ ID NO: 172764 - DNA, 300 bp, Klebsiella oxytoca
atgagccgcgaacagcaggaacgcgaacgacaaaaagcgcttttgctgcgcctgatccaacagcagcggctggaccttagcgccagccaccgccattggcttgaggcaactgcgcccattgatcgcggctggaataccctgctgaatctgcgttcatgggcaatggtcggcagcggcctcgtggcaatatggtcagttcgtcatccgcgctttttgatgcgctgggcaaaacgcagcctcggtatctggagcacctggcggatggcccgcaatctgctgcgccagtcgtcatcacgctga

SEQ ID NO: 172765 - DNA, 399 bp, Klebsiella oxytoca
atggcgaattctaaaagcacgcaaggccccggacaaagcgttttcggcatcggtcagcgcatcgtcactttgctggttgagatggtggaaacgcgcctgcgcctggtcgtcgtggagctggaagaggagaaagccaacctcatccagctattcctgatgctcggattgacgctgctgttcgccgcgtttggtttgatgagcatgctggttctgatcatctgggcggtcgatgcgcaatatcgattaaacgtgatgatcggcaccacggcggttctgctgctggcagcgctcattggcggtatctggaccttacgcaaagcccgacgttcaacgttcctgcgcttcacgcgtcaggagctggcaaacgaccgcgcattgctggaggacgataagccatga

SEQ ID NO: 172766 - DNA, 306 bp, Klebsiella oxytoca
atggctaaagataacgttgcagaagacctgcgtgcggaactgaagacgctggctgataccctggaagaagtgctgaactcctccacggataagtcgaaagaagagatcggtaagctacgtagtaaagctgaaagagcgctgaaggaaagccgtgtacgcctgggtgaaaccagcgacgctctcatgaagcaaacgcgagaaaccgctgcgcgtgcagatgaatacgtccgtgaaaacccgtggaccggcgtggggattggtgctgccgtcgggctggtgctgggtgtcctgctgacgcgtcgttaa

SEQ ID NO: 172767 - DNA, 369 bp, Klebsiella oxytoca
atgaaacaccgcatcgctttgctcctggttctgtcatcacttagcgccagcgcctttgccatctccccttgccaggaaaaagagcaggatatccagcgggagatcagctatgcagaaaagcataataaccagcatcgtattgacggtctgaaaaaggcgatgagcgaagtgaaggctcactgcagcgacagccagctcaaagccgatcaccagaaaaaaatcgccaaacagcaggaagaaattgccgaacgccgcaacgacctgcgcgaagccgaacagaaaggcgatgctgataaaatcagcaagcgccagcgtaaacttgaagaagcgcagcaagaactgaaagagctgcaatctcgcgagtactaa

SEQ ID NO: 172768 - DNA, 384 bp, Klebsiella oxytoca
atggcgataaagcgcgcctctctacgtcagataagctggatgctgggcggttcgttactcctgtgcagcctgttctggctctggctcaccgtgcagcagcaggaatcaaccctggctattcgtcccgttagccagggtattagcatgccggacggtttttccgtctggcaccatctcgatgccaacggcatccgttttaagagcattacgccacagaatgacggtctgctcatcaagtttgactccagcgctcagggagccgccgccaaagaagttttgggtcgcgctctgccgcatggttatattatcgctttagtggaagacgatgattcgccgacggcctggatttcccgcctgcgcgatacgccacacagattcgggtaa

SEQ ID NO: 172769 - DNA, 663 bp, Klebsiella oxytoca
atggaactattaacccaattgttgaatgccttgtgggctcaggattacgaaactctcgctaatccctccatgattggcatgctgtactttgtcttatttatgattttattccttgagaacggtctgctgcccgccgccttcttaccaggcgatagcctgcttgttctggtgggcgtactgattgccaaaggcgcgatgggttttccacaaacgctgctgctacttaccgcggcggcaagcctgggctgctggctaagttatattcagggccgctggctgggcaatacgcgtatcgtacaaaactggctgtcgcatctcccttcgcactaccaccagcgcgcgcatcatctgttccataagcacgggctttccgccctgctgattggccgttttatcgctttcgtgcgcacgctgctgccgaccattgccggcctgtcgggcctgagcagcgcgcgtttccagttttttaactggatgagcgggctgctgtgggtgctgattctgacttcgctgggatatctgttggggaaaacgccggtattcctgaaatatgaagatcagctgatgtcctgcctgatgctgctgcccgtcgcgctgctggtattcggcctgattggctcgctgatcgtcctgtggaagaaaaaatacaggagccggggctga

SEQ ID NO: 172770 - DNA, 777 bp, Klebsiella oxytoca
atggaaatcactgaatcgcgtcgtttgtatcagcagcttgccgctgagcttaagacgcgtattgaacaaggtgtctaccttgtaggcgataagctacccgcagagcggtttatcgctgacgaaaaaagcgtaagtcgtaccgtcgttcgcgaagccatcattatgctggaagtggaaggctacgttgaagtccgcaaaggttccggtatccacgttatctccaatcatccgaaacatcagcaaattgccgatgaatcgctggaattcgccaattatggtccttttgagctgttgcaggcccgccagctgatcgaaagcaacattgccgaattcgccgccactcaggtgaccaagcaggacatcatgaagttgatggaaatccaggaaaaagcgcgtaaagagaagtgttttcgcgattccgaatgggatcttcagtttcatgtgcaggtggcgctggcaacgcaaaacaccgccctcgccgctatcgtggaaaagatgtggacccagcgcgtacataacccgtactggaaaaagctgcatgaccatatcgactcgcgtaccgtcgataactggtgcgacgatcacgatcaaattctgaaagcgctgattcgcaaagatccccatgcggctaagctggccatgtggcagcatctggaaaataccaagctgatgttattcaatgaaaccagcgatgactttgaattcaatgccgatcgctacctgtttgccgataatccggtagttcatctcgatacggccgccaacggcgcaaaatag

SEQ ID NO: 172771 - DNA, 1302 bp, Klebsiella oxytoca
atgcgtaaaattaaagggttacgttggtacatgatcgcactggtgaccttaggcaccgtgctggggtacctgacgcgtaacactgtggcggcagctgcgccgactctgatggaagagttacacatctccacccaacagtattcctatatcatcgcggcctattccgctgcctataccgtcatgcagcctgtcgccggctacgtactggatattttaggtaccaaaatcggctatgccttctttgctatcgcctgggccgtgttctgcggctctaccgcgctggcgggaagctggggcggtctggcgctggcgcgcggcgcggtgggtgccgccgaagcggcaatgatcccggcgggtctgaaagccagttccgaatggttcccggcgaaagagcgttctatcgccgtcggctacttcaacgtcggctcctctatcggcgctatgattgctccgccgctggtggtttgggctatcgttatgcacagttggcagatggcctttatcatctccggcgtactgagctttgcctgggcaatggcgtggctggtgttctataaacacccgcgcgatcagaaaaaattaactgacgaagaacgcgactacatcatcggtggccaggagtctcatcaccagactaacaacggcaagaaaatgtctccgtggcagattctgcgtaaccgtcagttctggggtatcgccctgccgcgtttccttgccgaaccggcatgggggacctttaacgcctggatccctctgttcatgtttaaagtctacggctttaacctgaaagaaatcgccatgttcgcctggatgccgatgctgtttgccgacctcggctgtattatcggtggatacctgccgccgctgttccagcgctggtttggcgtgaacctgattgtttcccgtaaaatggtcgtgacgatgggcgcgctgctgatgattggcccagggatgatcggtctgttcaccagcccgttcgtcgctatcgccctgctgtgcgtcggcggttttgctcaccaggcgctgtccggtgcgctgatcacgctctcttccgacgtatttggtcgtaacgaagtggcaaccgcgaacggtatgaccggcatggccgcatggctggccagcaccatgtttgccctggtggttggcgcgctggcggatactatcggctttagcccgctgttcgccgtactggccatcttcgatgtgctgggcgcggtggtcatctggaccgtactgaaaaataaatctgcggatgacgacagcactccgctggaaaccagtaagccagccacgcaaagctag

SEQ ID NO: 172772 - DNA, 1413 bp, Klebsiella oxytoca
atgacaccgtttatgaccgaagatttcctgcttgataccgagtttgcccgccgtctgtaccacgattacgcgaaagaccagccgattttcgactaccattgccacctgccgccgcagcagattgcggaaaattaccgctttaaaaatctgtatgacatctggctaaaaggcgatcactataaatggcgtgcgatgcgtaccaacggcgtagccgagcgtctgtgcaccggtgatgcttccgatcgcgagaaatttgacgcctgggcggccaccgtaccgcatactatcggtaacccgttataccactggacgcatcttgagctgcgtcgtccttttggtattacaggtaaagtcctctctccggctacggcggacgaaatctggaatcagtgcaacgatctgctggcgcaggagagcttctccgctcgcggcatcatgcagcagatgaatgtgaaaatggtcggcaccaccgacgatccggtcgattctctcgagcatcacgcttccgtcgctaaagacagctccttcaccgtgaaagtgctgccaagctggcgtccggacaaagccttcaatatcgaacaggcgaccttcaacgactacatggcgaagctgggcgaagtgtctgacaccgatatccgccgctttgccgatctccagtccgcgctgactaaacgtctggatcacttcgccgctcacggttgtaaagtttctgaccatgcgctggacgtggtgctgtttgccgaagccaacgaaagcgaactggatagcatcctggcgcgtcgtctggcgggcgaggcccttagcgagcatgaggttgcgcagttcaagacggcggttctggttttcctcggcgcggaatacgcccgtcgcggctgggtacagcagtatcacatcggcgcgctgcgcaacaacaacctgcgccagttcaaactgttagggccggatgtgggttttgactccatcaacgaccgtccgatggcggaagagctgtccaaactgctcagcaaacagaacgaagaaaacctgctgccgaaaactatcctctactgcctgaacccgcgcgacaacgaagtgttgggcaccatgatcggcaacttccagggggaaggtatgccgggcaaaatgcagttcggttccggctggtggtttaacgatcagaaagacggtatggaacgtcagatgacccagctggcgcagcttggcctgctgagccgctttgtcgggatgctgaccgatagccgcagcttcctctcctacacccgtcatgaatatttccgtcgcatcctgtgccagatgattggtcgctgggttgaagcgggagaagccccggcggacattcagctgctgggcgagatggtgaaaaatatttgctttaacaatgcgcgtgactacttcgccattgaactgaactaa

SEQ ID NO: 172773 - DNA, 1488 bp, Klebsiella oxytoca
atgcaatacattaaaatccattcgcaagataacgtcgcggtagcgttggcggatatggcggcaggcacggtagtcaccattgacggcgatacggtcacgttggctcaggatattgcgcgcgggcataagtttacgctgcgcggcattgcgaagggagacaacgtcattaagtacggtctgccgatagggcatgcgctggcggatatcgcgccgggggaacatatccactcccataatacgcgtactaacttaagcgatctcgacgcgtacagctatcaaccggatcttatcgaacccgccgcgcagccggcggatcgcgatatccagatttatcgtcgcgccaacggcgaagtcggcgtgcgcaacgagttgtggatcctgccgaccgtcggctgcgtcaacgccatggcgcgtcaaatgcagaatcgattcctgaaagagacgaatgacgcggaagatattgacggcgtacatctcttcagtcacacctacggctgctcacagctcggtgacgatcacatcaacacccgtaccatgctgcaaaacatggtgcgccatccgaacgcgggggcggtgctggtggtcggcctgggctgcgaaaacaatcaggttgatgcatttcgcgaaacgctgggcgagttcgaccctgaccgcgtccactttatgatctgccagcatcaggatgatgaagtggaagccgggctggagcatctgcgtcagctatatgacgtgatgcgccacgataagcgcgagccgggtaagctgagcgaactgaagtttggtctcgagtgcggcggttcagacggtctgtccggcatcaccgctaacccgatgctgggccgtttctcggactacctgattgctaacggcggtaccaccgtgctgaccgaagtaccggaaatgttcggcgccgaacagctgctgatgagccactgtcgcgatgaagagacgtttggcaagctggtgacgatggttaatgatttcaaacagtactttatcgctcatgaccagccgatttatgagaacccatcgccgggcaacaaagcgggcggcatcactacgcttgaggataagtcgcttggctgtacgcagaaagcgggctccagccaggtggttgacgtcctgcgctacggcgagcggctgaaagtgcacggtcttaacctgctgagcgcgccgggcaacgatgcggtagcgaccagcgccctggccggcgcgggctgtcatatggtgctcttcagcaccggacgcggcacgccatacggcggtttcgttccgacggtgaaaattgccaccaacagcgaactggcggcgaagaaaaaacactggatcgacttcgatgccggtcagctgattcacggtaaagcgatgccgcatctgctggaagagtttgtcgataccattgtggcctttgccaacggtaagcaaacctgcaacgagcgtaatgatttccgcgaactggcgatattcaaaagcggcgtcaccctttaa

SEQ ID NO: 172774 - DNA, 555 bp, Klebsiella oxytoca
atgaccgcatactggcttgcccagagcgttggcgttatcgcctttctgatcggtattacgacatttttcaatcgcgatgagcgccgctttaagctccagctagccgtttatagcgccaccattggcgtacatttctttttgatgggcgcctggccggcgggtatgagcgccgagctgaataccgttcgtaccctcgtctccatgcgcacccgcaggctgtgggtgatgaccctgtttattgtgctcacgctggtactggggctggcgaagctgcagcacgctatggagctgctgccgattattggcaccctggccagtacctgggcgctctttcgctgctccgggctcaccgtccgctgcgtgatgtggtgtgcaaccgcctgctgggtgatccacaacttctggctgggttcgatcggcggcactctgattgaaggcagcttcctgctgatgaacggcctgaatatcattcgtttccggcggatgcagaagcgcggtatcgatccgtttaaagtggaaaaggcggtacagaaggaaaccccctccgcgcgttag

SEQ ID NO: 172775 - DNA, 1248 bp, Klebsiella oxytoca
atggcaaccccatcaccccgatcgaccctgctacggcggctggctcagggcagtctggtcaaacaaattttaatcggtctggtactcggcgtactgctggcgacggtctcaaaaccggccgccgtcgcggttggactactgggtacgctgttcgtcggcgcgctgaaagcggtagcgccggtgctggtattgatgctggttatggcctccatcgccaatcatcagcaggggcaaaaaaccagcatccgcccgattctgttcctctatctgctggggacttttgccgccgcgttaaccgcggtgctgtttagcttcctctttccgtcaacgctgcacctgaacgcagcggcagagagcattactccgccgtcgggcatcgttgaagtcctgcgcgggctgctgatgagcatggtttctaacccgattgacgccctgttgaacgctaactacatcgggattctggtctgggccgtcggtttagggttcgcgctgcgccacggcaatgaaaccaccaaaaatctgatcaacgatatgtcccacgcggtgacctttatcgttaaggtggtgattcgctttgcgccgctgggtatctttgggctggtcgcgtcaacgctggcgacgaccgggtttgaaaccctgtggggctacgcccagctgctgctggtgctggttggctgtatgctgctggtggcgctggtgattaacccgctgctggtgttctggaaaatccgccgcaatccctatccgctggtgatgacctgcctgcgcgaaagcggcgtatacgccttctttacccgcagctccgccgccaacattccggtgaatatggcgctgtgcgaaaagcttaatctggatcgcgatacctattcggtctctattccgctgggcgcgaccatcaacatggccggcgcggcgattaccattacggtactgaccctggcggcagtacacacgctgaacgttccggtcgatctgccgaccgcgctgctgctcagcgtcgtcgcttcgctgtgcgcctgcggcgcttccggcgtggcgggcgggtcgctgctgctgatcccgctggcctgtaatatgtttggtatcccgaacgatatcgccatgcaggtggtcgccgtcggctttattatcggcgtcctgcaggactcctgcgaaaccgcgctgaactcctcaaccgatgcgctgttcaccgctgccgcttgtatcgctgaagacgaacagctggcgaagaacgccctgcgcagttaa

SEQ ID NO: 172776 - DNA, 969 bp, Klebsiella oxytoca
atgaatactgtcggcacaccgttgttatggggcggattcgcagtggtcgtggtcattatgctggctatcgatctgctgctgcagggacggcgtggtgcacatagcatgaccatgaagcaggccgctggctggtcaattctctgggttaccctctcgctgctgtttaacgccgctttctggtggtatctggtgcagaccgaaggtcgcgccgtggccgacccgcaagcgctggcgttcctcaccggctatctgattgaaaaagcgctggccgtggataacgtcttcgtctggctgatgctgttcagctactttgccgttccgcctgcgctacagcgcagagtgctggtttacggcgtactgggcgcgatcgtgctgcgtacgatcatgatcttcgccggtagctggctgatctctcagtttgagtggctgctctacgtcttcggcgccttcctgctgtttaccggcgtgaagatggcgctggcgaaagaggatgattccgggatcggcgataaaccgctggtgcgctggatccgcaatcatctgcgcatgacggataaaatcgagggtgagcgcttctttacccgcaaaaacggcgttatctacgccacgccgctgctgctggtgctgatcctggtcgagctgagcgacgttatctttgccgttgacagtattccggccatcttcgccgtgaccaccgatccgtttatcgtgctgacctccaacctgttcgcgatacttggcctgcgcgcgatgtatttcctgttggcgggcgtcgcggagcgcttctcgatgctgaaatatggcctgtcggtgattctggtgtttatcggcatcaagatgctgattgtcgatttcttccatattcctatcagcatttctctgggcgtggtcggcggtattctggtgctgaccctgcttatcaacgcctgggtcaacaagcagaacgataagaaaaaacagctgcaataa

SEQ ID NO: 172777 - DNA, 990 bp, Klebsiella oxytoca
atgatacgtttcgcagttgttggcacaaactggataaccaagcagtttgtcgatgccgcccatgaaaccggcaaatataaactcaccgccatctactcccgcagccttgagcaagcccaggcctttgccagcgactatcccgtcgaacatctcttcacttcgctggaagatttagcgcaaagtcctgacgttgacgcggtctatatcgccagcccaaactcgctgcactttccgcaaacccgcctgtttctgcgccataaaaagcacgtcatttgcgaaaaaccgctggcctcgaatctgcaggaagtggaagccgccattaagacggcgcgggaaaataacgtggtgctcttcgaagcgttcaaaaccgccagcctgccaaacttcctgctgcttaaacaagcattcgacaagatcggcaagctgcgcaaagcctttattaactactgccagtactcttcccgctatcagcgctatctcgacggtgaaaatcccaacaccttcaatccggccttctctaacggctcgattatggacatcggcttttactgcctggcctcggcggtcgcgctgtggggcgagcctcgcgcggtgcacgcaaccgccagcctgctggagagcggcgtcgatggccagggcacggtcgttctcagctacggggattttgatgtcactttgcaccactcaaaggtcagcgactcggcgatccccagcgaaattcagggcgaagccggcgcgctggtgatcgaaaaaatctccgaatgccagaaagtgtgcttcgtgccgcgcggcggcaagcctcaggatctcacccagccgcagcatatcaatacgatgctgtatgaagcggaggagttcgcgcgtctggtcgaagccaacgaggtggttcatccgggtctggaagtgagccgcatcacggcgatgctgctgagcgaaattcgtcgccagaccggggtcgtgttcccggcggatagtcaaccggtggcgtaa

SEQ ID NO: 172778 - DNA, 504 bp, Klebsiella oxytoca
atgagcactttaacctatctccagggctaccctgaatccctgctggcgcaggtcaccgcgttaatcgaacagaaccgtctcggcgagttgctgaaaaagcgctatccgcagggccacgatatcaacaacgataaagcgctgtatcagtacacccaggatctgaagtcccgctatctgcgcggcgcggcgcctattaacaaagtaatgtacgacaacaagatccacgtgcttaacaacgcgctcggcctgcataccgccatctcccgcgttcagggcggcaagctgaaggccaaagccgaaattcgcgtcgccaccgtctttcgcgacgcgccggaggattttctgcggatgatcgtggtgcacgagctggcgcacctgaaggaaaaagagcacaacaaagcgttctatcagctgtgctgccatatggagccgcagtaccatcagctggagtttgatacccgcctgtggctgacccagctttcgttagagcgttctgcgccatag

SEQ ID NO: 172779 - DNA, 1644 bp, Klebsiella oxytoca
atgattcagaatcctgtttttaaaggttttaatccggaccccagtatctgtcggcgcggcaatgattattatgtagctgtctcttcctttgaatggtttcccggcttgccgatttaccattcgagagatctcaaacattggcaattactcacccatgttctcaccgatgatacgaatccggatttaaaaaagctgccctccgccaaaggtatttgggcgccaagcctgacctggtgtgaagaggaaaagctgttctacgttatttatggcgtaatgaattccatgaattcgcgttattttgatgtagataactatcttattaccgccagtgaaatcagcggcccgtggagtgagccggtttatcttcactcggccgggttcgatgcttctatcctgcacgacagcgacggtaaaaaatggatcgtttcactggagtgggaaacccgcgaaggttacgaaaaaccgggcgccatttgcctggtggagtattcaccgcaaaggcaaagcgttgtcggctatccgcagcggatctggcgcggcgggaccgatcgcggttgtatagaagcaccgcatttgacgcgccgcggcgactattactatctgatggtcgctgaaggcggcaccggctacggccatgcggtcactatggcgcgcgcaacgcaggtcgctggcccctatgaaggcgatccgcaaaatcctatcgtcaccgcctggccggagaattttaacgagcgccacgatgcaggtcatctcaaactacactacttcaatccgcaaacctatctgcaaaaggccgggcacggcagctacgtcgagaccccgacgggggaagtctggttaacccacctttgcagcagacccttccgccaggagttgcgctgcccgctaggccgcgagacggcgatacaaaagatggtatggagcgacgatggctggctgcgcatggcggccggggggaacctcgctcagcaccaggtggaagagtctaatctgccttctcagccgtttccggctaaaccagacagggatgattttgatgggcagacgctggataacgccttctatgcgccgcggatccgctttcagcgctttaccagccttgagcgtaaagcgggttaccttgccttacgcggtcaggagtcgctgagctcgctgaataaagtcagcctgctggcgaaaaagctcacctcggtatacgccaccatcaccacgaaaatggatttcagcccggagatttatcagcatagcgcgggcctggcgctttactacgacaatatgaactatctgtttttgcataaaacctgggatgaagcctccggcgcagcgcagctggccatcatttatatggacaacggtgagcgtcacgacgacccgcagaaaatctgccttacggagggggaaatctatctggcgatggcgattaatggccgggagatacagtgctcgtggtccgtggatggcgaaaaatatctcaacatcggcgcggtctacgacacctcgcgtttttccgatgaatacagccgctatggcgagtttaccggcgcgtttgtcggcatggcctgcgtggatagcatgctgcatcgtaaagaggcgctgtttgacttctttagctaccgggcggtcgaagacgcgataatcgagtaa

SEQ ID NO: 172780 - DNA, 867 bp, Klebsiella oxytoca
atgagtgacgaatctcccgttttcgaaaagatccccgtgggcgccggcgagctatttaccttacgggtagataacataaatgatttcaatggcataaacgtagtcccccattttcatatgatggacgaactgatgtggttcagagagtcggcaggcagctattcgattggtgatgagaaatttacgataaaaaacaataccctggttttcgtccctgccttattgatccatgaaatgacgctgccggccgccgccagccacaagcgttatcttatgcaattcgaaaaagagtggcttgagggatatgacctgtcgctacccgccgcgcactgcggcgcagtcgcttacctttccggcgaggaagccgagcgtctggagctgctcctgagctggtgcggcgagttcagcgactttgccgattcgctgttccgttccctgatgcagagcgtgctgctgcatgcctttaacagcctgaaagattccgtccccattaccgaacggaccaaccaccgctacctcagcgagctgattgaacttctgcaatccattgatgaaaatgaaaattttgagatgacgaccgaagaagccgcccgccgctgccggtggtcgaaatcctggttttcccgcacctttaaatccgccttcggtatcagcttcaaaaaatttatgctgctgcgcaaactcaatatcgctatcaacctgctgaccaataccgacctgaagatcagcgatatctcgcaaagcgccggcttcaccgacagcgcctacttctgcctcaagtttaaggagatgatgaacgacaccccgctggccttccgtcataaagtcagaagcaccgatgccgtaggcagccgggcggagaaataa

SEQ ID NO: 172781 - DNA, 1344 bp, Klebsiella oxytoca
atgaacactgcccgtatcagtattaaagaaaaatttagctatgggttaggggataccggctgtaatttagtctggcaaacagtgatgctgtttatggcctggttttataccgatgtatttggtttaagtccggcgcatatgggaaccatgtttctcgcggtaagggtattagacgcggtgaccgatgtattaatgggggcggtggcggatcgtacccgaactaaatatgggcaattccgtccttatattttatggttcgccattccttttggcgttctttgctgcttaactttttatacgccggatttcggttataccggcaagctcatttatgcctatgtttcttataccttattatcgctggtctatacggcgattaacgttccgtattgcgcgatgatcaataatatttctaacgactcccgcgagcgcgtatcgctccagtcctggcgctttgcgctcagtacgcttggcggcctgattgtttcgctgaccgcgctaccgctggtggcgtggttgggccaggggaacgtacaaaacggttatttttacaccatgatcgtaatggggggcctgagcatcatcctgttctttatctgttttggcctgacgaaagagcgttacaccacggatatcgcggccaacaaccaaagcagcattcttgacgatctaaaaactctgctcgccaacaaggactggcgcattttgttcgcgctcaacgtcgttaacctgattgcggtgctgtttaaaggcgggaccacgctctattacgtcaacaacattatggggcgggcggatctgggtagcctgctgctgaccaccaccctggcctcgggcgtgctgggggcgatgctctcaccgtttatctttaaaaatattgataaagtgaaagggtttaaaatctcgatggccatcgaggcggcgctgctgacgggcatgtacttcgtcccggcggggaacgtagccgctatctttgcgctggtgattatcatcaatattatccagctggccgccacgccgctgcagtggagcatgctgtccgatatcatcgatgcggaagaaaaacgcagcggtaaaaagctcagcgggatcgttttttcaacgaacctgtttgccatcaagctggggatcgccatcggcggcgcgctggtgggctatatgctggcctggggcgactacgtcggcggcgcagcccagcaaaccgagtccgcgctgcagatgattaagctgttgtttaccgtcttccccggcgtgctggtggcgctgctgattgttatcatgagcaaatatagtctggacgataagcgcctgtcgcgcatggcgcaggacgacctcccggcgtaa

SEQ ID NO: 172782 - DNA, 1131 bp, Klebsiella oxytoca
atgagccaggtagagttaaacggtgagttattcacattagagcggttcccgccgaatgctgaagaggaagcgcttcaggcgtgggaagcggcggatgaatatctgctgcaacaggtgaatgatgtcgacggcctgacgctcattttcaatgacagcttcggcgcgctgggctgcgcgctggcggaacgcaatccggtcagcatcaacgattcctacgtctctgagctggcgacccgctacaacctgcggatgaacggcattgatgaagagagcgtacgttttcaggatcccctgagcgaactgcccgcagctccggcactggtgctaattaaagtaccaaaacagctggcgctgctggagcagcagctgcgcgctctgcgcgcggttgtcacgccagaaacccgcatcatcgccgctgcgaaagctcgcgacgtccacaattccaccctggcgctgtttgagaaaatccttggcaccaccaccacatcgctggcctggaaaaaggcgcggctgattttctgtacctttaccgcgcctgaggtagccgatgcgccgcaaacttacagctggcagctggacggtacaccgtggacgattcacaaccacgccaacgtgtttgcccgcagcggcctggatattggcgcgcgcttcttcctggaacacttgccagtaaatattgaaggcgagatcgccgatctcggctgcggcaatggcgtgattggcctgaaagcgctggctttaaaccccgacgcccgggtgatgtttaccgatgagtcctatatggcggtcgcttccagccgactgaacgtcgaaaccaatctgccggatgacctcgagcgctgcgagtttatggtgaataacgcgctgtccgatattgaaccggaccgcttcgccgccatcctctgtaatccgccgttccatcagcagcatgcgatcaccgatcatattgcctggcagatgtttaacgatgcccgtcgtagcctgaagtacggcggcgagctgtatgtcgtcggtaaccgccacctcgattatttccgcaagctgaagcgcgcgttcggtaactgcacgacgatcgccactaataataaatttgtggttttaaaagcggtgaaattgcgtaaggcgcgttaa

SEQ ID NO: 172783 - DNA, 828 bp, Klebsiella oxytoca
atgaatcatcaggaagatgaatacagtaatggagccgccactccgcgcaaaattgtcttaggcaggcatcctgccgtatttgtttgcgttatacaatgcatagtttatatatacatcactggctctggctggctcgggtttagtgataataccggtggagggtataatctgctattcgctgtcctgtgggcagcaatggccttcggaatctataaatatagccgcgcctgcgctgtcatggcgctggttctttattttatcgatcaactggcggtggagttatttccgcccggacgcagctttaatgtggcctggctggcagggaccacgatctggttactctgtttttgccacggaattattgcctgctggatgcggcgtaaacataaagtcatcgggattgatgacagtacatatattaataagcgaacgggaacgctgtatctcgttgtgctcgtgcttttccattcatcctgtctgggcctgaaacaggcgcagaagcacacccgcaatatcctctggcaggcgttttatcaatcggtcatggaagataagagtaagatcccgctgccgataaaaatcgataataatacttcccttaccgacatctattttgatcagcacaccttgattgttgaacaccatgttcgccagacaaagctggccgaattaccgatggcgctctactacgcgcacgctaaaaaactttactcgcgttattgcgccaacgatgtggcgagctcgctcgatttaaaaatgatagtccgctttgcgcaggggtatgagacgcgtgacctgtcgtttacgccaaaagactgtcaattttaa

SEQ ID NO: 172784 - DNA, 2022 bp, Klebsiella oxytoca
atgagccgctacccgtcgcttttcgccccgcttgagctggggttcactacgctcaaaaaccgcgtgttgatgggctcaatgcatactggcctggaggagctcccggatggcgcgcagcggctggcggctttttacgccgagcgcgcccgccacggggtagcgctgatcgtcaccggcggaattgcccccgccccttccggcgtcaccatggcgggcggggcggtgcttaacgacgccagccacctctcccatcatcgctatattaccgacgcggtacacgaggagggcggcaaaatcgccctgcagatcctgcataccgggcgctacagctaccaaccgaagctggtggccccttccgcgctgcaggcgccgatcaacccctttacgcctcacgaactgagccacgaagagatcttacagctgatcgatgattttgcccgctgcgcccagctggggcgagaagccgggtacgacggcgtcgaagtgatgggctcggaaggctatctgattaacgaatttcttgccgcgcgcaccaaccttcgcgacgaccagtggggcggcgactacgcccgacgcatgcgttttgccatagaggtggtcagagccgtacgggagcgcgcaggcaacgactttattattatctatcgtctgtcaatgcttgaccttgtcagcggcggcagcaccctggcggaagtcaccgcgctggcaaaagccattgaggccgcaggggcaacgattatcaataccggcatcggctggcacgaggcgcgtattcccaccatcgccacaccggtaccgcgcggcgcctttagctgggtcacccgtaagctgaaaggcgcggtgtcgatcccgctggtcaccaccaaccggattaacgatcccgatgtggcggaagcgatcctggctcgcggagacgccgatatggtatcgatggcccgccctttcctcgccgacagcgaatttctctccaaagcacaaagcggacgggcggaagagatcaatacctgcatcggctgcaaccaggcctgcctcgatcggatcttcgccggcgaggtcacctcgtgcctggtcaacccgcgcgcctgccatgaaaccctgatgccgatagcgcccgcgaccacgccgaagcggctggcggtggtcggcgctggtcctgccgggctggcctttgcggttaacgctgcctcgcgcggacatcaggttaccctttttgatggtcattgcgagattggcggccagtttaatatcgccaagcagatccccggcaaagaggagttctacgaaaccctgcgctactatcgccagatgctcgatcttcacgctgtcgatctgcgattgaatacccacgtcacggccggggatctgcgggcatttgatgaaatcgtcctcgccaccgggatcgccccgcggatgccggatatcgccgggatcgagcatcccaaagtgctgagctacctcgatgtcctgcgcgataaagcgccggtaggcgagaaggtggcgattatcggctgcggcgggatcggctttgatacggccatgtacctcagccagtccggcattgccaccagccagaatatcggcgagttctgtgcagaatgggggatcgataccagcctgcagaacgccggcggactgcgcccggaggggatgcagctggctaaaagcccgcgccagatcgtgatgctgcagcgcaaaaccagcaagcccggcgacgggctggggaaaactaccggctggatccatcgcgctaccctgctggcccgcggcgtcaaaatgatccccggcgtcagctatcaacggatcgatgatgccggcttacatgtgacgatcggcggcgaatctcaggtgcttaacgttgatcatgtgattatctgcgccggtcaggatccccgccgcgagctggccgatccgctgcgggcggcgggtaaaacggtacatttgatcggcggctgcgacgtggcgatggagctggacgcccggcgggctatcgctcagggcacccggctggcgctgtcgatttaa

SEQ ID NO: 172785 - DNA, 1593 bp, Klebsiella oxytoca
atgagttacctgttagcgttagatgccgggaccggcagcgttcgggcggtcgtattcgatctccagggccgtcagattgcggtcggtcaggccgaatggaagcacctgagcgtggacaatgtccccggctcgatggagttcgatctcagcgtcaactggcagctggcctgtcagtgtatccgccaggcgctggccgccgcccatctctctgcggcggatattcagtccgtggcctgctgctcgatgcgtgaaggcatcgtgctttacgaccgcaacggcgaggccatctgggcctgcgccaacgttgacgctcgcgccagccgcgaggtggcggagctcaaagagatccacgacgaccgttttgaatccgaagtgtacagcgtgtcggggcagaccctggcgctgagcgccatgccgcgcctgctttggctggcccaccatcgcccggatatctaccgcaaagcggcgaccatcaccatgatcagcgactggctggcggcgaagctctccggcgagctggcggtcgacccttctaacgccggaaccaccggcatgctcgacctgttcagccgcgactggcgcccggcgctgctggatatggccggactgcgggccgatattctctcgccggtcaaggagaccggcagcgtactgggggcggtgaccgacgcagcggcggcgcaaagcgggctgcgcgcaggcacgccggtggtgatgggcggcggcgacgtccagctcggctgcctgggtctcggcgtggtgcgcgccgggcagacggcggtgctcggcggcactttctggcagcaggtggttaacctgccggaagtccgtactgacccggagatgaatattcgcgttaacccgcacgtcatacccggcatggcgcaggcggagtccatcagcttttttaccggcctgaccatgcgctggttccgtgatgctttttgcgcagaagagaagctcattgccgagcgcctcggcgttgacgcctacagcctgctcgaagagatggccagccgcgtaccggcgggttcccacggggtgatgccgattttctctgacgccatgcactttaagcagtggtaccacgctgcgccatcgtttattaacctctccatcgacccggaaaaatgcaataaggccacgcttttccgtgcgctggaagagaacgcggcgattgtctccgcctgcaacctggcgcagatttcgcagttttccggcgtgcagtttgatagcctggtctttgccggcggcggtgcaaaaggggcgctgtggagccagatcctcagcgatgtcaccggtctgccggtgcgggtgccggaagtccgcgaagcgacggcgctgggctgcgcgatcgccgccggcaccggcgccgggctatacgccgatatggcgacaacgggtgagagacaggtgagctggtaccgggaatttacgcctaatcccgcgcatcgggagctgtatcaggagatgatgaccaaatggcagtcggtgtacgccgagcagctcggtctggtggacagcggattgacgacctccatgtggcaggcgccgggtctggcgcgccgcgagcgagttgccccctcaccctaa

SEQ ID NO: 172786 - DNA, 972 bp, Klebsiella oxytoca
atgagcgaaaaacgcattacggaagagagccgctacgccgggctggcgttagccgaggaagagctggtggcgcgggtggcgtggtgttactaccacgacggcctgacgcagaacgacatcggcgagcgtttagggctgccgcggttaaaaatctcccgcctgctggaaaaaggtcgccagtcgggagtgatccgcgtacagattaattcgcgctatgagggctgtctggcgctggaaaccgaactccagcagcgctttggcctgaaaatcgcccgcgtgctgccggcgctcaataccccgccgatgaacacccgcctggggattggcgcggcgcaatcgttaatgggcgtgctggagccaggacaactgctggcggtgggctttggcgaagccaccatgagctgcctgcagcatctgagcgggtttatcggttcccaacaggttcggctggtgacgctttccggcggcgtaggtccgtatatgaccggcattggccagctggatgccgcctgtagcgtcagcatgatccccgcgccgctgagggtgtcatcggcggatgtagcggagatcctgcgccgggaatcgagcgtacgcgatgtgatcctggccgccacggcggcggatgcggcagtggtaggtatcggcgccattgaccagcgccgggacgccaccatcctgcgctccggctacatcagcgaaggcgagcagctgatgtacgcccgcaaaggcgcggtcggcgacattttaggttatttcctgcaggccgacggtaaaccggttgaagggctggagatccatcgggaactgctcggcgtcacccttgatgaactggcccagctgccgaccatcgtgggcgtcgccgggggcacagaaaaagcgcaggcgatttacgcggcccttatcggcaagcggattaatggcctggtaacggaagagacaacagcacgcgcggtgctgacgctggcctcataa

SEQ ID NO: 172787 - DNA, 1488 bp, Klebsiella oxytoca
atgaagccactgcttgaagctcgccaaatctgcaaacagttctccggcgtgaccgtgctgaagcatattgatttcacgctgctttccggccaggtgcacgcgctgatgggcggcaacggcgccggaaaatcgacgctgatgaagattattgccggggtagagacccccgacagcggtgagctcatcctcggcgaacgtacatttgcgcgccttactcccgcccaggcccatcagcagggcgtgtatctggtgccgcaggaaccgatgttattccccaatctgacggtgcgggaaaatattctttttcgtctgccgaagcgggcggataacgaggcccatctgcaggaaaagcttcagcagcttaattgccagcttaaccttgaggcggcggccagcacgctggaagtcgccgatcagcaaatggtggagatcctgcgcgggctgatgcgcgacgcgcagatcctgatcctcgatgaacccactgcctcattgacgccgggagaaaccgatcgcctgtttcgccagatccgctctttgcaggcgctcggcgtcgggatcgtgtttatctcgcacaagctgccggagatccgccaggtcgccagccacgtctcagtgatgcgcgatggcgcggtggtgctgagcggggaaaccgcgcactacggcgataaccagctgattggcgcaatgacgcccgtcagtcgcgatcgagccctgagcgacacgcaaaagttgtggctggcgctgccgggcaatcgtcgcactcaggcgcaggattttccggtgctgcgggtcgaagatctgaccggagagggctttatcgatctcaatctggagatccgcgccggggagatcgtcggcctcgccgggctggtcggatccgggcgtaccgaatttgctgaaacgctctatggtctgcggccagctcgcgcagggcgggtgtggctggaaaaccgcgatatcagccgcgacagcacgcgcgccaggctggccagcgggctggtctatctgccggaggacagacaggtttccggtctgtttctcgatgcgccggtgcgctggaacacggtgatgtttaaccagccgtcgctgtggcagcagaaccggcgcgaagcggcggtggtggagcgctatcaccgggcgctggggatcaaaatggccgatggcgatcgcccggtgcgcacgctctccggcggtaaccagcagaaggtactgctggcgcgctgcctggaggctaacccgctgctgctgatcgtcgatgaaccgacccgcggcgtggacgtttccgcccgcgccgacatctatcagctgctgaaaagcgtcgccgcgcagaacgtggcggtattgatgatctccagcgatctcgacgagttcgttggcctggccgatcgggtgattgtaatgcatcagggcaggcagagcggcgagctggcgcagcaggcggtcagcgttgaccggatgatgaccctggccttcggagggcaggcatga

SEQ ID NO: 172788 - DNA, 1035 bp, Klebsiella oxytoca
atgaaaacgttattaaagaatcgcgaactgagcgccttcctcgccatcgtggtgctgtttgccgggctggtggcgctcaacccggcttatttcagcttacaaaccctgggcatgattttcgccagctcgcaaatcctttgcctgctggcgctgggggcgacgctggtgatgctcacccgcaatattgacgtttcggtgggctccaccgttggcctgagcgctatcgcgacaggcgtggcgctaaatagcgggtatgggctgatgaccgccatcgcctttgcgctggcgatcggcgcgctggctggcgcctttaacggcctgctggtggtggggctgcgcatcccggcgattgtcgccactctcggcaccctcggcctttatcgcggggtgatgctgctgtggaccggcggtaagtggattgaaggtttgccgaacagcctgaaagcgctgtcggaaccggcattcatcggcatttctccgctgggctggctggtgctggcgctactgctggcgggcggctggatactatcgcgtactgcctttggccgtgatttttacgccgtcggcgataaccttgccgctgcccgccagcttggggtggcggtgaaccgcacgcggatgctggcattcacctttaacggcatgctggcggcctgcgccgggattgtgttcgccgcgcagattggatttgtgcccaatcagaccggcagcggcctggagatgaaagccatcgccgcctgcgtgctcggcgggatctcgctgctgggcggtaccggcacgctgctcggcgcttttctcggcgccttcttcctcacccaaatcgataccgtgctggtgctgttccgtctcccggcgtggtggaacgacttcatcgccggcctggtcctgctcggcgtactggtgctcgacgggcgtttgcgtcaggcgctggcccgccatcagcgggcgctgaagtacagccgctttcagcccggcaataaagggggcaagcgcgtggccccgtttcctgaacgcaaaaataaagaggtggcgtaa

SEQ ID NO: 172789 - DNA, 978 bp, Klebsiella oxytoca
atgaagctcaactgggaaagcgcgctgctgggattactggtggtggagatcctgctgtttggcaccctcaatccgcgcatgctcgatctcaatatgctgctgttcagcaccagcgactttatctgcatcggcatcgtggcgctgccgctgacgctggtgatcatcagcggcgggattgatatttcgctcggttccactatcggcctgtgcgccatcgcgctgggggtgatgatgcaggcgggctggccgatgagcctcgcaatccccctgacgctgctgctcggcctgctgtgcgggctgctgaacgcggcgctgattcactacaccggcattagcccgctggtgattacccttggcaccctgtacctctacggcggcggcgcgctgctgctttcgggcatggccggggcgaccggctacgaaggcatcggcggattcccggatagctttaccgccttcgccaatctgaccctgttcggcctgccgataccgctggtgctgttcgccgttatcaccttttttttctggctgctggcccaccgcgggcgctttgggcggcacctttttctgctcgggcagaacccgcgcgccgcgcgctacgccgcgctttccgttaacgggatgccctacgcgctgtatggcctggtgggcgtggcgtcggcggtggcggcgctggtgatggtctcctatttcggctcggcgcgctcggacttaggccgcgacctgctgatgccggcgctgaccgccgcggtactcggcggggccaatatctacggcggttccggctcgatcgtcggcacggcgcttgccgcgctgctggtgggctatttacaacaaggtttgcaaatggtcggcatccccaaccaggtgtcgagcgcgctgtcaggggcgctgttggttgtggtggtgatggggcgttcgctgagtctgcaccgtgagtgggtgcggatgacctggcggcgtctttctcgcgcataa

SEQ ID NO: 172790 - DNA, 1014 bp, Klebsiella oxytoca
atgaaaaccaaacgaatcctgcaaacgagcgccctggcgctggcgttaagcgtggcaaccgctcaggcggcggaccgcatcgcctttattcctaagctggtcggcgtcggcttctttaccagcggcggtaacggcgcgaaagaggcgggcaaagcgctcggcgtggacgtcacctacgacggcccgaccgaaccgagcgtctccggccaggtgcagttgatcaacaacttcgtcaaccagggctacaacgcgattatcgtctccgccgtatcgccggacggcctgtgcccggcgctgaagcgggcgatgcagcgcggggtcaaggttctgacctgggactccgataccaaaccagagtgccgcagcatctatatcaaccaggggacgccgcagcagcttggcggcctgctggtggagatggcggaaaaacaggtgacgaaacccaccgccaaggtggcgtttttctactccagcccaacggtgaccgatcagaaccagtgggtaaaagaggcgaaagccaaaattgaaaaagcgcatccgcagtgggaagtggtgaccacgcagtttggctataacgacgccaccaaatcgctgcaaactgccgaggggatcttaaaagcgtacccggatctcgacgccattatcgccccggacgccaacgcgcttccggccgccgcccaggcggcagagaatctcaagcgccagggcgtggcgattgtcggcttcagtaccccgaacgtgatgcgcccctatgtagagcgcggcacggtaaaagccttcggcctgtgggacgtggtacagcagggcaagatcgcggttaacgtcgccgatcgtctgctgaaaaagggcgatcttaacgtcggcgacagcgttgatgtgaaagatctcggcaccctgaaagtcgagcccaacagcgtgcagggttatcagtatgaagcgaaaggcaacggcatcgtgctgctgccggagcgggtggtgttcaccaaagagaatatcaataactacgatttctga

SEQ ID NO: 172791 - DNA, 888 bp, Klebsiella oxytoca
atggctgatttagacgatatcaaagagggaaaaaacttcggcttagaccgtccgcagcagaacacgctctatacgctgaagggctgtgggtcgctggagtgggggatgcagtcgcggctggcgcgtatctttaatccgcagagcaatcgcacggtgatgctggctttcgatcacggctattttcaggggccgactaccggtctggagcgtatcgatctctctatcgcgccgctgttcgaggagaccgacgtgctgatgtgcacccgcggcgtactgcgcagtcaggtgccggccgcgaccaacaaaccggtggtgctgcgcgcttccggcggcaactcgatcctcagcgaactttccaacgagtgcgtggcggtggcgatggaagatgcgctgcgcctgaacgtctgcgcggtggcggcgcaggtctatatcggcagcgaacatgagcatcagtccatcaacaacatcatcaagctggtggacgccggcaaccgctacggtatgccggtgctggcggtaaccggggtgggtaaagagatggcccgcgacgcccgctacttctcgctggccagccgcattgccgctgaaatgggggcgcagtttgtaaaaacctactttgttgaggaaggctttgagaaagtgaccgccagctgcccggtgccgatcgtcatcgccgggggcaaaaagctgccggagcaggaggcgctcgagatgtgctggcgggcgattgaccagggcgcatccggcgtcgatatgggacggaatatcttccagtccagcgcgccgcgcgcgatgctgaaggcggtgaaaaaagtggtacatgagaacctgagcgcccgcgaggcgtatcagttctggcaggaggaaaaacagggagagctgcaatga

SEQ ID NO: 172792 - DNA, 297 bp, Klebsiella oxytoca
atgaacgtaacgctggtagaaatcaatatcaaaccggaacgggtcgacgagtttcttgaggtattccgcgccaaccacgaaggggcgctgcaggagccgggcaatcttcgctttgatgtcctgcaggacccggaggtgaagacgcgcttttttatttatgaagcctataaagatgatgaagcggtgttggcgcacaagaaaaccccgcactatctggcctgcgtagagaagctggaggcgctgatgtcgcagccgcggcagaaacgcagctttatcggcctgctgccggaggtgtaa

SEQ ID NO: 172793 - DNA, 2352 bp, Klebsiella oxytoca
gtgaagattaccactactcttacgccgctggcctgcgccctactgctaagcttttccgcccacgcgctgaccgcggatgactttaaaaatgttatcaaccgcagcggcgcgccgcaggcgatgcaggattttgataacgatgaccaccagcgcttcaacccgtttttcgatttgggcgcatggcatgggcatctgctgcctgatggtccggccaccatgggcggatttcccggacccgcgctgctcactgaggagtacatcaactttatggcgaccaatttcgatcgcctgacggtataccagaacggcaaaaaagtcgccttcaccctgcaggcctggagcctgcccggcgcgctggtgcaaaagctctccgcggccggcgtacaggtcgagatgaccctgcgctttgccagcgcgcacacctctttactggagactaaaatcaccagtagcagcccgcttaagctggtctgggacggcgagttgctggagaaactctccgccaaagaggggaaaccgcagtcaacgcaaaccatcgaccaggctttcccggactatcagcgccgcctgagcgcgacccacgacggcctgaccgtcagcttcggcaaagtccgctccgcatcggatttaatgacctccggcgaatcgcagtatcagatccatcgctccctgccgacggtcacccaaatcgacggccatcgattcaccagcagcgcgcaaatcaacggctcgaccacgctctataccacctactcgcacctgctgaacgccgagcaggttcggctcgagaaagcgcaaatccgcgatattcttgcgcgaccggtacactacctgcgcgcttccgaggcgcgctggaacggctatctgcaaaaggggctgaccaatcctgatgctacggcgcagcaaacccgggtggcggtaaaagcgatcgaaacccttaacggtaactggcgcgcgccgggcggcgccgttaagcacaacaccgtcacgccgtcggtaaccgggcgctggttctcaggcaaccagacctggccgtgggatacctggaagcaggcctacgccatggcccacttcaacccggagatcgcgaaagagaacatccgtgccgtcttctcctggcagattgccgccgacgataaagtgcggccgcaggatgccgggttcattccggatctgatcgcctggaacctgagcccggaacgcggcggcgacggcagcaactggaacgagcgaaataccaaaccgagcctggcggcctggtcggtgatggaagtctataacgttacgaaagataaaacctggctggcggagatgtatccgaagctagtggcctaccatgactggtggctgcgcaaccgcgaccacaacggcaacggcgtgccggagtacggcgcgacccgcgataaagcgcacaacaccgccgatggcgcgatgctgtttaccgtgaaaaagggcgataaagaacggacgctttccggcctgaaaacctacgagcaggtgacggcgaaaggcgattacgacagcctggagatcccggcgcaggtggccgcctcctgggagtcggggcgcgacgacgcggcggttttcggctttatcgataaagatcagttggataaatacatcgctggcggcggcaagcgtagcgactggacggtgaaatttgctgaaaaccgggataaaagcggcaatctgctcggctattcgctgctgcaggagtcggtcgatcaggccagctacatgtacagcgacaaccactatctggcggagatggcggcccttctcggcaagccggaggaggcaaaacgctaccgggcgctggcgaaaaagctcgccgactatatcaacacctgcatgttcgacccgcagagcaaattctattacgacattcgcattgaagcgcagccgctggcaaacggctgcgccggtaggccgatcgtcgagcgcggcaaaggcccggagggctggtcgccgcttttcaacggcgcggccactcaggcgcatgccgatgacgtcatttcggtgatgctggacgccaaagagttcaacactttcgtaccgctgggtaccgccgcattaacgaatccggcgtttggcgcggatatttactggcgcggccgcgtgtgggtggaccagttctggttcggcctgaaggggatggagcgctacggccaccgcgaagaggcgctgcagctggcggacgccttcttcaggcacgcccgggggctcacctccgatggcccgattcaggagaactacaatccgctcaccggcgctcagcagggcgcgccgaacttctcctggagcgcggcgcatctgtacatgctgtataacgagtttttccgtaaaccatag

SEQ ID NO: 172794 - DNA, 1062 bp, Klebsiella oxytoca
atgatgaaaaataacaggcctatttactgggcgcttgccgccctggctttttgcacaccggctattgccgtcgatgtggcgcatccggcggaacatgatgacatgaaaacgccagaacttaatgccacctcataccgtttttacggtgaattgggggttggcggatatatggatctagaaggcgaggacaagcataaatatagtgatggcacctatattgaaggcggactggaaataaagcacggcagctggtttggtttaatttatggcgaaggctggacggttcaggccgatcgtcagggaaatgcctgggtagcggaccacggctggggcggatttgaaggtggaataaaccgcttctacggcggatataaaaccgagagcagcaccgagattatgctcagcctgcgccaggattcatcgctcgacgatctgcagtggtggggcgatttcacgcccgacctcggctacgtgatccccaatacgcgcgatattatgtacgcgctcaaggtgcagaacctggcgggagattttcgctacagcgtgaccgccacgcccgccgggcaccacgatgaaagcaaagcgtggctccatttcggcaaatacgaccgctacgacgataaatatacctacccggcgatggtcaacggctacatccagtacgatctcgcgaacgaggtgacctggatgaatgggcttgaggtgacggatgggaccggccagctatttttgaccggtattctcacccccaaccttgccgcccgcgcctggcatcataccgggcgcgccaggggaaaagacgtgccgggaacggagaccggctttatggccagcgctatgtatgaagcgctcaagggcgtgtatctctctaccgcctatagctacgccaaacaccgcccggatcgcgccgccgaggaaaccacctcgtttatgcagttcggcatctggtacgaatacggcggcggacgttttgccaccgctgcggacagccgcttctacatgaaaaatgcctccggcaacccgagcgatcaggttttcctgatgcaatatttctattggtaa

SEQ ID NO: 172795 - DNA, 1434 bp, Klebsiella oxytoca
atgtctgatatcaaacgtaataccatcggcaagttcggcctgctgtcgctgaccttcgccgccgtcttcagttttaacaacgtgatcaataacaatattgagctggggctggcgtcggcgccgatgttcttcctcgcgaccctgctctacttcgttcctttctgcctgatcatcgcggaattcgtttcgctgaataaaaactccgaagcgggggtttatgcgtgggtaaaaagctccctcggcgggcgctgggcctttattaccgcctacacctactggttcgtgaatcttttctttttcacctcgctgctgccgagggtaatcgcttatgcctcctacgctttcctcggctacgagtacattctgactccggtcgccaccacgatgttgagcatggcgctgttcgccctgtcgacctgggtttccaccaacggcgcaaaaatgctgggtccaatcacctcggtcacttcatcgttaatgctgctgctgacgctctcctacattctgctttccggcggcgcgctggtgggcggtattcaaccagcggatccgattaccgtggatgcaatgatcccgaactttaactgggcgttcctcggtgtcaccacctggatctttatggcggccggcggggcggagtccgtcgcggtgtacgtcaatgacgtgaaaggcggatcgaaatcatttgttaaggtcattatcctcgccgggatcgtgattggcgtgctgtactccatttcctcggtactgataaacgtgtttatcagcagtaaagagctgaaatttaccggcggatcggtacaggtcttccacggcatggcggtatggtttggcctgcccgaaatcgtggtcaaccgttttgtcggcctggtctcctttaccgccatgtttggttcgttattaatgtggaccgcgacgccggtcaaaatctttttctccgaaatcccgcccggaatatttggtaaaaaaaccgttgagctcaatcaaaacggcgtaccggcgcgcgcggcgtggatccagttcctgattgtgattccgctaatgataattccgatgatgggctcaagtaccgtgcaggatttaatgaataccatcatcaatatgaccgccgccgcctcgatgctgccgccgctgtttatcatgctggcgtaccttaatctgcgccgcaagctcgatcatctgccgcgcgattttaaaatgggttcacgcaccaccggtattacggtggtctccatgctgattgttattttcgctatcggcttcgtcgcctcaacctttcccaccggcggcaatattctgacgattattttctataacgtcggcggaatcgttatcttcctcggatttgcatggtggaaatacagcaaatacgtgaaaggtttaactcgggaagaaaaaagaattgaagcagcgccagcctctgacgcgtcttaa

SEQ ID NO: 172796 - DNA, 1434 bp, Klebsiella oxytoca
atgtccgaatcagttcgtgccaaaatagggaagttcgccctactgtcgatggcgtttgccgccgtatttaacgtacgaaatatcgttaataataacatcgagttagggctcagttccgcccctatctttctgtttgccacggtggtctattttattccgtttgtctttatcatcgccgaattcgtgtcagcgaataaaaattccgaatcaggtatgtacgcctggctgaagcagcctttaggtacccgcgcggcctatctcggctcgttcctgtactggtttgtgaacctgttctttttcctgtcgctgctgccgaacgtggtggcctacgcctcgtacgccattatgggttacgccattcccttctcgccgatggtcacttcgctgatctctatcgttctgttcgccatggccacccacatttccaccaaaggcgcgacctggctggggaaaatctccgaatgcgtggcttatggcgtcttcgcgctctttgcgatttacgtggtcggtgctattaccgcgctgggcgcgggccatgtccccgcgcagccgattacgctgcacgccatggcgcctaccatcaactgggcgacgctggggattatgtgctggatcttccaggcggctggcggggctgaaaccgttgccgcatatctgaacgatactaaaggcgggcagaaatcgtttattaaagtcatcatcaccgccgggatcctgattggcggcatgtatgcgctgggttctctgctggtcaacgtctttgtggcacgggaagacctgacctatgcagccggtatggtggaaattttcaccggtctcggcgcttatttccatatttccgaagcgctgatgggccgcttcgtcggcatcattctgtttatcgccattttcggcagcatgatgatgtggaccgccgcaccggtaaaaattcacttctcggaaattcctgccggcatctatggcaaaaaaaccaccgagctgaacgtccacggcgtgccggtgcgcgccgcctggtggcaatttgtcttcgtctttctgatgctcatcgtgaatggtttcggctccgccagcgttcagcaaatgatgaacaccgccatcaacctgaccgccgggaccgcaatgctaccgccgctgtttatcatggccgcctactttgttttccgctggaaacatgacgacacgccgcgcgacttccgcatgggttcaagaaaagttgggatggccgtggtgtcgatgcttatcgttattttcctggtcagcatgaccgcctccgctttcccgccaggagtcgacctggtgaacgccttcttcattaacgtctttatgaccgcagtcttctccggactcgcatggtggtggataacccgctttgagaaaaaacagcgcaagaaccaacaaccaggcctgaaatcagcggcaaatacggtgaaataa

SEQ ID NO: 172797 - DNA, 450 bp, Klebsiella oxytoca
atgagaattctcgataatttagaacaatttaagcaaatttatcacagtggacgtaaatggcagcgctgcgtagaagctatcaataatgtcgataatatccggcctggagttgcccattcgataggcgattcgctctcctatcgcgtggcaagcgacagcaccacggatgcgctgttcgttggcaaccgccgctatttcgaggtgcattactacctccagggtcagcaaaaaattgagtttgccgctaaagagcagctgcagaccgtcgcctgctatcgcgatgaaactgaccgtgaatatttgaaaggcattggtgaaaccgtgcaggtccatgaaggacaaatggtgatttgcgatacccacgaagcttatcgctttatctgcgactcgccggtcaaaaaggtggtgctcagagtgactatcgaagacggctacttcctgaataagtaa

SEQ ID NO: 172798 - DNA, 3093 bp, Klebsiella oxytoca
atgaatcgctgggaaaatcttcaactcactcatgaaaaccggctgcctccgcgcgcctatttcttctcttacgattcgcaggcccaggcgcgaaccttcgcccgtgaaaccagcagccgctttttgtcccttagcggacagtggaaattctgcttctttaacaacccgctgcgggtgccggaagcgttcacctcgcaatacatgagcgactgggggccgattaccgtaccgggaatgtggcagatggaaggacacggccagctacagtataccgacgaaggctttcccttcccgattgacgttccctacgtgccgaccgacaaccctaccggcgcctatcagcgcatctttaccctcagcgagggctggcaggaccagcagactctgattaaatttgatggcgttgagacctattttgaaatttacgttaacggtcagtacatcggtttcagcaaaggcagccgcctgacggcggagtttgatattagtcacgcggtaaaaaccggcgacaacctgctttgcgtgcgcgtcatgcagtgggcggactccacctatatagaagatcaggatatgtggtggtcggcgggtatcttccgtgacgtgtatctggtgggcaaaaacccgcttcacgtccaggacttcactctgcgcaccgattttaacgatgactacgtcgacgccaccctctcctgccagctggtgctggaaaatctcgccgcgcagccgggcgcagccacactggaatacgcgctgttcgacggcgaaaaggcgctgtatgaaggcgtaacgccgcgcctgagcatcagccagcagctgaacgtcaactttgcgatcgacgtgaaggcgccgcagcagtggtcggcggaaaatccttatctctatcacctggtgatgacgctgaaaaacgccgccggagagattatcgaagttatcccgcagcgcgtcggttttcgcgatatcaaagtgcgcaacggcctgttctacatcaataaccgctacgtgatgctgcacggcgttaaccgccacgacaacgaccatctgaaggggcgtgccgtagggatggaccgcgttgagaaagatctgctgctgatgaagcagcacaatatcaactcggtacgcaccgcccactaccccaatgacccgcgtttctatgagatgtgcgacatttacggtctgttcgtgatggcggaaaccgatgtcgaatcccacggcttcgccaacgtcggcaatctgagcgccatcaccgatgatccggcatgggagcatatatacgtcgaacgaatcgtgcgccacattcacgcgcagaaaaaccatccgtcgatcattatctggtcgctgggtaacgagtccggctacggctgcaacattcgggcgatgtatcatgccgctaaagcgatcgacgatacccgtctggtgcattacgaagaggatcgcgacgcggaggtggtggatatcatctctaccatgtatacccgcgtgccgctgatgaacgaattcggggaatatccgcatgccaaaccgcgaattatctgcgaatacgcccatgcgatgggcaacggtcccggcgggctgagcgaataccagaacgtgttctatcaacacgacagtattcagggccactacgtctgggagtggtgcgatcacgggattcaggccaccgatgacagcggcgcggtttggtacaaattcggcggcgattacggggactatcctaataactacaacttctgtcttgacggtctgattttctccgaccagacgcctgggcccggcctcagagagtacaaacaggttatcgccccggtaaaagttcaggcaaccgacatcacccgcggcgaactgcgcatcgataataagctctggttctcgacgcttgatgactataccctgcgcgtggaagttcgcgccgaaggggctacgcttgccagccagcagcttaaggtgcgcgatcttgcgccaaacagcggccgcgatatcaccattgacctgccagaactggacgatcgcgaaaccttcctcaacatcctggtgaccaaagactcgcgcacgccgtatagcgaggccaaccatccgatcgtcgtttaccagttccagctaaaagaacagacggcaacgaaatcgccgctgatgaatgccagcgcaaccccgctacagatagttgatgaacgactgagctacagcatcaccgggcataacttccgcgtggtcttctctaaagtcaacggcaaactgagcgaatggcaggtgaacggcgtagaccaggtgacccgtgagccgaagattaacttcttcaagccgatgattgataaccacaagcaggaatatgaggggctgtggcagcccagtcacctgcaaattatgcaggagcatctgcgtgaattcagcgccgaacagcgtggagactcggtgattatcaccacccgcagcattatcgctccgccggttttcgattttggcatgcgttgtacctatcgctggcagattaccccgcagggccatattaacgttgagcttgcgggggaacgttatggcgactatccgcatatcgtgccgtgcatcggttttatgctgggcattaacggtcagtttgaacaggtgaattactacggtcgcggtcccggtgaaaactacgccgacagccagcagagcaacatcattgatgtctggcgcaccaccgtggacgacatgttcgtgaactacccgttcccgcagaacaacggcaaccgccagcacgtccgctgggccgcgtttaccgaccgtcacggcagcggcctgatggtggtcccgcgcgatccgctcaacatcagcgcctggcactatacggcggagaatctgcacgccgcgcagcactgtaacgaactgcgtcgcagcgatgacatcaccctgaatatcgacgcccaactgctcggcctgggctctaactcctgggggagcgaggtgctggatagctggcgggtgtggctcaaaccgttcaactatggctttacgctgctgccgctggaaggcgggagcgcttcctcgcagacgctggcgaatcatagctttggcgccggtttcttttcctccgattcatacagcgaggctgaaaaatga

SEQ ID NO: 172799 - DNA, 984 bp, Klebsiella oxytoca
atggccacactaaaagatatcgcgaccgaagcaggcgtttcactggcgacggtttcccgggtattaaacgacgaccccactctgaacgtgaaagaagagacaaagcaccgcattcttgaggtggcggaaaagctggaatataaaagcaccagctcgcgtaagactcaggttcataccgtcggccaccatcatattctggctatctacagctaccagcaggatctggaaatcaacgatccttactatctggcgatccgccacggtatcgaaacgcagtgtgaaaagctcggtattgagctgaccaactgctactttaacaacgcgctacccgagctgaaaaaagtgaccggcgttctgattgtcggccagccttcgcgggcgattcgcgacgcagccacggcgttaaccgacaacgtctgctttattgatttccatgagccaggcagcagctacgacgccgtcgatatcgatctggtgcgtatcgccaaagaagttatcgacttttttatcgcccagggcgcgcggcgcatcggctttattggtggccaggatgagccgggtaaagccgacattcgcgaagtggccttcgtcgaatatggccgcctgaagggggtggtttcggaagaagatatctggcgcggcgggttttccagctcctccggctatgagctggcaaaaacgatgctggccagggcggatttccccaccgcgctgttcgtcgcgtcagactctatcgccatcggcgtgctgcgggctattcatgaacgcggcctcgcgatcccggaagatatctcgctcattagcgttaacgatatccccaccgcgcgttttacttttccgccgctctccacggtgcgcattcattcagaaatgatgggcagccagggcgttaatctgctggttgaaaaagcccgcgatggccgtgcgctgccgctaaacgtctttgtccccagcgtgctgaagctgcgcggcaccacccgctaa

SEQ ID NO: 172800 - DNA, 333 bp, Klebsiella oxytoca
atggaaacggtgctttatgatgattttgccagactggaaatgcgtacgggaaaaattgtagctgtaaaacgacatgagaatgccgataagctctatatcgcgcggattgacgttggcgagcgcaccttgcagacggtgaccagcctggtgccctattaccgagaagaagagttgctgggaaaaacggtcgtggtcctgtgcaatctggcgaaagccaaaatgcgcggtgaaacgtcggagtgcatgctgttatgcgccgaaaccgacgatggcggcgaaagcgtactgcttacgccggaaagagcgatgcctgcgggcgtgcgcgtcgtatag

SEQ ID NO: 172801 - DNA, 1380 bp, Klebsiella oxytoca
ttgaacaggttaccttcaagcgcatcggctctggcctgcagcgcacacgcactgaatcttattgagaagcgaacgctcgatcatgaagagatgaaatcacttaaccaggaggtcagggaatactttaaagagcatgtgaatccggggtttttagcgtatcgaaaatcggtcactgctggcggggattacggagccgtagagtggcaagcgggaggattaaatacgcttgtcgacactcagggacaggagtttattgactgcctgggtgggtttgggatttttaatgtagggcaccgtaatccagttgtcgtttccgccgtcgaaaatcagctcgctaaacaaccccttcatagtcaggaactgctggacccgctgcgggccatgctggctaaaaccctggcggccttaacgccgggcaaactgaaatacagcttctttagcaacagcggtaccgagtcggtcgaagcggcgttaaagctggcgaaggcctaccagtctccgcgcggcaagtttaccttcgtcgccaccagcggcgcgtttcacggtaagtcgctgggcgcgctttcagccactgcgaaatccactttccgtaagccctttatgcccctgctgccgggattccgtcatgtaccttttggcgatatcaatgcgatgcgcacgctgctgagcgagtgccaaaagaccggcgatgacgtcgcggcggtgatccttgagcctattcagggcgaaggcggggtgattctgccgccgccgggctatctgcccgcggtacgcaagctgtgcgacgagtttggcgcgctgctgatcctcgatgaagtccaaaccggcatggggcgcaccggcaagatgttcgcctgcgagcacgaaaacgttcagccggatattctgtgccttgccaaagcgctgggtggcggcgtcatgccaattggcgccacggtcgccaccgaagaggtgttctcggtactgttcgataacccgttcctgcataccaccacgtttggcggcaacccgctggcctgcgcggcggcgctggcgaccattaacgtactgctgacgcaaaacctgcccgcgcaggcggagcagaaaggcgatatgctgctggacggcttccgtcagctggcccgcgaatatccggatctggtgaatgacgtgcgcggcaaaggtatgctgatggcgattgagtttattgataacgaaatcggctatgactttgccagcgaaatgtttcgccagcgcgtgctggtggccggaacgctcaacaacgcaagaacgattcgcgttgagccgccgctgacgctgacccctgagcagtgtgaacaggtgctaaaagcggcccgcctggcgctggcggcgctgcgggtttcggtggaagaggcgtaa

SEQ ID NO: 172802 - DNA, 546 bp, Klebsiella oxytoca
atgagagatcatcacgaagaaggccgtgggccacgcggacgccacggcgaacatggtgaacacggtcgcagaggcggcggacgccggcagcgcttctttggccatggcgagctgcgcctggtcattctggacatcctcacccgtaatgccagccacggttacgaactgattaaagagatcgaaaccatgacccagggcaactacagtcccagccccggcgtcatctacccgacgctcgatttactccaggatcagggattaatcagcgtggctgacgaaaacggtcgcaaaaaaatcgccatcaccgccgaaggcagccagctgcacgcggaaaaccagcagccgctggagcagattcaggccagactgcaggcgcgaatggtgggttgtgagctacgtaaaaacccgcagatgaagcgcgcgctggagaattttaaggcggtactggatttaaaagttaaccagcaggaaataaccgaagcgcagctaaagcagattgtcggcgtgattgaccgcgcggcgatggagatctcccagctcgactaa

SEQ ID NO: 172803 - DNA, 774 bp, Klebsiella oxytoca
atgacaacgagcaggaatcctaaatacccgcagcgcgtgcgtaatgagctgcgtttccgtgagttaaccgtattgcgcgtcgagcgtatcggcagcgcattccagcgtatcgtgctgggcggagaggcgctggaaggctttgtctcccagggtttcgacgaccataccaagctttttttccccactgcgggtgctgcgtttacgccgccggaggtgacggatgaaggcattaactggggcgaaggcgtacgtccggcgacccgcgattatacgccgctttacgacgccgaccgtcatgagctggcgtacgacttctttattcacgatggcggtatagccagcagctgggcactggcggcgaaaccgggcgataagctggtcatcggcggcccgcgcggttcgctggtggtgccggaagattacgcctggcagctgtatgtgactgatgagtcaggtatgcccgcgctgcgccgccgtctgctgggattgcggcagcttccgacgcgcccgcaggtcacggcgatcgtcaccattggcgatgagtcttatcaagattacctggccgatctcgatggttttcatatcgagtgggtggtgggacatcactcctctgccgtggccgagcgtctggcgcaggttgtggttccaaccgaagattattttatctgggtgaccggggaaggcgcggtggtgaaatcactgctggcgcattttgaaggtccggagattgacccgcagctggtgcgttcgcaggcctactggcacagcaagtaa

SEQ ID NO: 172804 - DNA, 1650 bp, Klebsiella oxytoca
atgtctcaattcttttttaatcagcgcgccaacctcgtcaatgaagtgattgaaggaaccattatcgccagcccgtggaataacctggcgcggctggaaagcgatcccgccattcgcgtggtggtgcgtcgcgatctcgacaaaaacaacgtggcggtgatctccggcggcggttccggtcacgaaccggcccacgcgggctttgttggtaaaggcatgctgaccgccgccgtctgcggcgatctttttgcctcgccgagcgtcgatgcggtgctgaccgccatccaggccgtgaccggcgatgccggatgcctgctgatcgtcaagaactacaccggcgatcgtctgaacttcggcctcgccgcggagaaagcgcgccgcatgggctataacgtcgaaatgctgatcgtcggcgatgatatttcgctgccggataacaaacacccgcgcggtattgccgggacgattctggtgcataaagtggccggctacttcgccgaacgcggccacaatctggcgaccgtgctgcgcgaagcgcagtatgccgccagacacaccttcagcctcggtctggccctttccagctgtcacctgccgcaggatgcggaaacgactccgcgccatcatccggatcaggccgaactggggatggggatccacggcgaaccgggcgcttcggttatcgccacgcagaacagtgcggaaatcgttacgctgatggtagagaagctcagcgccgccctgccggaaaccggccgcctggcggtgatgatcaataatctcggcggcgtatcgattgccgaaatggcaattttgacccgcgagctggccaataccccgctgcatcagcgaattgactggctgataggcccggcgtcgctggtcaccgcgctggatatgaaaggcttttccctcaccgccatcgtgctggaagagagcattgagaaagcgctgctctccgcggtcgaaaccgccggctggcagacgccagtgcagccgcgcgcaatcagcgtgatgccctcgtcgctgcgcagtacgcgggtggagtttacgccctcggagaatagcgaggttgcaggctacgtagagcgggtgaccggtacgctatccaatctggaagcggacctcaatgcgctggatgcgaaggtcggcgacggcgatactggctccacctttgccgccggcgcacgcgatatcgccgacttacttcagcgccgtcagctgccgctggctaacctcgccacgctgttcgccctgattggcgagcgtctgacggttgtgatgggcggttccagcggcgtgctgatgtcgattttctttaccgccgccgggcagaagctggaacagggggcaagcgtcgccgaagcgctaaacgccggtctggcacagatgaagttttacggcggtgccgacgaaggcgaccgaaccatgattgacgccctgcaaccggcgctggcggcgctgctggccgaaccggaaaatctgcaggccgctttcgcggcggcgcaggcgggcgcggatcgtacgcttcacgccagcaaagcaggtgcaggacgcgcatcgtacctgaacagcgatagcctgcgcggcaatatggaccccggagcccacgcggtggccatggtgtttaaagcgctggcgcagaaatag

SEQ ID NO: 172805 - DNA, 1422 bp, Klebsiella oxytoca
atggtaaacctggtgattgtttcgcatagcgctcgtctgggcgaaggtgtcggagaactggcccggcagatgttaatgaacgatggctgtaagctggcgatcgccgccggaattgacgatcccaccagcccgatcggcaccgatcccattaaggttatggaagccatcgagtccgtagccgacgccgatcatatcctggtgatgatggatattggcagcgccctgctgagcgccgaaaccgcgctggatctcctcgatccggccattgcggcgaaggttcgcctgtgcgcggcgccgctggtggaaggaacgctggcggcgacggtgagcgccgccgccggggccggcatcgacaaggtcatcgaagatgccatgaacgcgctggaggcaaaacgcgtacagctgggattgccatcgcaaccgcaacacgcggcgttgaccgccgcgccgatcgacgaccgcgatgcgcgctcggtttccgtggtgattcaaaaccacaacggcctgcatgttcgcccggcgtcaaagctggtcgccgcgctggcgggattcaacgccgacctggtgctggagaaaggaggtaagtgcgtcacgcccgacagcctcaaccaaatcgccctgcttcaggtgcgccgtaacgataccttaaggctgcttgctcgcgggccggatgccgatgccgcgctggcagcgttccaggcgctggcggcggagaatttcggcgagcaaacggaggcggcgcctgcgactcagcccgcctgcgccgatcgcgtacagggtaaggtcgtactctattcccagccgcaggagaaggtctcacgggaaaaaggcgtcgtcatcggtcagcagcagctgcggctaaaacgggccatcgatcggacgctggaagagcttagcgcgctgacgaccctggcggaggcgaagttttccgccgacatcgcggccatcttctccgggcatcataccctgctcgatgaccctgatttatacgccgccgcctgcgatagggtgcgcgacgagcaatgcagcgcggagtgggcgtggcatcaggtgctgaacgatttaagccaacaatatcgtcatctcgacgatccttacctacaggcgcgctatattgatattgaagatattttgcaccgcacgctgcgtcaccttaacgggagcaacgaagtactaccgcagtttgacggcccctcgatcctcgtggccgacgatatttttccttctaccgtcctgcagctcgatgcggatcgggtgaaagggatctgtctgcaggccggcagtgaactctctcacggcgccattatcgcccgtcaggcgggtatcgcgatgctttgccagcagagcgatgtcctgaccacgctacaaaagggggagaccgtcatccttgatattcccggcaagcgcgtgattcgcgcctag

SEQ ID NO: 172806 - DNA, 633 bp, Klebsiella oxytoca
atgtcattaagcagaacgcaaatcgtagactggctctatcgctgcggcgatatcttcaccaaagagagcgattttttgaccggtctggaccgggagatcggcgatgccgaccacggcctgaatatgcatcgtggttttagcaaggtggtggaaaagctgccttcgattgccgataaagacattggtttcattcttaaaaataccggcatgacgctgctgtccaacgtcggtggggccagcggcccgctgttcggcaccctctttatccgcgccgctcaggtgacccaggcccatcagagtctgaccctggacgagctttatcaagccatccgcgaaggcgcggaaggcgtggtgaatcgcggcaaagccgagccgggcgataaaaccatgtgcgacgtctggctgccggtagtggaatcgctgcgccagtccagcgaacagcacctgtcgatccaaagcgctcttgatgctgcctgcgaacaggcgcaagccgccgtccaggccaccatcgccatgcaggctcgcaaagggcgggccagctacctgggcgaacgcagcatcgggcaccaggatccgggcgcgacctcggtaatgttgatggttcagatgctggccgcagcggccaaagagtaa

SEQ ID NO: 172807 - DNA, 1071 bp, Klebsiella oxytoca
atgaaaaaactgattaaccgtgtcgaagatgtcctgagtgaacaactggcgggcctggcaaaagcgcaccctgaactgacgctgcatcatgatccggtctacgtcacccgcgccgatgcaccggtggccgggaaagtagcgctgctttccggcggcggcagcggtcatgagccgatgcactgcggatatattggccagggcatgctttccggggcctgtccgggggaaattttcacctccccgacgccggataaaatgtttgagtgcgccatgaacatcgacggcggcgaaggcgtgctgctgattattaaaaactacactggcgatattcttaactttgaaaccgccaccgagctgctgcacgaaagcggcatcaaggtcaccaccgtggtagtcgatgacgatgtggcggtaaaagacagcctctataccgccggacggcgcggcgtggccaataccgtgctgattgaaaaactggtgggcgcggccgccgaacgcggcgactcgctggcagcatgcgctgaactggggcgcaagcttaacaacctcggccactctatcggcatcgcgctgggcgcctgcaccgttccggccgccggccagccctcattcgaactgcaggacgatgagatggagttcggcgtcggcattcacggcgaaccgggcatcgaccgccgccgcttcacctccctcgatcgcaccgttgacgaaatgttcgatactctgctggaaaacggcgcctatagccgcacgctgcgccactgggacaacgtgaaaggcgcgtggcaggaggtaacgcagaccaagcaggcgctgcaaaaaggcgatcgggttatcgcgctggtcaacaacctcggcgccacgccgctgtccgaactccacggcgtctataaccgtctgacgcagcgctgcgaggaaaccggcatcgcgatcgagcgcaatcttatcggcagctactgtacctctctggatatggtcggtttttccatcaccctgttaaaagccgatgacgagacgctggcattatgggacgccccggttcacaccccggcgctgaactggggaaaataa

SEQ ID NO: 172808 - DNA, 1098 bp, Klebsiella oxytoca
atgctaaaagttattcaatctccagccaaatatcttcagggaccggatgcatccacgctgtttggcgaatacgctaaaaacctggcggacagctttttcgtgattgccgatgacttcgtgatgaagctggcgggtgagaaagtgttgaacggtttgcatagccacaatatcagctgccatgcggagcgcttcaacggcgagtgcagccacgttgagatcaatcgcctgatcgccattctgaagcagcacggctgccgcggcgtggtgggcatcggtggcggcaagacgctcgatacggcgaaagcgataggctattaccagaagctgccggtggtggtgatcccgacgattgcctccaccgatgcgccaaccagcgcgttgtcggttatttataccgaagccggtgaatttgaagagtatcttatttacccgaaaaatccggacatggtggtaatggatacgacgattatcgctaaagccccggtacgcctgctggtggccgggatgggcgatgcgctttcaacctggtttgaagccagggcctgctatgacgccagagccaccagcatggccggcggccagtcgacggcggcggcgctgagcctggcgcgcctgtgctatgatacgctgctggcggaaggcgaaaaggcccgccttgccgctcaggccggagtggtgaccgatgcgctcgaacgcatcgttgaagcgaatacctaccttagcggaatcggctttgaaagcagcggcctggccgccgcgcacgccattcacaatggtttcaccatcctcgaagagtgccaccacctgtaccatggcgagaaagtcgcgtttggtaccctggcgcagctggtgctgcaaaatagcccgatggaagagatcgaaacggtgctgaacttctgccataccgtcggcctgccggtcacgctggcgcaaatgggcgttaaagagggcatcgacgagaaaattcaggcggtagcaagagcgacctgtgcggaaggcgaaaccatccataacatgccgttcccggtcagcgcgcagagcgtgcatgcggcaattctgaccgccgacctgcttggacagcagtggctggcgcgttaa

SEQ ID NO: 172809 - DNA, 1914 bp, Klebsiella oxytoca
atgactgcgcagactcagagctttcccctggtgataacccagtcgtggcatcgttgcagtaagtttatgcagcgggaaacctggcagacgccgcatcaggcgcaggggctgaccttcgaatcgatttgtcggcgtaagaccgcgctgctgacgattggccaggcggcgctggaagatgcctgggagtatatggataaccgcccctgcgcattgtttatccttgatgagtccgcctgtattctcagccgctgcggcgatccgcagacccttgaccagctgtcggcgctggggtttcgtgacggaagctactgcgcggaaagcatcatcggcagctgcgcgctctcgctggcctccatgctcgggcagccggtcaaaacgacgggcgagcagcattttaaacatgcgctgcacggatggtcgtttagctctacgccggtgtttgataaccatgggcgcctgttcggttccatttctttgtgctgcctgacggaagaacaggcttcgccggacctctccctgaccctggctatcgcccgggaagtgggcaactcgctgctcaccgatagcctgctggccgagtcgaatcgccaccttaaccagatgtacggtctgctggagagcatggatgacggggtgatggcgtggaatgagcagggcattttgcagtttctgaacgtgcaggccgcgacactgctgcacctcgatgcccaggccagccaggggaaaaacatcaatgaactggtgacgctgccggctctgttgcgccgggcgatcaagcacgcgcgcgggctgaaccatgtggaagtcaccttcgagagccagcatcagttcgttgatgccgttatcacgctcaagccgatcgtcgaagagcagggcaacagtttcatcttgctgctgcatccggtcgagcagatgcgtcagctgatgaccagccagcttggcaaagtgagccatacctttgagcagatgtcggctgacgatcctgaaacccggcggttaattcactttggccgtcaggcggcgcgcggcgcttttccagtgctgctgtgcggtgaggaaggggtgggtaaagagctgctcagccaggcgattcacaatgagagcgagcggggtggcggaccgtatatcgcggttaactgccagctgtatgccgacagcgtccttgggcaggattttatgggcagcgcgccgacggacgaggaaaacgggcgtcttagccgtctcgagctggccaacggcgggacgctgttcctggaaaaaatcgaatatctggcgccggagctgcagtccgcgctgttgcaggtgatcaagcagggggtattaacccgtctggatgcccggcgtttgattccggtggacgttaaagtcatcgccaccactaccgtcgatcttgccaacctggtggaacaaaaccgctttagtcgccagctttactacgcgctgcactcttttgaaatcgttattccgccgttgcgggcgcggcgtaacagtattccttcgctggtccacaatcgtcttaagagtctggagaagcgtttttcctcgcggttgaagatggatgacgatgcgctggcgcagctggtggcctactcctggccgggtaatgattttgagctgaacagcgtgattgaaaatatcgccattagcagcgagaacggccatatccgtttgagtaacctgccggaatatctctttgccgagcggccaggcgccgatgcgggttcctcgctgctgcccgccagcctgaccttcagcgccattgaaaaagaggccatcatccatgccgcccgcgtgaccagcgggcgggtacaagagatggtgcagctgctgaatattggccgcaccacgctgtggcgaaaaatgaaacagtacgatatcgatgccggccagtttaagcataaaaatcaggagtaa

SEQ ID NO: 172810 - DNA, 1164 bp, Klebsiella oxytoca
atgagctatcgtatgtttgattatctggtgccaaacgtgaacttttttggtcccaatgctgtttctgtcgtcggcgaacgctgtaagctgctgggcggtaaaaaagcgctgctggtcaccgataaaggtctgcgggccatcaaagacggcgcggtggataaaactctcggctatctgcaggaagccggtattgaggtggtggtttttgatggcgtcgagccaaatccaaaagacaccaacgtgcgcgatggcctggcggtctttcgtcaagaacagtgcgatattatcgtcaccgtcggcggcggtagccctcatgactgcggtaaagggattggtatcgcggctacccacgaaggggatctttaccgctatgccggcatagacaccctgactaacccactgccgccgatcgtcgcggtgaataccaccgccggtaccgccagcgaagtgacccgccactgcgtactgaccaacacccaaacaaaagtgaagttcgttatcgtcagctggcgtaacctgccctcggtctccatcaatgacccgctgctcatgcttggcaaaccggcgccgctgaccgccgcaaccggcatggatgcgttaacccacgccgtggaggcctatatttccaaagatgccaacccggtcaccgatgccgccgcgatccaggccatccgcctgatcgcccggaacttgcgccaggccgtcgcgctgggcagcaacctgcaagcccgcgaaaacatggcctacgcttccctgctggcgggaatggctttcaataacgccaacctcggttacgttcacgccatggcccatcagcttggcggcctgtacgatatgccgcacggcgtggcgaacgcggttctgttgccgcacgttgcgcgctacaacctgatcgccaatccggaaaagtttgccgacatcgccgaatttatgggagaaaacatccacggactttcaaccatggacgccgccgagtcggccattcgcgccatcgcccgcctctcttccgatatcggcattccgcagcatctgagcgagctgggagttaaagaggctgacttcccctatatggcggagatggccttgaaagacggcaacgccttctcaaatccgcgcaagggtaacgagaaagagattgtcgctatcttccgccaggctttctga

SEQ ID NO: 172811 - DNA, 426 bp, Klebsiella oxytoca
atggataagatcaaacacatcgccactatcacgctggcggctgcaaaagaaatggctactgccgttgaggcgaaagcccttgaaatgaacgtgccggtggtctttgccgttgttgaccgcggcggaaatatgctcctgatgcagcgtatggatgaggcatttataaccagctgcgatattgcgctcaataaagcctatacggcatgcggcctgcaaaaaggcactcatcaaattacagcgttagtccaaccgggcgcaccgctatatggattacaactcaccaaccagcagcgaatcattccttttggcggcggcctgccagttatttttaacgaggaagtcatcggcgccgttggcgtgagcggcggtaccgtcgaacaggacatgttattagccgaaacggctctgaagggtttctctaaataa

SEQ ID NO: 172812 - DNA, 300 bp, Klebsiella oxytoca
atgccaacagcaatcgataaagccctggattttattggtggtatgaacacatcgttaccggtgccgaatactatggatgaaagtaccgctaaggggatcctgaagtatttgcatgaactaggtgtaccggccagcgctgcgcaggtcacggcccgtggtgagaaggaggggtggagtgccgggttcacgcaaaaagtagccggatgggcggacaaaattgcctctggcaaccgcattattatcaaaaacccagaatactttactgcttatatgcgcgaacaactgcaggcgctggcgtaa

SEQ ID NO: 172813 - DNA, 615 bp, Klebsiella oxytoca
ttgtcaaaatatgagctaaattcagcagaagagcgttatcagcctgggtctggagatttagtactggctaataagctgggtattactgatgacgaagaaatggagacgctggaatctggcctgttattgatgctttatgaacggttgtttatcgaaggtcagcctccttctgtgctggcatttgagcacgtcagtggatggcatcgccagtggctggggaatgtgtatgactgggccgggaaattacgtcatgctaacctggctaaagatggttttcagtttgctgctgccgacagaattccactgcttctcgatagttttgataagcaatttctttcccggtctgctgagttgaaattcctggttcgtccggaactggttcgttatctggctgaatgccacgtggagtttattttgatccatccattcagagaaggtaacgggcgtctttcacgactgctttgtgatgtactgtcggttgtggcgggtaagggcttactggattacagtctgtgggatgagcacaaggccttttatttcagagcaatacaggcaggcatatcaggaaactatagccctatgatgcaactgatgagcgatatcttaccagattaa

SEQ ID NO: 172814 - DNA, 507 bp, Klebsiella oxytoca
atgatcaacgatattctggcgccggacctgcgggtggtcttttgcggtatcaatccggggaagtcttccgcccataccggttttcatttcgcccatccgggaaatcgcttctggaaggtgattcatcaggccgggtttaccgaccgtcttctgaaacccgaagaggagctgcagctgctggatacccgctgcgggattaccatgctagtcgagcgcccgacggtacaggccagcgaggtcgcgctgctggagctccgcgatggcggaagagagctggtgaggaaaatggaagagtatcagccgcgcgcgctggcgatcctcggtaaacaggctttcgagaaagcgtttcaggtacgcggcgtaaaatggggcaaacagcaggtgaccataggcgcgacggaagtatgggtgttgccaaatcccagcgggctcaaccgggcgacgctggataagctggtggaggcctaccgggagcttgacgaggcgctggcaacgcgagggctttaa

SEQ ID NO: 172815 - DNA, 1128 bp, Klebsiella oxytoca
atgataaagaaaatatttctgtccttactaataggtatgatagtggtttgcgcctgtgcctatcataaagcgaagcccctgcgcctgaccaaagatctttcactaccatttgcgctgccaaccgaacagcgccatatagtgtattacgcctcgctggcgccaaatgcgcataatgtccagccctggcatattcgctataacccggacgcacggcgattcaccctggcgttcgaccgcagtaaagccctcccgcatatcgacccgacggggcgagaagccagtatttctctgggcgcgttcctggagaacttccgccaggcagccgccgcatttggcatgctggcggaaatagacattttaccggtgatggcccgcaatggtgatgttgcccgcatgacgttaagccccctccaccgcgcctcttctctcaaacagcccgccgtgctgaagttaattgagcgccggcacaccgacaaacgtccgtttcaggatattgcccttgcgccccgcgatctggctgccctgctcaaacagcaccagccgtatttaaattattatccacgcggcagcgccgggtttaataagcttgagagttttgccatccaggcagcaaaggctcaggcgctcgatgcggccaaaagagcggagttcgctcactggctgcgcttttccaacgaagaggcccgccggttgaaagacggcctgcccgcagaacagttaggcatcaccgggataaaaaaactgctctattactcatttttcgatcggcaaaaagcccagggagaagccttcgccgcggaaagcatcagtaaaacggccagcagcgtagcgcaaagcgccggattttttatcatcggcggagaggaaacctttccgctgatgatgcgcagcggcatgaatctgcaggccttctggctggatgccgtccgctacggcatctctgttcagccggtgagccagatgctggaggataaagcgttccgtaaacagctggcggaaaccttaggcttaagccagccgccgcaaatgatccttcgcgcaggctacgttgacgactatggcgaaaataatagaattcgccgtcctatcggcgaatttacccgcctggaaccgcccggggcgaattaa

SEQ ID NO: 172816 - DNA, 645 bp, Klebsiella oxytoca
atgaatagcaaacgaaagattcagctggctgattttaatagaacggttattctggccaccgctaatacgttatttcttaaccatggtatagaaggaacgaccatggatgagattgcgcacgaagccggattcagtaaaaccacgctttatacctactttgacagtaaacaggatattgtcgatcaccttattctcgatggaatggagcgctttcaccaggaggtggttaaaatagtcagccggcaggcccccttccgcgagttttatcatgagctttgccagtcgttggttgctatccacgactccggcatcgtctatttccccggcattaccgggaaaataggttgctcagaaaaagagatgaaaaataataaagtactgactaatatctatatgctcggcgaggagattaatcatattatcgccggagaaatttcccgcgcggcagcaaacaaagagcttcagttaaatgctccaatggcagacgtcatgatgctgttctggctctgcctgaccgggctgatagagaaatcagcaagtaaagaagcctatattttgcggcatcttgagaaggaccgaaaatcctttcttaacttcgcttttgacgctttattattaatgatagaaaaaggcgagagtcgatga

SEQ ID NO: 172817 - DNA, 1845 bp, Klebsiella oxytoca
atggagcaaaacccgcagtcacagctgaagcttcttgtccaacgtggtaaggagcaaggctatctgacctatgccgaggtcaatgaccatctgccggaagatatcgtcgactccgatcagatcgaagacatcatccaaatgatcaacgacatgggcattcaggtgatggaagaagcaccggatgccgatgatcttttgcttgctgaaactaacaacaatactgacgaagatgcggaagaagctgcggcgcaggttctctccagcgttgagtctgaaatcggacgcactaccgacccggtgcgcatgtacatgcgtgaaatgggtaccgtcgaactgctgacgcgcgaaggcgaaatcgacatcgctaaacgtatcgaagacggtattaaccaggtgcagtgctcggttgctgaatacccggaagccatcacctatctgctggagcagtacgatcgcgttgaggcggaagaggcgcgtctgtccgatctgatcaccggttttgttgacccgaacgccgaagaagacatggcgccaacggcgacgcacgtcggttctgaactctctcaggaagagatggatgacgacgaagacgaagatgaagaagaagacgacgacagcagcgatgatgacaacagcatcgatcctgagctggcgcgcgagaaattcgccgagctgcgcacgcagtacgaactgacccgcgataccatcaaagcgaaaggtcgtagccacgccgcagcgcaggaagagattctcaagctgtctgaagtgttcaaacagttccgcctggtgccgaagcagttcgattacctggttaacagcatgcgcatcatgatggatcgcgttcgtactcaagaacgtatcatcatgaagctgtgcgttgagcagtgcaaaatgccgaagaaaaacttcatcactctttttaccggcaacgaaaccagcgaaacctggttcaatgcggccatcgcgatgaataagccgtggtcagaaaagctgcttgacgtgaaagaagacgttcagcgcggcctgatgaaactgcagcagattgaacaagagaccggcctgaccattgagcaggtaaaagatatcaaccgtcgcatgtccatcggtgaagcgaaagcgcgccgcgcgaagaaagagatggttgaagcgaacctgcgtctggttatctcgatcgccaagaaatacaccaaccgcggtctgcagttcctcgatctgatccaggaaggtaacatcggtctgatgaaagcggtagataagtttgaataccgtcgcggctacaagttctccacctacgcaacctggtggatccgtcaggcgatcacccgctctatcgcagaccaggcgcgcaccatccgtattccggtgcatatgattgagactatcaacaagctcaaccgtatttcccgccagatgctgcaggagatgggccgcgaaccgacgccggaagagctggccgagcgtatgctgatgccggaagataaaatccgtaaggtgctgaaaatcgccaaagagccgatctccatggaaacgccgattggcgacgatgaagattcgcatctgggagatttcatcgaggataacaccctcgagctgccgctggactctgccaccactgagagcctgcgcgccgccacccatgacgttctggctggcctgaccgcccgtgaagcaaaagtcctgcgtatgcgctttggtattgacatgaataccgatcacacgctggaagaagtgggtaaacagttcgacgtaacccgcgaacgtatccgtcagatcgaagcgaaggcgctgcgtaaactgcgccatccgagccgttctgaagtgctgcgtagcttcctcgacgattaa

SEQ ID NO: 172818 - DNA, 1743 bp, Klebsiella oxytoca
atggctggacgaattccacgagtatttatcaatgacctgctggcgcgcaccgatatcgtcgatctgatcgacgcgcgggtgaagctgaaaaagcagggcaagaattatcacgcgtgctgtccgttccataacgaaaaaaccccctctttcaccgtcaacggtgaaaaacagttttaccactgctttggctgcggtgcgcacggcaacgctatcgacttcctgatgaactacgacaagctcgagttcgtggaaaccgtcgaagagctggctgctatgcataatcttgaagtgccgtatgaagccggaacgggcctgagtcagatagagcgccatcagcggcaaaatctctatcagctaatggaagggttaaatgacttttatcagcaatccttcaaccaacctaatgccgaacctgcgcgccagtacctggagcaacgcggcctgagtgccgaagttgtccagcagtttgctattggttttgcgccgccaggctgggataacgcattaaaacgtttcggcggtaatgtcgacaacaggaaactgctgctcgatgccggaatgctggtcaacaatgaccagggaagaacttacgaccgtttccgcaatcgcgtgatgtttccgattcgcgacaaacgaggccgggtgattggatttggtggtcgcgtactgggtaacgatacgccgaaatacctcaactccccggagaccgatattttccataagggccgccagctttacggcctttatgaagcgcagcagcaccaggcagaaccaccgcggttgctggttgtcgaagggtatatggatgtcgtcgctctggcgcagtacggtattaactatgccgttgcatcgctgggtacatcgaccacggccgaccacatgcatatattattccgtgcgacgaacaacgtaatttgctgttacgacggcgaccgcgccggtcgagatgccgcatggcgtgcgctggaaacggcaatgccgtacatgaccgatggtcgtcagctacgctttatgttcctgcccgatggtgaagatccggatacgctggtacgtaaagagggtaaagaggcttttgaagcacggatggagcaggctcagccgctctccatgtttttatttaacagtctcttaccgcaggtcgatctgagttcgccggatggcagtacgcagctggccgcactagcgctgccgctcattagccaggtgcctggcgatgcgcatcgtattcagctgcgccagatgctgggcctgaagctgggcatttttgatgatacccagcttgatcgtttaatgccgaaacaggcagaaagtggcgtcgtacgcccggctcagcagataaaacagacgcctatgcgtatacttataggactgctggtgcagaatcccaatctggcgccgctggtgccccctttgcaggggctggcgcagagcaaattaccgggactcagcctcttctccgagctggtgaacctctgtgttgcgcagccgggcctgaccacggggcagctattagagaactatcgcgggactagtgaatactcaacacttgaaaaactctcagcctggaacgatataagggatgagaatgttgaaaaaatgttcaccgacacgctaaaccgaatttttgatgcaatgcttgaacagcggcaagaagagttgatagctcgcgaccgcactcacggtttaagcagtgaagaacgccgggagttctgggaaatcagacaagccctggaaaaaaaatga

SEQ ID NO: 172819 - DNA, 216 bp, Klebsiella oxytoca
atgccggtaattaaagtacgtgaaaacgagccgttcgacgtagcgctgcgtcgcttcaaacgttcatgcgaaaaagcaggtgttctggcggaagttcgtcgtcgtgagttctatgaaaaaccgactaccgaacgtaaacgcgctaaagcttccgcagtgaaacgtcacgcgaagaaactggctcgcgaaaacgcacgccgcactcgtctgtactaa

SEQ ID NO: 172820 - DNA, 1014 bp, Klebsiella oxytoca
atgcgtgtactgggaattgaaacatcctgcgatgaaaccggcatcgccatttatgacgacgaaaaaggtctgttagccaaccagctgtatagtcaggtgaaattgcatgctgactacggcggcgtggtgcctgaactggcctcgcgcgaccacgtgcgtaaaaccgtccctctgattcaggcggcgctcaaagaggccgggatgacggcaaaagatattgatgccgttgcgtatacggcgggcccaggcctggttggcgcgctgctggtcggcgcgacggtaggccgctcgctggccttcgcgtggaacgtgccggcgatcccggtacaccatatggaagggcatctgttggcgccgatgctggaagataatccgccgcagtatccgtttgtcgcgctactggtttccggcggccatacccagctgattagcgtcaccggtattggccagtatgagctgttaggtgagtcgattgacgacgcggcaggggaagccttcgataagacggctaaactgctcggcctggattaccctggcggcccgatgctgtcgaagatggcctcccagggcaccgaagggcgttttgtctttccgcgcccgatgaccgaccgtcccgggctggattttagcttctcaggcctgaaaacctttgctgccaacaccatccgtagcaacggcgatgacgaccagacgcgcgccgatatcgcccgcgctttcgaagacgcggtcgtggatacgctgatgatcaagtgccgccgggcgctggagcaaaccggttttaaacggctggtgatggctggcggcgtcagcgctaaccgtacgctgcgcgcgaagctggcggaaatgatgaaaaagcgcggcggggaagtcttctatgcccgtcctgaattctgtaccgataacggtgcgatgattgcctatgcgggtatggttcgtctgcgttccggggcaaaagcggagctgggcgtcaccgttcgtccgcgctggccgctggctgaacttccggcggcataa

SEQ ID NO: 172821 - DNA, 1608 bp, Klebsiella oxytoca
atgtcatcactggatataaaaactgatttacctgcgcaaaccagtgcctccggctccaaagaaacgctggaagactatacgcttcgctatgccccgctgagctttcgccgctggggaccaggggttgtcgcggtgacggcattaggcggtatcgcctacctggccgacttttctatcggcgccagcatcggcatggcctggggtaccaccaatgcgatttacgcgatcctgctggcggcactggttatttttcttaccggtattccgctggcgattaccgccgcgcgctataacatcgacctcgacttaatcacccgcagcgccggtttcggctactttggctcggtgatcaccagcattatctttgccggatttacctttatctttttcgccctcgaaggctcgattatggcgcaggggctgctggtgggcttagggatcccgctgtggatgggctacctcatcgccaccctgatggtattgccgctggtggtctacggcatgaaggcgctgactcgccttcaggtctggacgacgccgctgtggctggtcctgatggtggttccggtggcctggcttatcgccaaagacccggatctggtggatggatttatgaacttcgccggtaaaaaccacgccgcaacggtagatttaaccgccattatgctcggcgcgggggtatgcctgtcgctgatcatgcagattggcgagcagatcgactacctgcgctttatgccgccgaagaccgcagaaaacagcaaaagctggtggctggcggtgttctccgccggtccgggctgggtcgtgttaggtgcgattaaacagattatcggcgcttttctcgggttctatctgctgacccgcttcccggcggtgcacaacaccgaaccggtacagcagttcgtcagcgtcttcgataacctggtccccggctggctggcgctcaccctcgcggtggtgctggtggttatctcgcagataaaaataaacgtcactaacgcctattccggctcgctggcgtggaccagcgcctggacgcgcaccaccaaacgttatccggggagaattattttcgtcatcgtcaacctgacgattgctctcgccctgatggagggcgacatgtttagcgctctggcgtggatcctcggcttctactctaactttgccatcgcctgggtggtggtggtcgccaccgatatcaccgtcaataaaggggtgatgaagctggcgccggcgcagccggagtatcgccgcgggatgatctacaacgtcaacccggtaggcgtagtctcttttgccctcgcggcaggcctttcgattagcgccttcttcggcctgttaggcgacaccctggcgccgttctcgccgctgatcgcgctggcggtagcgttcgtgatgacaccggtcatgggaatcgccacccgcgggcgctattacattaaacagcacgatgacggtatcgccgagccgcgctacgatgcgcagggtaatgcgtcgatcaccgtttaccgctgcctgagctgccgggaagagtacgaacgtcctgacgtgatgcattcgcataaacatcagggggcgatttgctcgctgtgtaagagtatggaataa

SEQ ID NO: 172822 - DNA, 618 bp, Klebsiella oxytoca
atgaacatgattaagcaaccgctgcgcgtcggcgtcggcggcccggtcggctccggaaaaaccgcgctgctggaagccctctgcaaagccatgcgcgacacctggcagctggcggtggtgaccaacgatatctacaccaaagaagatcagcgcattctcaccgaagccggcgccctggagccagagcgaattgtcggcgtcgaaaccggcggctgcccgcataccgccattcgcgaagacgcatcgatgaacctggccgcagtggaagcgctaagcgagaaattcggcaatctcgatctgatctttgtagaaagcggcggcgataacttgagcgcgaccttcagcccggagctggcggatctcaccatctacgtcatcgacgtggcggaaggggaaaagatcccgcgcaaaggcgggccggggatcaccaaatccgacttcctggtgatcaacaaaaccgatcttgcaccgtacgtgggcgcgtctctggaagtgatggagcgcgataccctgcgcatgcgcggcgaacgtccgtggagcttcaccaacctgaaaagcggcgacggcctgcaaaatatcatcgcctttatcgaagacaaaggcatgcttggcaaataa

SEQ ID NO: 172823 - DNA, 675 bp, Klebsiella oxytoca
atgccgacgccggaaaaacgtctgcggctgatgcagcttgccagcagcagcctcccggttggcggctacagctggtcccaggggctggagtgggcggtggaagcgggctgggtagcggataccgccgcctttgagcgctggcagctgcggcagatggagcagagcttttttaccgtcgacctgccgctgtttgcccggctctaccgggcctgcgaagcgggcgatctggagtgtgcccggcgctggaccgcttatctgctcgcctgccgggaaacccgcgagctgcgcgatgaagaacgcaaccgcggcgcagccttcacccggctgctggccgactggcagccggactgcccgcccgagtggcgcaagctgtgtcagcaaagccagttaaccggtatggcgtggcttggcgtacgctggcaaatagccattcctgatctggccctgagccttggctatagctggattgaaagcgcggtgatggcgggcgtcaagctggtgcccttcggccagcaggcggcccagcagttgattctgcgcctgtgcgaccgctatgcggcggacatggacagcgcccttgcggccccggattgcgcaatcggttcggcgacgccgcttgcggctatcgcttcctcgcgacacgaaacccagtattcccgactattccgttcttag

SEQ ID NO: 172824 - DNA, 471 bp, Klebsiella oxytoca
atgctttatttgacccagcgggtagagaccccggcgcaggccacggccagcgttaccctgccgattgacgtgcgggtaaaaagccgtattaaagtcaccctcaacgatggccgtcaggcgggcctgctgctgccgcgcggtctgctgctgcgcggcggcgatattctcagtaacgaaaacggcagcgaattcattgaagtgattgccgccgatgaagccgtttcggtcgtgcgctgcgaggatccttttatgctggcgaaagcctgctatcacctcggcaatcgccatgtcccgctgcagattatgcccggcgagctgcgctaccatcacgaccacgtcctggacgatatgctgcgccagtttggcctggccgtggatttcgcgcatctgccgtttgaaccggaagccggcgcctacgccagcgagtcgcacggccatcatcatcatcacaatcacgagcacagccactaa

SEQ ID NO: 172825 - DNA, 1704 bp, Klebsiella oxytoca
atgagtgaaatttcacgtcaggcctatgccgacatgttcggccccaccaccggcgataaagttcgcctggcggacaccgagctgtggatcgaggttgaagatgatttgaccacctacggcgaagaggtcaaattcggcggcggtaaagtgatccgcgacggtatgggacaggggcagatactttccgccgggtgcgcggatctggtgctgaccaatgccctgatcgtcgattactgggggatcgttaaagccgatatcggcgtcaaagatggaaggatcttcgccatcggcaaagccggcaacccggatattcaacccaacgtcacgatcccgatcggcgcggccacggaaattattgccgcagaaggcaagatcgtcaccgccggcggcgtcgatacgcatattcactggatctgcccgcagcaggcggaagaagcgctggtctccggcgtcaccaccatgatcggtggcgggaccggcccggcggcggggacccacgccacgacctgcaccccgggtccgtggtacatctcgcggatgctgcaggctgcggacagcctgccggtcaatgtcggcctgctgggtaaaggtaatggctcgaatccggatgcgctgcgtgagcaggtcgcggccggggttatcggcctgaaaattcacgaagactggggcgcgacgccagcggcaatcaactgcgcgctgaccgtagccgacgaaatggacgttcaggttgcgctgcacagcgatacccttaacgagtcgggattcgttgaggataccctggcggccatcggcgggcgcactatccatactttccataccgaaggcgcgggcggcggccatgcgccagatattattaccgcctgcgcacaccccaatattctgccctcgtcgactaatccgacgctgccctacaccgtcaacaccattgacgaacatctggacatgctgatggtttgccatcatctcgacccggatatcgccgaggacgtggcgtttgccgaatcgcgcattcggcgggaaaccatcgccgcggaagacgtcctgcacgacctgggcgccttctcccttacctcgtccgattcgcaggccatgggtcgcgtcggcgaagtggtgttacgtacctggcaggtggcgcaccggatgaaagttcagcgcggcccgctggcggaagagagcggcgataacgataacttccgcgtgaagcgctatatcgccaaatacaccattaatccggcgttaacccacggtatcgcccatgaagtcggttcgattgaagtgggtaaactggcggatctggtgctgtggtccccggcattcttcggcgtaaaaccggcgacgatcgtcaaaggcggcatgatcgccatggcgccgatgggcgacatcaacgcatctatcccgacgccgcagccggtgcactatcgcccgatgttcggcgcgctgggcagcgctcgtcaccgctgccgtttgaccttcctgtcgcaggcggcggcggaaaacggcgtcgctgaacggctgaacctgcacagcgcgacggcggtggttaaaggctgccgcacggtacaaaaagccgatatgcaccacaacggcctgttgcccaatattaccgtggattcacaaacctacgaggtgcgcatcgacggcgaactgataaccagcgaaccggcggacgtgttacccatggcgcaacgttatttcctgttttaa

SEQ ID NO: 172826 - DNA, 321 bp, Klebsiella oxytoca
atgatcccaggagaatatcaggttaaaccgggccagatagcgcttaacgtcggccgggctacctgctgcattatcgttgaaaatcacggtgaccggccgattcaggtcggctcccattatcacttcgccgaggtcaacccggcgctgaagttcgatcgccagcaggcaacgggctaccgtctcaatatcgcggccggaaccgcagtgcgcttcgagccgggccaaaagcgcgaggtggagctggtagcgctggccggagcccgcgtcgtgcacggttttcgcggcgaaataatgggtgagctggaggcaaatgatgagtga

SEQ ID NO: 172827 - DNA, 303 bp, Klebsiella oxytoca
atggaactgacacccagagaaaaagacaaactgttgctgtttaccgctgcgctggtggcggagcgtcgcctggcccgcggcctgaagctcaactatcccgaatccgtggccctgattagcgcctttattatggagggcgcgcgcgacggcagaagcgtcgcagagctaatggaagaagggcgccacgtcctgagccgcgagcaggtcatggaaggcgtaccggaaatgatccccgatatccaggtcgaagccacctttccggacggctcgaagttggttaccgtccataacccgataatctga

SEQ ID NO: 172828 - DNA, 825 bp, Klebsiella oxytoca
ttgcacggcacggtgttaccacagaataaaaaaggctggcaggccacgctggacctccgctttcagcttcttggcgggaaaacaacgctcgcctcccgtcgtcatgtcggtccactcaccgttcagcgtccgttttatcccgaagaagagacctgccacctctatctgcttcatccgcccggcggtatcgtcggcggcgatgaactcaccatcagcgccacgattgagtccgattgccatacgctgatcaccatgcccggcgccagcaagttttatcgcagcagcggcgcgcaggcgcggcttctgcaaaccctgacgctgggcgataacgcaacgctcgagtggttgccgcaggatgccattttctttcccggcgctcacgccgctttgcatactgcgtttcacctctcctcctccagcacgctgctggcctgggacctgctatgtcttggccgtccggtcatcggcgaaacctttagccacggcgcgctcgccaaccggctggaggtgtgggtcgacggctctccgctgctgattgagcgcctgaacctggccgatggagagctggcctgtatcgcgcagcagccatgggtgggaacaatgctgttctacccggcgaacgagacgctgctggaaggcgtacgcgaaaaacttacgccgctggcaaactatgccggcgcgacgctcaccgacggcctgctgacggtacgctttttaagtgacgataatctgcgttgccagcgggcgatgcgcgatatctggcagtttatgcgcccgcacctgaccggcaaatctccggtactcccccgaatctggctgacttaa

SEQ ID NO: 172829 - DNA, 621 bp, Klebsiella oxytoca
atgagtgcaatcgcgcctggactggttatcctcgcctacctctgcggctcaatctccagcgccattctcgtttgccgcctcgctggccttcccgaccctcgcgacagcggctccggcaatccaggggcgactaacgtcctgcgaattggcggcaagggcgcagccgtagcggtgcttatttttgacgtactgaaaggcatgctgccggtctggggagcgtgggcgctaggcctgacgccgttctggctcggtctggtggccattgccgcctgcgtaggccatatctggccggtattttttaactttcgcggcggtaaaggcgtggcgaccgctttcggagccatcgcccctatcggctgggatctcaccggcgtgatggccggaacctggctgcttacgattctgctcagcggctactcctcgctgggggcgatcgtcagcgcgctgatcgcgccgttctatgtctggtggttcaaaccgcagtatactttcccggtttcgatgctctcatgcctgattctgctgcgccatcacgacaacattcagcgtctgtggcggcgtcaggaaacccgcatctggacccggttcaaaaagaagaaaaaaacgccggagcagaaataa

SEQ ID NO: 172830 - DNA, 384 bp, Klebsiella oxytoca
atggatattgtatttatagagcaactttcggtaatcaccactattggtgtttatgactgggaacaaaccattgaacagaagctggtgttcgatatcgaaatggcgtgggataaccgcaaagcggcggccagcgatgatgtcagcgattgtctcagctatgctgatatcagcgaggcggtcatcaaccacgttgaaggcgggcgctttgcgctggtcgagcgcgtggcggaagaaattgctgacctgctgctggaaaagtttcaatctccatgggtgcgtattaaagtcagcaagcctggcgcggtagcccgggcggccaacgttggcgtcgtgattgaacgtggccttaatctgaaacaaaacttttcaggtcatactcgttaa

SEQ ID NO: 172831 - DNA, 822 bp, Klebsiella oxytoca
atgagcgatatacactcgctgctggtggcggcaatattgggtgtggttgaaggtttgaccgagtttttacctgtttccagtactggtcatatgattattgtcggtcatctgctgggttttgaaggtgataccgcaaatacgtttgaagtagtgattcagcttggttccattcttgccgttgttgtgatgttctggcgtcgtctgttcggccttatcggtattcatttcggcaaaaagcccgagcatgaaggccagggcagcggtcgcctgtcgcttatccatattctcttggggatgatcccggcggtagtgctggggctgattttccacgataccatcaagtctctgtttaacccgataaacgtgatgtacgcgctgattgtcggcggcgtgctgctgatcgcagcggaagtgctgaagccaaaacagccccgcgcggtgggcattgatgatatgacctatcgtcaggcgttcgtgatcggctgtttccagtgtctggcgctgtggccgggcttctcgcgttccggggcgacaatttccggcgggatgctgatgggcgtaagccgctatgcggcctctgagttctcattcctgctggcggtgccgatgatgatgggcgcgaccgtactggatatgtacaaaagtattggtttcctcaacgccagcgatattccgatgtttgccgtcggttttatcacggcgtttatcgtcgcgctgattgcgattaaaaccttcctgcagctgattaaacgtatttcgtttatcccgttcgccatctatcgctttatcgtcgcggcagcggtgtacgtggtcttcttctaa

SEQ ID NO: 172832 - DNA, 1242 bp, Klebsiella oxytoca
gtgaaggtttatctggtcggtggtgcagtacgagatgcgttattaaggctaccggttaaagacaaagattgggtcgtggttggcgccacgcctcagcaactcctcgacgcgggctaccagcaggtaggccgtgattttcccgtgttccttcatccgcaaagccgtgaagagtatgccctggcgcgcaccgagcgcaagtccggttccggttacaccggttttacctgctatgccgccgctgacgttacccttgagcaagacctgctgcgccgcgatctgacgatcaatgcgctggcccaggacgccgacggtcagattatcgatccctacggcggccagtctgatttacgccagcgcctgctgcgccacgtctcgcccgcctttagcgaggatccgctacgcgttctgcgcgtggcgcgttttgccgcccgctacgcgcatctggggtttcgtatcgccgatgaaaccatggcgctgatgcgcgcaatggccgatgccggtgagcttgcgcatctcacgccggagcgggtatggaaagagacggaaagcgcccttaccacccgcaacccgcaggtcttcttccagaccttacgcgactgccgcgcgctcaaggtgctgttcccggaagtcgacgccctttacggcgtaccggctccggctaaatggcacccggaaatcgacaccggcctgcacaccctgatgaccgtcaccatggcggcgatgctgtcacccgaagtcgacgtacgtttcgctaccctgtgccacgacctcgggaaaggactgacgccaaaagagctctggccgcgtcatcatggtcacggcccggctggcgtaaagctggtcgaacagctttgcgcccgtctgcgggtacccaacgagctgcgcgatctggcaaagctggtcgccgagtttcacgatctgattcacaccctgcccatgctgcagccaaaaacgctggtcaaactgttcgataatattgatgcctggcgcaggccgcagcgggtcaggcaaatcgccttgaccagtgaagccgacgtgcgcgggcgcaccggttttgaggcctgcgattaccctcagggtcgcctgctgctggaagcctgggacgttgcccgagcggtctcaacaaaagaggtcgttgcggaagggtttcagggaattgagattcgtgaagagctgacgcgtcggcggattcaggccgtcgcccgctggaaagaaaagcgttgcccccagccgcaggactga

SEQ ID NO: 172833 - DNA, 621 bp, Klebsiella oxytoca
atgccaaaattacgccttattacattgactttgctggcgctgagcgccgccacggcggttcacgcggaagaaaaacgttacgtttcagatgaactgaatacctgggtgcgcagcggtccgggcgataactatcgccttgtgggcaccatcaacgccggcgaagaagtcgcagtgctgcaaactaacgacagcactaactatgctcaggtgcgcgacagcagcggccgtaccgcctggatccccttgaaagagctgagcaacgagcccagcctgcgcactcgcgtgccggatctggaaaaccaggtcaaaaccctgaccgataaactgaataacattgataccacctggaaccagcgcacggcggacatgcagaagaaagtcgccggtagcgatgccgtcatcaacggcctgaaagaagagaatcaaaagctgaaaaatgagctggttgtcgcgcagaagaaggtgaacgccgcaaatctgcagcttgatgacaaacagcgcaccattatcatgcagtggtttatgtacggcggcggcgtgctgggcgtcggcctgattctgggactggtgttgccgcacctggtaccgagccgcaagcgcaaagaccgttggatgaactaa

SEQ ID NO: 172834 - DNA, 1407 bp, Klebsiella oxytoca
atgcgcattgcatggcgattcgccgcaaaatactatttactgacaagaaatatcgttgttagttcgccgcaatttcccggcacagcatataagcggaagaattcagtcatggctcaagaaatcgaattaaagtttatcgttgatcagaatggcgttgacgcgctgcgtcagcacctcaatacgctggaggcaaagcacacgcccgcgggtcaattactgaatatttactatgaaacggcggataactggctgcgccgccacgacatggggctgcgcgttcgcggcgaccaggggcgctatgagatgacgctgaaaatcgccgggcgcgtcgtcggcgggctgcatcagcgtccggaatataacattccgctggaaagccctgagctggcgctggaaaagcttccggctgaagtctggccgcagggtgaactgccggcggagcttgctgagaacgtacagccgcttttcagcaccgattttgagcgtgagcgatgggtggtcaaagaaggcgacagcgaaattgaaatcgcactcgatcgcggcgaagtcaaagccggcgagcatcaggaacccatttgcgagctggagctggagcttctgtccggtaatactcaggatattctgacccttgcccgcggcctgctggatactggcgtactgcgtcagggaagcctgagcaaagcggcgcgtggttatcatctggcgcagggcaacgaagaacgcccgctgaccgagttaacgatccttcgcgtcgcgccgaaagccagcgtcgaacaggggctggaggcggcgctggaaagcgcgctggcgcactggctatatcatgatgaagtcctcaatcgcggcaatgcgaaagcgaaagcggagattttgcacgctatcgcccgcgtgcggcacgcgttggtactgtttggcggtattgtcccgcgcaaagccaccacgctgctgcgtgagcgtctgagcgaagccgaggcggcgctggcggaagccgaaacgacccaggccgcgcttttcagcgtggcgaccgtcagggcgaagctggcgctcaccgatctgctggtaaaccgcggctggcgtcctttcctgaacgcagccggagagcagaaaattgccggatcgtttaaacgctttgcggatattcagctctccagggcggcggcggagctgaaaaacgcttttcgtcagccgtccgctgacggttatgccgatcagcttccgcgtctgacccgcgaaattgacaccgttcagctgttatccggcgcctatgccgatgctgccgcgccgtggctggaaaactggcaagaaacccgccgggcgattgcgcataatgacagcagcgttatcgaatattttcgtcgccaggcgctggccgcagagccgttctggctgcatagtggaaaacgataa

SEQ ID NO: 172835 - DNA, 2835 bp, Klebsiella oxytoca
atgccgctttcttcgcaattacagcagcactggcagacggtcgctggccggctgccagcggattttcccgtatcgacgttgagcgatcgggcgcaatcagttatggcattcagcgatttcgtcgaacagagtctgatcgcgcagccgcagtggctggcggagcttgaaagtgcgccccccgaggcgcaggagtggcatcactacgccgaatggctgcaggtgcgcctggccgaggtcaatgatgaagccgcgctgatgcgcgagctgcgccagtttcgccgtcggatcatggtgcgtatcgcctgggcccaggcgctatcgctggtcagcgaagagagcagcctgcagcagctaagcgcgctggcggagaccttaatcgtcgccgcgcgcgactggctatacgctgcctgctgtcgcgaatggggcactccatgtaatgctgaaggttcgccgcagccgctactcatcctcgggatgggcaagctcggcggcggcgagctgaacttctcctccgacatcgatctgattttcgcctggccggaacatggcgccacgcgcggcggtcgtcgcgaactggataacgcccagttttttacccgcctcgggcagcgcctgatcaaggtactggatcaacccacccaggatggttttgtctaccgcgtggatatgcgcctgcgcccgtttggcgatagcggtccgctggtgttgagctttgccgcgctggaagattattaccaggaacagggacgcgactgggagcgctacgcgatggtgaaagcgcgaattatgggcgataacgatggcgtctatgccaacgagctgcgcgccatgctgcggccgtttgtcttccgccgctatatcgatttcagcgtgattcagtctttgcgcaacatgaagggcatgattgcccgggaagtgcgtcgccggggattaaaagacaatatcaagctcggcgcgggcggcatccgagaagtggagtttatcgtccaggtcttccagctgattcgcggcggccgtgagccaatgctgcagcagcgggcgctgctgccgacgctggccgccatcgaagagctatatctgctgccggaaggggatgcgcagaggctgcgcgaagcctatctgtttttgcgtcgtctggaaaacctgctgcaaagcatcaacgacgagcagacgcaaaccttgccgcaggatgaacttaatcgcgcccggctggcctgggggatgggcgttgccgactgggatacactcagctcgcggctggcggaacagatggctaacgtgcggcgcgtgtttaatgaactgatcggcgacgatgaaacgcagtcgccggatgagcagcttgaagagtactggcgcgagctgtggcaggacgcgctgcaggaagatgataccagcccggcgctggcgcatcttgcagacagcgatcgccgcagcgtgctggcgctgatcgccgattttcgcaaagagctggaccggcgcacgattggtccgcgcggtcgtcaggtgcttgaccagctcatgccgcatctgcttagcgaaatttgttcgcgcgccgatgctccggtaccgctggcgcgcattacgccgctgctcaccggaattgtcacccgcaccacttacctggagctgctgagcgaattccccggcgcgttaaagcacctgattagcctgtgcgcggcgtcgccgatggtcgccagtcagctggcccgccatccgctgctgctggacgaactgctggacccgaatacgctttatcagccaacggccaccgatgcctatcgcgatgaactgcgccagtatctgctgcgcgtaccggaagatgatgaagagcagcagctggaggcgctacgccagtttaagcaggcgcagctgctgcacatcgctgcggccgatatcgccggaacgctgccagtgatgaaagtgagcgatcacttaacatggctggcggaggcgatgattgacgcagtcgtccagcaggcatggctgcagatggtggcccgttacgggcagccgacgcacctgcacgatcgccaggggcgcggttttgcggtggtcggctacggcaagctggggggctgggagctgggctacagttccgatctcgatttggtgttcctccacgattgcccgatggaggtgatgaccgacggcgaacgcgaaatcgatggccgtcagttttatctgcgcctggcgcagcgcatcatgcatcttttcagtacccgcacctcgtcaggcattctgtacgaagtggatgctcgcttacgcccctctggcgcagcggggatgctggtcactaccgccgattcctttgctgattatcagcagaatgaggcatggacatgggaacaccaggcgctggttcgcgcccgcgtagtgtatggcgatcctgagctacaggcgcgctttgacgccattcgtcgggatattcttactaccccgcgagaaggcgaaaaactgcagaccgaagtgcgggaaatgcgcgaaaaaatgcgcgctcacctggggaataagcatcccgatcgctttgatattaaagccgatgccggtgggatcaccgatattgaatttattacccagtatctggtcctacgctatgccagtgataaaccgaagctcacgcgctggtccgataacgttcgtatcctggaactgctggcgcagaacgacattatggacgaggcagaggcgagggcgttaactcatgcttacaccacgctgcgcgatgcgctacatcacctggcgctgcaggaacagccggggcacgtggcgccagatgcgtttagccaggagcgtgaacaggtcagcgccagctggcagaagtggttgatggcttaa

SEQ ID NO: 172836 - DNA, 1434 bp, Klebsiella oxytoca
atgaaagtaacgctgccagagtttgaacgtgcaggagtgttggtggttggcgatgtgatgctggaccgctactggtatggtcccaccagccgtatttcgccggaagcgccggtaccggtggtgaaggtggaaaatatcgaagaacgtcctggcggcgcggcaaacgtggcgatgaacattgcgtcgctcggcgcgacctcccgcctcgttggtctgaccgggattgacgatgccgcccgtgcgttaagtaaggcgctggctgacgtcaacgtgaagtgcgacttcgtatccgtcccgacgcatccgacgattaccaaactgcgcgtgctgtcgcgcaaccagcagctgattcgtctcgattttgaagaagggttctccggtgtcgatccgcagccgatgcacgaacgtattcagcaggcgctgggctctattggcgccctggtgctctctgattacgccaaaggcgcgctgaccagcgtccagaccatgatcaagctggcgcgcgatgcgggcgttccggtgcttatcgatccgaaaggcacggattttgaacgctatcgcggcgctaccctgctgacgcctaacctctcagaatttgaggcggtagcgggtaaatgtaaggatgaagaagagatcgttgaacgcggcatgaaaatcatcgccgatttcgacctctctgcgctgctggtgacccgttccgagcaggggatgacgctgctgcagccggggcgaccgccgctgcatatgcccacgcaggcccaggaagtctatgacgttaccggcgcgggcgacacggtcatcggcgtgctggcggcgacgctggcttccggcaatactctggaagaagcttgctactttgccaacgcggcggctggcgtcgtggtgggtaaactcggtacctctaccgtttcgcctatcgaactggagaacgcggtacgcgggcgctccgagaccggttttggcgtgatgagcgaagaagaactcaagctggcggtagccgcggcgcgcaagcgcggcgagaaagttgtgatgaccaacggcgtgttcgatattttacacgcgggccacgtttcctacctggcgaacgctcgcaaactgggtgaccggctgattgtcgcggtgaacagcgatgcttcaacccggcgtctgaaaggcgagtctcgtccggtcaacccgctggatcagcgaatgatcgtgctgggcgcgctggaggccgtcgactgggtggtttcttttgaagaagatactccgcagcggctgattgccggaattctgccggatctgctggtgaaaggtggagactataagccggagcagattgccggcagcgaagaggtgtgggcaaacggcggcgaggtgctggtgctcaacttcgaagatggctgctcaacgaccaatatcatcaggaagatccagaaagataacaatcagtaa

SEQ ID NO: 172837 - DNA, 210 bp, Klebsiella oxytoca
atgaagaataaagacatgtatttaatgaagaattttgattttctggcccagagtttcgccagaatgaacgcacaaggtcagcccgtcgatcttcaggccattgtcggcaatatggatgaagagcatcgtgaatggttttgtcaacgctatgaactttactgccagcaggcgaataaagccatgacccctgaagcggagctggagcactaa

SEQ ID NO: 172838 - DNA, 282 bp, Klebsiella oxytoca
atgattgacccgaaaaaaattgaacaaatcgcccgccaggttcatgaatcgatgccgaaggggctccgcgatctgggggaagacgtggagaaaaaaattcgtcaggtgctccagtcgcagttaactcgcctggacctggtaagccgcgaagagttcgacgtgcagacgcaggtgctgctgcgcacgcgtgaaaagctggcgcttctggagcaacgtctgagcgagctggaaaatcgtcctctaaatgcgccagcggcgccggacgccgaagagaagctctaa

SEQ ID NO: 172839 - DNA, 654 bp, Klebsiella oxytoca
atgaatcagacgctactttcctcttttggtaccgcttttgaacgtgtggaacgtgctttagatgcactgcgcgaaggccgcggtgtgatggtacttgacgatgaagaccgtgaaaacgaaggcgatatgattttcgccgcagaaaccatgaccgttgagcagatggcgttgaccattcgccacggtagcggcattgtctgcctgtgcctgacggaagatcgtcgtaaacagctcgacctgccaatgatggtagagaacaacaccagcgcctacggtaccggttttaccgtcaccatcgaagctgctgaaggcgtgactaccggcgtttccgccgctgaccgcgtaacgaccgtacgtgcggcaattgccgatggcgcgaagccgtcagacctgaaccgtcctggccacgttttcccgctgcgcgctcagccgggcggcgttctgacccgcggcggccacaccgaagctacaatcgatctggtcaccctggctggcctcaaaccggcgggcgtactgtgcgaactgactaacgacgacggctctatggcgcgtgcgccgcagtgcattgagtttgctaaacagcacaatatggaagtagtcaccattgaagatttagtggcttaccgtcgcgaacacgagcgtaaagccagctaa

SEQ ID NO: 172840 - DNA, 774 bp, Klebsiella oxytoca
atgttgtcctcacccatcattttgactctgctggcagggagcgccacctttattggggcaatattcggcgtgctcggccagaaaccctcgaaccgcttattgggtttctctctgggtttcgccgccgggatcatgctactcatttccttaatggagatgctgcccgctgcgctggcgactgaaggcatgtcgccgctgctcggctacggcatgtttatcatcggccttctgggctactttgcgcttgaccgcatgctgcctcacgcccatgcgcaagatctgatgacccccgacatctcccgcccgcgaaatctgcgacgtacggcgatattgctgacgttaggcattagcctgcataactttcctgaaggtattgccacttttgtgacggccagcaataaccttgagctgggcatgggggtcgcgttagccgtcgcgctgcataacatcccggaagggctggcagtagcagggccggtctatgccgccacgggttccaggagtaaagcggtattctgggcagggctttccgggatggcggaaatcttcggcggcgtgctggcctggctggtactgggcagcgtgatctctccggtgatgatgggcgcggtcatggccgcggttgccggtattatgattgcgctatcggttgatgagctcatgccgctggcgaaagaactcgatccgcaaagcaacccgagctatggcgtgttgtgcggaatgtcggtaatgggattaagcctggtggttttgcaaacggtagggattggctaa

SEQ ID NO: 172841 - DNA, 792 bp, Klebsiella oxytoca
atgtcccgtttccgcatgcccgcgctatttttaggccatggcagcccgatgaacgtgctggaagataacatctatactcgcgcctggcggcatctgggcgagactttaccgcggccgaaagccatcgtggttatctccgctcactggttcactcgcggtacgggagtgacggcgatggaagcgccgaaaacgattcatgattttggcggttttccacaggcgctatacgatatgcattatccggctccgggttcacctgaactggcccagcgcctggttgagcttctggcgccggtgccggtgactctggataaagaagcctggggctttgaccatggttcatggggcgtgttgattaaaatgtatcccgacgccgatattccgatggtgcagctaagtattgatagcacgaaacccgccgcatggcatttcgaaatggggcgtaagctggctcagctgcgcgatgaaggcattatgctggtggcaagcggcaacgtggtgcataacctgcgcaccgcacgctggcacggcgagaatacggcctatccctgggcggagtcgtttaataactacgtgaaggcgaacctggcatggaaaggccccgtggcggaacatccgctggtgaattacctgacgcatgaaggcggatcgttatctaacccaacggccgatcacttcctgccgctgctgtacgtactgggggcctgggacggcgaggagccgattacgatcccggtagaaggaatggaaatgggatccctgagcatgctgtcagtggtgattggcgcttga

SEQ ID NO: 172842 - DNA, 1161 bp, Klebsiella oxytoca
atggaaagaatcagcattaccgagcgcccggactggcgtgaaaaagcgacagaatatggttttaactttcacaccatgtacggcgagccgtactggagcgaagaagcttattacaaactgacgctggcgcaggttgagaagctcgaagacgtcacggcagaactgcaccagatgtgtctgcaggcggttgaaaaagtcatcgccagcgatgatttaatgaccaaattccgcatccccaaacatacctggggattcgtgcgtcagtcgtggaaaacccatcagccctcgctgtattcgcgtctcgatctggcgtgggacggcgtcggtgagccgaaactgctggagaacaatgccgatacgccgacctcgctgtacgaagcggcattcttccagtggatctggatggaagatcagctgaacgccggtcagctgcctgcgggcagcgatcagtttaacagcctgcaggagaagctgatcgatcgcttcagcgagcttcgcgagcagttcggcttccagttactgcacatggcctgctgccgcgataccgttgaagaccgtggcaccgtgcagtatttacaggactgcgccgcagaagcgggcgtggctactgagtttctctacatcgaagacattggactgggtgaaaaaggccagtttaccgacctgcaggatcaggtgattggtaatctgttcaagctctatccgtgggaatacatgctgcgcgaggtgttctccactaagctggaagatgcaggcgtgcgctggctggagccggcctggaagagcatcatctccaacaaagcgctgctgccgctgctgtgggagatgttccccaaccatccgaacctgctggccgcttatttcagcgaagatgcgcacccggaaatggacaagtacgttatcaagcccattttctcccgcgaaggcgctaacatttctattgttgaaaacggcaaagtgctggaggcggtagaaggtccgtacggtgaagaaggcaccatcgtgcaggagttctatccgttgccgaagtttggcgacagctacacgctcatcggcagctggctgattaacgaccagccggcgggtattggcattcgcgaagaccgggcgatgatcacccaggatctgtcgcgtttttatccgcacattttcgttgagtaa

SEQ ID NO: 172843 - DNA, 669 bp, Klebsiella oxytoca
atgaaacggacaaaaaatattaatcacgcctcctttcgcaaaagctggagcgcgcgccatttaactcccgttgcgcttgccgttacggccgtgtttatgctcgccggttgtgaacaaagcgatgaaacggtttctctttatcaaaacgccgatgactgctctgccgccaacccgagcaaagccgcagagtgcaccactgcctacaataacgcgcttaaagaagcggaacgtacagcccctaaatacgcctcccgcgaagactgcgtcgccgagttcggtgaaggtcagtgccagcaggcgccggctcaggccggtatggctccggaaaaccaggctcaggcgcaaagcagcggcagcttctggatgccgctgatggctggctacatgatgggccggatgatgggcggcggaatgggcgctcagcagccgctgttcagctcaaaaaacccggccagcccggcctatggtaaatataccgacgctggcggtaagagctacggcgcagcgcagccgggccgtaccatgaacgtgccgaaaaccgcaatggcgccaaaaccggccaccaccagcaccgtgacgcgcggcggatttggcgactcggtcgccaagcagtcaacgatgcagcgcagctcggcgagctcctcttcatcacgctcgatgggcggctaa

SEQ ID NO: 172844 - DNA, 1449 bp, Klebsiella oxytoca
atgaagaaactctttcccatccttatcggcctgggcctgactggcttcagcgccatgagccaggcagaaaacctgctgcaggtttatcagcaggcgcgtatcagtaaccctgatctgcgtaaatcagcagccgatcgtgatgccgcattcgagaagatcaacgaagcgcgtagcccattactgccgcagctcggtctgggtgcggactatacctataccagcggcttccgtgattataaagaccagaactctaacgttaccagcggctcgctacagctcacgcaggtcctgttcgatatgtcgaagtggcgcgcgctgacgctgcaggaaaaacaagccggtattcaggacgtcacctaccagacggaccagcaaacgctgatcctcaataccgcaaccgcctattttaaagtgctggccgcgatcgatacgctctcctataccgaagcgcagaaacaggcaatttatcgtcagttagatcagaccacccagcgctttaacgttggcctggttgccatcactgacgtacaaaacgcccgctcgcagtacgatgctgtgctggcgaacgaagtgaccgcgcgcaacgatctcgataacgccgtcgaagaactgcgccaggtgaccggcaactactatccagaactggcgtcgctcaacgtggatggttttaaaaccaacaaaccgtcagccgttaacgcgctgctgaaagaagcggaaagccgtaacctgtcgctgctgcaggcgcgtctgagccaggatctggcgcgcgagcagattcgccaggcgcaggatgggcatctgccgaccctgaatttgaacgcatccagcggagtatctaataaccgctacagcggctctaagagcatttcacaggacgctgacgtagggcagaacaaaatcggccttagcttctccctgccgttgtatcagggcggaatggtgaactctcaggttaaacaggcgcagtacaactttgtcggcgccagcgaacagctggaaagcgcccaccgtagcgtggtgcagaccgttcgttcatcttttaacaacgtgaacgcgtctatcagcagcattaatgcctacaaacaggccgtggtttccgcgcaaagttccctggatgctatggaagcgggttattcggtaggtacgcgtaccatcgtcgatgtcctggacgcgaccactacgctgtataacgcaaaacagcaactgtccaacgcgcgttataactacctgattaacgagctgaacatcaaatccgcactcggtacgctgaacgagcaggatctggttgcgctgaacaatacgctgggcaagtctattccgacttcaccggatagcgtcgcgccggaaaatcctcagcaggatgtcagcgccgacggctacagcaacaccgccgcggcaaaaccagcatcagcacgcagcaccagcggcagcaacccgttccgccagtag

SEQ ID NO: 172845 - DNA, 633 bp, Klebsiella oxytoca
atgagtaatgtcaatcagcaggagattaccttctctaaaaacgatgtagaaattattgcacgcgaaacgctctatcgtggttttttttcgctcgatttatatcgtttccgccaccgcctgtttaacggtgagatgagcggcgaagtgacccgcgaaatttttgagcgcggtcacgcagcagtcttgctaccctttgacccggtgcgtgatgaagtggtggtcgtcgagcagatccgtattgcggcgtatgataccagtgagagcccgtggctgctcgaaatggtcgccggcatgattgaagaaggcgagtcgcctgaagatgtcgcccgccgtgaggcggtagaagaagccgggcttaatgtcggccgtattaagccggtcctgagttacctggccagccccggcggcaccagcgaaaggctgtctattatggtgggtgaagtcgatgcaacgacggcaaaggggattcacggactggccgatgaaaatgaggatattcgtgtccatgtggtaagccgggaacaggcttatcggtgggtagaagaggggaaaatcgacaacgcagcctctgtcattgcgctgcaatggctgcaactgcattatcacaatttacgaaacgagtggacaaaatga

SEQ ID NO: 172846 - DNA, 423 bp, Klebsiella oxytoca
atgaagcgttatacacctgacttccctgaaatgatgcgcctgtgtgaaaccaattttgctcagctgcgccgcctgttgccgcgaacggatgcagcgggagaaaaggtgagttaccaggtgggcaatgcgcaataccgattaacgatcgtcgaatcgacccgctacactaccttagtggcgattgaacagactctgccagcggtgagctactggagtctgccgtcaatgacggtacggctctatcacgatgcaatggtcgctgaagtgtgttcaagccagcagatctttcgcttcaaagcgcggtatgattatcctaataaaaagttgcatcaacgcgacgaaaagcatcaaattaatcagtttctggccgattggctgcgatactgtttagcacatggagcgatggcgattccggtttgttag

SEQ ID NO: 172847 - DNA, 828 bp, Klebsiella oxytoca
ttggaaagcctgttaaacctacctttggctggtgaggccagagtcaggatattacaaattactgatactcacctgtttgctgaaaaacacgaaacgctgttaggtatcaatacctgggaaagctatcaggctgtactggatgctatccacgcctctcagcgagaatgcgacctgattgttgccacaggcgatctggcgcaagatcactccgccgcggcctatcagcattttgctgaaggcatcgcgagttttgctgcaccctgcgtctggctaccgggcaatcatgattttcaaccggcgatgtacagcacgctgcaggaatcaggcatctcccccgctaaacgcgtattgctgggcgaccactggcaaatattgctaatggacagccaggtgttcggtgtgccgcacggcgagctgagcgatttccagctggagtggcttgagcagaagctggcggaggttcctgagcgttacacgcttctgctgttacaccatcatcctctgccgtcaggctgtagctggctggatcagcatagcctgcgcaatgccggggcgcttgattgcgcgctggctgcttttcctcgcgttaagcatctgctgtgcggtcatattcaccaggagctggaccttgactggaacgggcggcgaatgatggccacgccatccacctgcgtgcagtttaagccgcactgcgctaacttcacgctcgataccgtctccccaggctggcgctggctggaactgcatcctgacggcaccttgaccactgaagtttgccgccttgaaggcgtgaaatttcacccggatatcgcttcagaaggatactga

SEQ ID NO: 172848 - DNA, 576 bp, Klebsiella oxytoca
atgtctacgcttctctacctgcatggttttaacagctcaccgcggtcggcaaaagcgactgcgctgaaagagtggctggcgcggacttatccccatatctctatggtgatacctgagctcccggtttatcctgcgcaagcggcggaatatctggaggccctcgtgctggaacacggcggcgaaccgctgggcgttgtcggctcctcgctggggggatattatgcgacctggctatcgcagtgttttatgctgcccgcggtggtagtgaaccctgcggtgcgcccgttcgagctgctgaacaatttcctgggccccaatgagaatccatacacggggcagcaatatgtgctagagtcacgccatatttacgatctcaaagtcatgcaaattgacccgctggaagcgccggatttaatctggttattacagcaaacgggcgatgaagtgcttgattaccgccaggccgttgattatttcgcctcctgccgacaaacggtagaggagggcggtaatcacgcatttgttggctttgaagatcatttcactcagattatcgattttctgggcctgcgctaa

SEQ ID NO: 172849 - DNA, 1896 bp, Klebsiella oxytoca
atgacgcaatcttcatataacgctgatgccattgaggtactcaccgggctagagccggttcgccgccgtccgggaatgtacacggataccacacgaccaaaccatcttggtcaggaagttattgataacagcgtggatgaggctctggccggtcacgcgaaacgcgtggaggtcattctccatgccgatcagtcgctggaagttatcgacgatggacgcggaatgccggtggatatccaccctgaagagggggtgccggcagttgaactgattctttgccgcctgcacgcgggagggaagttctccaataagaactaccagttctccggcggcctgcacggcgtcgggatttccgtggtcaacgccttatcgaaacgcgttgaagtgaatgtgcgccgcgacggtcaggtctatagcatcgcctttgaaaacggcgacaaagtggaagatctccacgtgaccggcacctgcggtaagcgcaataccgggaccagcgttcatttctggccggatgaaagcttttttgatagcccacgtttttccgtctcgcgcctttcgcatttgttaaaagccaaggccgttctttgcccgggcgtagagattgttttccgcgatctggtcaacgacagcgagcagcgctggtgctacgctgatggcctgaccgactatcttagcgaagcggttaacggcctgcctctgctgccggaaaaaccgttcgtcggcaccttctctggcgataccgaagcggtcgactgggcgctgctgtggctgccggaaggcggcgagctgctgaccgaaagctacgtcaacctgattcctaccatgcagggcggaacccacgttaacggcctgcgccagggcttactggacgccatgcgcgagttttgcgaataccgaaacatcctgccgcgcggcgtgaagctgtcggcggaagatatctgggagcgctgcgcctacgtactctccgtgaagatgcaggatccgcagtttgccgggcaaaccaaagagcgcctctcttcacgccagtgcgccgcgtttgtttccggagtcgtcaaagatgccttcagcctgtggctaaaccagaacgtccagtcggcagagctgctggcggaaatggcgatctccagcgcccagcgtcgcctgcgcgcggcgaaaaaagtggtgcgcaaaaagctaaccagcggtccggcgctgcccggcaagctggcggactgcaccgcccaggatttgaaccgaaccgaactgttccttgtggaaggggattcggcgggcggttctgccaagcaggcgcgcgatcgcgaatatcaggcgatcatgccgctgaaaggtaaaatccttaacacctgggaagtctcttccgatgaagtactggcttcacaggaagtgcatgacatttctgtcgccatcggtatcgacccggatagcgacgacctgagccagctgcgctacggcaagatttgtattctggcggatgccgactccgacggtctgcacattgcaaccctgctgtgcgcgctgttcgtcagacacttccgtaatctggttaaacacggccatgtttacgtggcgctgccgccgctataccgtatcgacctcggtaaagaggtgtattacgcgctgacggaagaagagaaaaccggcgtgctggaacagcttaagcggaagaagggtaagccaaacgtacagcgctttaaagggctgggcgagatgaacccgatgcagctgcgtgagacgacgctggatccgaatacccgccgtctggtgcagctgattatcaacgatgaggacgaacagcagacgactgccatgatggacatgctgttagcgaagaagcgttctgaagatcggcgtaactggctacaagagaagggcgatctggctgagctggacgggtaa

SEQ ID NO: 172850 - DNA, 315 bp, Klebsiella oxytoca
atgttgacagtgattgctgaaattcgcactcgtccggggcaacaccatcgtcaggcggtgctggatcagttcgcaaaaattaccccgaccgttctccaggaagagggctgtcacggctatgcgccgctggtggatcacgccgctggcgtcagttttcagaccacctcgccggactccattgtcatggtcgagcagtgggaaagcgtcgcccatcttgaagcgcacctgcagactccgcacatgaaagcctacggtgaagccgttaaaggcgacgtgctggagatgaatatccgtattctggaatccggtatttaa

SEQ ID NO: 172851 - DNA, 582 bp, Klebsiella oxytoca
atgagcaacattctgattatcaacggtgcgaaaaaattcgcccactctaacggccagctgaacgacaccctgaccgaggtcgcggatggttatctgcgcgacgccgggcatgatgttaaggtcgtccgcgccgagagcgaatacgatgtcaaagaagaggtgcagaattttctctgggctgacgtggttatctggcagatgccgggctggtggatgggtgcgccctggacggtgaaaaagtacatcgacgacgtctttaccgaaggtcacggagcgctgtacgccagcgatggccgcacccgctccgatgccagtaagaaatatggttccggcggcctgattcagggcaaaaaatatatgctgtccctgacctggaatgcgccgatggaagccttcaccgagaaagatcagtttttccacggcgtcggcgtcgacggcgtttacctgccgttccataaggctaaccagttccttgggatgagcgccctgccgaccttcatcgccaacgatgtgatcaaaatgcccgatgttccgcgttatacggcagaatatcgcaagcatctggcggaaatttttggttaa

SEQ ID NO: 172852 - DNA, 1350 bp, Klebsiella oxytoca
atgaaacgactgggcaaactgagcctgcgcgttcgcctgacgctccttttcctgctgctgaccagcgccgcatggggcatcgccagctttgtggcctggcaacaaacgaccgataagctggataagctcttcgatacccagcagctgctattcgcccgccgccttagcgcaatgaattttgacgagcttcacactctctcttcgcaggtgcgagagaagaagaaggtcaagcacggtcatctcgacgacgacgcgctggctttcgctatctttaccaccgatggcaagatggtgcttaacgatggcgagaatggccaggatatcccgtggggccgcaatcgggagggattcagcgacggctatctgcgcggcgatgacgacgagtggcgttttctgtggctcaccacccgcgacggccgccatcgtatcgttgtcggccaggagtgggattaccgtcgcgagatggcgctggatatcgtcaccagccagctcacgccctggctgattgcgctgccgcttatgtttttgctactcatcgtgctgttaagccgggaactggcgccgctgaaaaagctggccaacacgctgcgcgctcgggcgccggattccgccgaaacgctgaataataaaaacgtgcccaatgaagttcgcccgctggtcgacgcgctaaatcagctgtttatccgcacgcatgatgccatgatccgcgagcgtcgctttacatccgatgcggcccacgaactgcgcagtccgctggcggcgctgaaggtgcaaactgaagtagcccagctttcgaaggacgatccgcaggggctggataaagcgctggcgcagcttcaccagggtatcgatcgcgcaacccgcctggtcgatcagcttctgactttgtcgcgcctggattcgctggcgcagctggacgatatccagcgcgtcgccctggacgacctgctgcagtcggcggtgatggagatgtaccaccccgctcagcaggccggcgttgagctgcgtctgcatctgaatgcggataacgtcgcacgcaccggccagccgctgctgctgagccttatggtgcgcaatcttttagataacgccgtacgctatagcgccgccggaagccaggtagatatcacgcttgaagctggtgaatttcgcgtgcacgataacggcccgggcattagcgccgaagccctggcgcgtatcggcgagcgcttttatcgcccgccgggacaggaacaacccggcagcggtcttgggttatccatcgtcaaacgtatcgccgcgctgcacggaatgacggccagtttcggcaacgcccgggacggcggattcgaagcgcgcattcgctggtag

SEQ ID NO: 172853 - DNA, 660 bp, Klebsiella oxytoca
atgcgcattttattggtggaagacgataaactgatcggtgacggcctcaaggcagggctgacaaaaatgggattcagcgtcgactggtttacccgcggtgaggaaggaaaagccgcattgtacaacgccccctatgacgccattattctggacctgacccttcccggcattgatgggctggatatcctgcgcgaatggcgcgacaaaggccgccatgaaccggtactgatccttaccgcccgcgacgcgctaagccagcgggttgaagggcttcggctcggcgccgatgactatctatgcaaaccctttgcgctgattgaagtcgccgcccgtctggaagcgctgatgcgccgcgcccacggccagagcagcagcgagctgcggcacggcagcgtggttctcgacccgggccggctcacggccaccctgaacggcgaaagcctggcgctcaagccaaaggagtttgctctgctggagctgatgatgcgtaacgccggacgcgtgctgccgcgtaagctgatcgaagaaaaactctacagctgggatgacgacgtttccagcaatgcgatagaggtgcacgtccaccatctacgccgtaaactcggcagcggtttcattcgcaccgttcacggtatcggctacaccctgggggacgcatga

SEQ ID NO: 172854 - DNA, 408 bp, Klebsiella oxytoca
atgaagaaaatcgccgcaatgaccgccatcatcgctttagtttccatgccggtactggctgctgaacagggcggattttccggccctggctccacgcaaaccagccagacaacctcgcaaaatggcgggtttattggcccgaacgggagcgtaacgacggttgcgaatgcgaaaagcctgcgtgacgatacctgggtgaccctgcgcggtaaaatcgtggagcgtatttccgatgatctgtataaattccaggacagctccggcaccgtcaacgtcgatatcgatcacaagcgctggaacggcgtgaccgttaccccgcaggatacggtagagatccagggcgaagtcgataaagactggaactcagtggagatcgatgtaaagcagattcgtaaaatcaccccctaa

SEQ ID NO: 172855 - DNA, 2259 bp, Klebsiella oxytoca
atgagcgatatggcagagcgccttgcgctgcatgaatttacggaaaacgcctaccttaactactccatgtacgtcatcatggacagggcgctgccgtttattggcgatggcctgaagccggtccagcgtcgcatcgtctatgcgatgtctgaactgggtctgaacgccagcgcgaagttcaaaaagtccgcccgcaccgtcggtgacgtgctgggtaaataccatccccacggcgacatcgcgtgctatgaagccatggtgctgatggctcagcccttctcctaccgctatccgctggttgacggtcagggaaactggggggcgccggacgatcctaaatccttcgccgcaatgcgttataccgaatcccgtttgtcgaagtatgctgaactgctgctgagcgaactggggcaaggcaccgttgactgggtaccaaacttcgacggcactttgcaggagccgaagatgctgcctgcgcgcctgcccaatattctgttaaacggtactaccggcattgccgttgggatggcgacggacattccgccgcacaacctgcgtgaagtggcccgggcggccattaccctgattgaaaagccgcaaacttcgctggatgacctgctggatatcgtgcaggggccggattacccgaccgaagcggaaatcattaccccccgtgccgaaatccgcaaaatctaccagaatggccgcggttcggtgcggatgcgcgcggtatgggccaaagaagacggcgcggtggtgattagcgcgctgccgcatcaggtttccggcgcccgcgtgcttgagcagatcgccgcccagatgcgcaacaaaaagctgccgatggtggatgatctgcgcgacgagtcggatcacgaaaacccgactcgcctggtgatcgtcccgcgctctaaccgcgtcgatatggagcaggtgatgaaccacctgttcgcgacgaccgatctggaaaagagctatcgtatcaacctgaatatgatcgggctcgataaccgtccagcggttaaaaacctgctggaaatcctctcggaatggctgaccttccgtcgcgataccgtgcgccgtcgtctcagctaccgtctggaaaaggtcctcaagcgcctgcatattcttgaaggtttgctggtggcgtttctgaatatcgatgaagttatcgagatcattcgtcacgaagatgagccgaaaccggcgctgatgtcgcgcttcggcctcagcgagacccaggcggaagcgattctggagttaaaactgcgccatctcgccaaactggaagagatgaagattcgcggcgagcagaacgagctggaaaaagagcgcgacaacctgcaggccatcctggcctctgaacgcaagatgaataacctgctgaagaaagagctgcaggccgacgccgacgcctttggcgacgatcgccgttcgccgctgcgcgagcgcgaagaagccaaggcgatgagcgagcacgatatgctgccgtctgagccggtgactattgttctgtcgcagagcggctgggtacgcagcgccaaaggtcacgatattgacgcgccggggctgaactataaagcgggcgacagttttaaatcggccgtgaaagggaagagcaatcagccggtggtctttattgacactaccgggcgcagctacgcgattgacccgattaccctgccgtccgcgcgcggtcagggcgagccgctcaccggtaagctgacgctgcctccgggggcgacggttgaacatatgctgatggaagccgatgatcaaaaactgctgctggcttctgacgcaggctacggatttatctgtactttcaacgatctggtggcgcgtaaccgcgccggtaagacgctgattagccttccggataacgcgcacgtgatgccgccgctggtaatagaagacgaatcggacatgctgctggccattaccgctgccggccgcatgctgatgttcccggtcagtgacttgccgcagctgtcgaaaggtaagggcaacaagattattaatattccgtcggcggaagcggctgcgggccaggatggcctggcgcatctgtttgtcctgccgccgcaaagtacgctgactattcatgtcggtaagcggaaaattaaactccgtccggaagagctgcaaaaagtgaccggcgagcgcggccgccgcggctctctgatgcgcggattgcagaaaatcgatcggatagagattgattctccgcgtcgcgcctctgcgggcggtagcgaagagtaa

SEQ ID NO: 172856 - DNA, 738 bp, Klebsiella oxytoca
atgctatttatttttcgactaattatcgttgtcatttactgtattctggtgtgcatcttcggctgtatctattgtctgttcagtccgcgtaatcctaagcacgtcgccaccttcggtcacctttttggcaagctgtcgccggtcttcggtctgaaggttgaactccgcaagcctgccgatgccgaaagctacggcaacgctatctatatcgctaaccaccagaataactatgatatggtgacggcatcgaatatcgtacagccgccgaccgttacggtaggtaaaaaaagcctggcgtggatcccttttttcggccagctctattggttgacggggaatctactgattgaccgcaataaccggacaaaagcgcacggcaccattgcagaagtcgtgaatgcatttaaaaagcgcaaaatctctttttggatgtttccggaagggactcgcagccgcggtcgcggtttgctgccttttaaaaccggtgcctttcatgcggctatcgcggcgggcgtacccattattccggtatgcgtgtctaatacttcgaataaaattaagctcaatcgcctgaataacggtctggtgattgtcgaaatgctgccgccggtcgacaccagccagtacgggaaagagggcgtacgcgcgctggcgacgcactgtcgcgagctgatgtccgcgaaaattgccgagctggataaagaagttgccgaacgcgaagcggccggcaagaaataa

SEQ ID NO: 172857 - DNA, 1413 bp, Klebsiella oxytoca
atgtcactcagtcggcgtcagttcattaaagctacaggcgtagcgctgtgcgcaggcgccgcgccgctgaaggcacaggctgctggtcagcagcccgcgctgccgattcctcctttgcttgagtcccgccgcgggcagccgctatttttgacgctacagcgtgcgcactggtcgtttacgccgggcacccgcgcatcggtgtgggggattaacggccgctacatggggccaaccatccgcgtctggaacggcgatgatgtgaagctgatctacagcaaccgcctgacggaaaacgtcgcgatgacgatacgcggtctgcaggttcccggtccgctgattggcggcgcggcgcgtatgatgtccgccaacgccgactgggctccggtgctgccgatccgtcaaagcgcggcgacgctgtggtatcaggccaacacgccaaaccatatggcgaaacaggtttataacggtcttgccgggatgtggctggtagaagatgaggttagcaagaatttgccgatccctaaccactacggtgtggatgatttcccggtgattattcaggacaagcgcctggataacttcggtacgcctgaatatagcgaacccggcagcggcggcttcgttggcgatacgctgctggtgaacggcgtgcaggggccttttgttgaagtgtcgcgcggctgggtgcgcctgcgtctgctgaatgcgtctaactcccggcgctaccagctgcagatgagcgatggtcggttgctgcacgtcatctccggtgaccaggggctgcttccggcgccggtttcgctgaagcagctgtcgttggctccgggcgaacggcgcgaaatcctggtcgacatgaccaacggcgatgaggtgtcgataacctgcggggaagcggcgagtatcgtcgatcgtattcgcggtttcttcgaaccgtcgagcatcctgatttcaacgctgattctgactttgcgcccgacgggcctgctgccgctggtgaccgatagcctgcctgtgcgcttgctgcctacggaaatgctggccggcgcgccgatccgcagccgcgatattacgcttggcgacgatccgggaatcaacggccagctgtgggatccgcagcgtattgatattacggcgcagcagggaacctgggagcgctggacggtgcgcgccgaccggccgcagtcgttccatattgaaggcgtcatgttccaggtgcgtaacgtgaacggttctgcgccgttcccggaagaccgcggctggaaggataccgtctggatcgacgggcaggttgagctgttggtctattacaaccagccctcctggccgcactttccgttccagtacttaagccagacgctggagcttgccgaccgcggctccattggccagattctggtgaatccggcgccgtaa

SEQ ID NO: 172858 - DNA, 2184 bp, Klebsiella oxytoca
atgagcgcaatatccctgatccaaccggatcgtgaccttttctcctggccgcagtactgggccgcctgttttggccccgcgccttttctgccaatgtcgcgagaagagatggatcaacttggctgggatagctgcgacatcatcctggtgaccggcgatgcttatgtcgatcacccgagcttcgggatggcgatttgcggacgcatgctggaatcccagggattccgcgtggggattatttcccagccggactggaacaacaaagatgactttatgcgtctgggtaaaccgaacctgttcttcggcgtgaccgccggtaacatggactcgatgatcaaccgctacactgccgaccgtaagctgcgccatgacgatgcctacacggcgggtaacgtggccggtaaacgcccggatcgcgctacgctggtctacactcagcgctgcaaagaggcgtggaaagatgtcccggtgatcctcgggggcatcgaagccagcctgcgccgtaccgcgcactatgactactggtccgataccgtgcgccgttcggtgctggtggactctaaggccgatatgctgatgttcggcaacggcgagcgtccgctggtggaagtggcgcaccgtctggccgccggcgagcctatcgggcaaattcgcgatgtacgcaacaccgccatcatggtgaaggaagcgctgcctggctggagcggggtggactccacgcgtctggacacgccgggcaaaatcgacccgatcccgcatccgtacggtgaagatttaccgtgcgcggataacaaaaccgtcgcgccgccaaagcaggaagcgaagcgcgttaccgttcagccgccgcgtcctaagccgtgggagaagacctacgtcctgctgccttcctttgagaaagtaaaaggcgataaagttctctacgcgcatgcctcgcgcattctgcaccatgaaactaaccccggctgcgcccgggcgctgatgcagaagcacggcgagcgctatatctggattaacccgcccgccattccgctctcaaccgaagagatggatagcgtgtttgcgctgccctataagcgcgttccgcatccttcttacggcgatgcccgcattccggcctatgagatgattcgcttctccattaacatcatgcgcggctgttttggcggctgttcgttctgctcgattaccgagcatgaaggtcggatcattcagagccgttccgaagattcgatcatcaatgaaatcgaagcgattcgcgatacggtgcccggctttaccggtattatttccgatcttggcggcccgacggccaacatgtatatgctgcgctgcaagtcgccgcgcgccgagcagacctgccgccgcctgtcatgcgtttatccggatatctgcccgcatatggacaccaaccatgagccgacgattaacctttaccgtcgcgcccgcgatcttaaaggcatcaaaaagatcctcatcgcatccggcgttcgttacgacattgccgttgaagatccgcgctacatcaaagagctggccacccaccacgtcggcggttatctgaagattgctcctgaacataccgaagaggggccactgtcgaagatgatgaagccgggtatgggcagctacgatcgctttaagcagttgttcgatacttattcgaagcaggcgggtaaagagcagtatctgattccatactttatttccgcccacccggggacgcgagatgaagatatggtgaatctcgcgctgtggctgaagcagcatcgtttccgcctggatcaggtgcagaacttctatccgtcgccgctggcgaactcgaccaccatgtattacaccggcaagaacccgctgggtaagattggctataagagtgaggatgtggtggtgccgaagggcgacaaacagcgccgcctgcacaaggcgctgctgcgctatcacgatccggccaactggccgctgatccgtcaggcgctggaaacgatgggtaaaaagcacctgatcggcagccgtcgcgattgcctggtaccggcgccgacgctggaagaaatgcgcgaggcgcgtcgccagaaccgccatacccgaccggcgctgacgaagcatacgccgattgtgcaccagcgttcgaacggcggggcgacggcgaagaagcccgtgaaacgcggcaaggttgccggtcgttaa

SEQ ID NO: 172859 - DNA, 456 bp, Klebsiella oxytoca
atgagctgtattttctgtcaaattgttgaggggaaagccccctgccacaaggtgtgggaagatgagcaccacctcgcctttctctccatttatccaaataccgacggttttacggtcgtgatcccgaagaagcactatcccagctatgcgtttgatatgccgccgcaggcgctggccgacctggtgctggcgacgcagaaggtggcaaagcttctggataaatccttcgatgacgtgggacgtacggggatgttttttgaaggctatggcgttgaccatgtccacagcaaactcagtccaatgcacggcaccggggatatgtcccaatggcggccgatcgagtcgcgtcagactaagttttttgcgcaatatgaaggctatctctcctcccacgatcacgagcgggcggatgatgaaaagctggcagcgctggcggccagaatcagagaagcatag

SEQ ID NO: 172860 - DNA, 828 bp, Klebsiella oxytoca
atgacacatccaaccgttataaaactacacgacggcaacctgatgccgcagctggggctcggcgtgtggaaagcaggcaacgaggaagtcgtctccgccattcataaggcgctggaagtcggttatcgctcgtttgacaccgccgccgtataccagaatgaaaccggcgtcggcaatgcactgagcagcgcaggcgtcgcccgcgatgagctgttcgtcaccacgaagctgtggaatgacgatcaaaagcagccccgtgaagcgctgcaggaaagccttaaaaaactcaaactcgactacgtcgacttatacctcattcactggccggtgccggctacgaaccattacgttgatgcctggaaaagcttaattgagcttcagcagcaagggctggcgaaaagcatcggcgtctgtaatttccaggtccaccatctgcaaaaaatcattgatgaaaccggcgtcgccccggtgataaaccagattgaactgcatcctctgctgcagcagcgtcagctgcatgcctggaatgcgacgcataaaattcagaccgagtcctggagcccgctggcacagggcggtgaaggggtattcgatcagaaaattattcaccaactggcggacaaatacggcaaaacgccggcgcaaatcgtcatccgctggcacctcgatagcggcctggtggtgatcccgaaatccgtgacgccgtcgcgcatcgccgagaattttaacgtctgggacttccgtcttgataaagatgaattgagtgaaatcactaagctggacaaaaacaaacgcctcggacctgacccggatcagttcggcggttaa

SEQ ID NO: 172861 - DNA, 1164 bp, Klebsiella oxytoca
atgaataatttcgacctacataccccaacccgcattctgttcggtaaaggcgcgattgaaaatctgcgcgatcaaatcccggcggatgcacgtgtgcttgtcacctacggcggcggtagcgtgaagaaaaccggcgtgcttgatcaggttctcagcgcgctgaacggcattgacgttcgggaatttggcggcatcgagccaaacccgtcctacgaaacgctgatgaacgcggtgaaaatcgcgcgtgatgaaaagatcactttcctgttggcggtgggcggcggctccgttctcgacggcactaaattcatcgccgcggcggcccactacgatgccagtatcgatccgtgggaaattctcgaaacttacggcagcaaagtggccagcgctatcccgatgggctccgtgctgacgctgcctgcgaccggttccgaatctaataaaggcgcggtgatctcgcgtaaaaccaccggcgacaaacgcgcgtttatgtccacccacgtccagccggtgttcgctattctggatccggtttacacctacaccctgccgccgcgccaggtggctaacggcgtcgttgacgcattcgtccataccgttgagcagtacgttacctatccggtcgacggtaaaatccaggaccgtttcgccgaaggcattctcctgaccctggtggaagacggtccgaaggcgctgaaagagccggaaaactacgacgttcgcgccaatattatgtgggccgccacccaggcgctgaacggcctgatcggcgcaggcgtaccgcaggactgggcgacccacatgctgggccacgaactgaccgccatgcacgggctcgatcacgcgcagacgctggccatcgttctgccggcgctgtggaatgaaaaacgcgaggctaaacgcgctaaactgctgcagtacgccgctcgcgtctggaacatcaccgaaggttccgaggaagagcgcattgacgccgccatcgccgcaacgcgtgatttcttcgaacgcatgggcgtcccgactcgcctttccgcctacggtctggatggtagctccatcccggcgctgctggcgaaactggaggagcacggtatgacccaactgggtgaaaatcaggatattactctggacgtcagccgccgtatttacgaggctgcacgctaa

SEQ ID NO: 172862 - DNA, 900 bp, Klebsiella oxytoca
atgaaccgcgctgagatatgccagctattaacgtataaggttaatcagctgaaagataaagaagaaatgcttaatggtctgctgccggatatccgcctgctgtacggcactcagccggggacgcgtacgccggtcatgtaccagccggggatcgtttttctcttttccgggcataaaattggctatatcaatgagcgtaccttccgctatgacaccaatgagtatctgctgctgacggttccgctgccgtttgagtgcgaaacttttgccaccccggaagtaccgctggcgggaataaggctgaatgtcgatattcttcaactgcaagaactgctgatggatatcggggaggatgagcagtttcagccgtccatggcgtcaagcgggatcaactctgcggtgctgtccgaagagattctgtgcgcggcggagcggctgctggatgtgatggaacgcccgcttgacgcgcgcattcttggcaaacagatcatccgcgaaattctctatcacgtgctgaccgggctgtgcgggggagcgctgctggcgctggtcagccgtcaaacccacttcagcctgatcagccgcgtgctgaagcgcattgaaagccagtacactgagaacctcagcgtcgatcagctggcggctgaggccaatatgagcgtctcggcgttccaccataactttaaatcagttaccagcacctccccgctacagtatctgaagacttatcgcctgcataaagcgcgcatgctgatgatccacgacggcatgaaagccagcgcggcggcgatgcgggtagggtatgagagcgcatcgcagttcagccgcgagtttaagcgttatttcggcatgacgccgggagaagatgcggcacgcatcaggacaatacaggggatgtaa

SEQ ID NO: 172863 - DNA, 660 bp, Klebsiella oxytoca
atggttgtcattcaagaaatcgtcgccgctctgtggcagcatgattttgccgcgttggcaaacccccacgttgtgggcgttgtatatctggtcatgttcgcaaccctgtttctggaaaacggtctgctgcccgcctcgtttttaccgggcgatagcctgctgctgctcgccggcgcgctaatcgccaaaggcgtgatggactttgtaccgactgtcgctatcttaaccgctgcagccagcctcggctgctggctgagctatattcaggggcgctggctgggtaataccgccacggttaagcgctggcttgggcatctgccgcataaataccatcagcgggcaacctgcatgtttgacaagcacggcctgctggcgctgctggccggacgcttcctggcgtttgttcgcacccttctgccaaccatggcgggcatttccgggctgccgaaccgccgcttccagtttttcaactggctgagcgcgctgctgtgggttggggtagttaccggtctgggctatgcgttgagtatgattcccttcgtaaaacgtcatgaagatcaggtcatgacctgcctgatgattctgcctatcgcgctgctgatagccgggctgctcggtacagttatcgtggtgattaaaaagaaatactgcaacgcctga

SEQ ID NO: 172864 - DNA, 1188 bp, Klebsiella oxytoca
atggctgataaacatcttgatactgcgctggttcatgccgggcgcagcaaaaaatatactcagggctcggtcaacagcgtgattcagcgcgcgtcatcgctggttttcgacaccgtcgaagcgaaaaagcacgccacccgcaaccgcgccaaaggcgaactgttctacggtcgtcgcgggacgctaacccacttctccctgcaggaagcgatgtgcgaactggaaggcggcgccggctgcgccctcttcccctgcggcgcagcggcggtcgcaaatactatcctggcgttcgtcgagcagggcgaccatattctggtgaccaataccgcctacgagccgacccaggatttctgcactaaaatcctcgccaaactcggcgtaaccaccggctggttcgacccgcttatcggcggcgatattgcccgtctggtacagccgaatacccgagtggtattcctcgaatcgcccggctccatcaccatggaagttcatgatgtcccggcgatcgtcgcggcggtgcgcagcgtcgctccgcaagctatcattatgatcgataacacctgggcggcgggagtactgttcaaagcgctggagtttggtatcgatatctctattcaggccggaaccaagtacctgatcggccattccgatgcgatggtcggcactgcggtgtccaatgagcgctgttgggcgcagctgcgggaaaatgcctacctgatggggcaaatggtggatgccgataccgcctacatgaccagccgcggcctgcgcacccttgccgtccgcctgcgtcagcatcatgagagtagcctgcagattgccgaatggctggcacagcatccgcaggtagcgcgcgtgaatcatcccgccctgcccggcagcaaaggccatgagtactggaagcgggacttcaccggtagcagcggtctgttctctttcgtgctgaacaaacgcctgagcgatgccgagctgtccgcctacctcgaccacttcagcttgttcagcatggcctactcctggggcggctttgaatcgctgattttagccaatcagccggaacacattgccgcaatccgtcctgatgctgaagttgacttcagcggcacgctaattcgggtacatatcgggttagaaaatgttaccgatctgctggatgatttagcggcgggcttcgcgcgtatcgtgtaa

SEQ ID NO: 172865 - DNA, 732 bp, Klebsiella oxytoca
gtgggtaataatttgatgcaggcggatctctccgtttggggtatgtatcatcatgccgatattgtcgttaaggtagtgatgatcggcctgattctggcgtcggtcgttacatgggctatctttttcggcaaaggcgcagaaatcctggccagcaagcgccgcctcaagcgcgaacagcagctggttgctgaagcacgctctctcgaccaggccagcgatatcgctaacggtttcgatgcgaaaagcctgacctcgcagctgatcaacgaagcgcaaaatgagcttgagctttctgcgggttctgaagataacgaaggcattaaagagcgtaccggtttccgactggagcgtcgcgtcgcggcggtaggtcgttacatgggacgcggcaacggttatctggcgaccatcggcgcgatttccccgttcgtcggcctgtttggtaccgtctggggcatcatgaacagctttatcgggattgcccagacccagaccactaacctggcggttgttgctccgggcatcgcggaagcgctgctggccacggcaatcggcctgttcgctgcgattccggcggtcgtcatctataacattttcgcccgaatgattgccagctacaaagcgtcccttggcgatgtcgccgcccaggttctgctgctgcaaagccgcgatctggacctgagcgccagcggcgttaagccggtacgtaccgcccagaaattacgcgtaggttga

SEQ ID NO: 172866 - DNA, 426 bp, Klebsiella oxytoca
atggcgatgcattttaacgaaaacctcgatgataacggcgaaatgcacgatatcaacgtgacgccgtttatcgacgtcatgctggtgctgctgatcatctttatggtggcggcgccgctggcgaccgttgacgtgaaggtcaatctgcctgcgtcctccagccagccgcagccgcgtccggaaaaaccgatctatctctcggtgaaggcggataaaaccatgttcctcggcaatgaccccattactgacgagaacatgattgcgtctctggatgcgttgaccgaaggtaagaaagacaccacggtcttcttccgtgcggataaaaccgtggactacgagacgatgatgaaagttatggataccctgcatcaggcgggttatctgaagattggtctggtgggcgaagaaaccgtcaaagcgaagtaa

SEQ ID NO: 172867 - DNA, 1419 bp, Klebsiella oxytoca
gtgaatcacgataataaactgtcatttgcggagaagctgggatacggcatgggagatgcagcctgcggtatcgtctactcttcggtaaccatgtttctgacatggttttatacggatatttacggactctccgctgccgcagtcggagtgatgttcctggtgacgcgggttctggatgcgattaccgatccgctaaccggcatcgttgcagaccgtgtgaagacccgctggggccattttcgcccgtggcttatctggtttgccgtcccttatgccgtgctggcggtaatgaccttcactactccggaatttggcgcatcgggtaaactggtttacgcctacctgacttacaccttactcatgctgtgttacacctttatcaatattccctactgcgcgctgggcggagtcatcacgcgcgatgagaaggatcgcctatcagcccagtcatatcgttttacgatctcttctctggccggtctgatggtttctgtcgcaaccctgtttctggtggattttttaggtaaagaaaataagcagtttggttttcaggcgacaatgggaatcatgggcgcgatcgctattgtaatgctggctttctgcttcttctctactaaagaacgcgtggctccagcggttgaacagcaggggagcatacgcgaagatctccgtcagcttctggcgaatgaccagtggcgtattgtggcgataatcacttttttctcgagtatggccggggttatgcgcagcgccgccacgctctattatgcaacctacctgatgttaggcggcgtggagtccgcggcgggaacagccatgaaatcagcatttgtttccaccagcgtcgttggcacgattatcggcagcatcgccgccggatggctggccaagcgctatcgcgcggtctcgctgtttaaaaatatcaacctcctgctggttctggttggcgtcgtaatgttctttgtgccgccgacctggctgccggtggtgttccctttatactttctggtcggcttcttccatcagatgtaccagccgtttaaatggaacatgatggccaacgccgccgattatggcgaatggaagtttggtcgtcgcatcacgggattatcttattccggtaatctgtttgctttgaaaatgggcatggcggttgctggtgccgccgtaggtttttcgcttgggctatttggctatcaggcgggcgtaacggcgcagactccgctggcgacaatgggaattgttgggctgttaacgctcggtccatcactatcttacctgcttctgtggtggctggcgcgtttctataagctggatgacaaaatgatgcagacaattcagcgagagctgtccatgcgccagcaacaggcgcattcagagacgcaattgccgctaaacgccgttccggaaaaggcctga

SEQ ID NO: 172868 - DNA, 1527 bp, Klebsiella oxytoca
atgactccttctgaataccagaatcctattttatgcgccgattattccgacccggatatcgtgcgcgtaagggatgatttctttatggtctcttccagttttaaccatgtgcccgctttaccgatcctgcattcaacggacctggttaactggactattatcaaccacgttctggatgaactgccgctaccgggttatgaccggtatcagccgggtaagggcgtatgggcgccatcgattcgctggcacgatggcaagctgtgggtctgcttcagcaccccagatgaaggtatttttatctgccataccgaggacccgtgggggaaatggagcgctccgcactgcctgcgtcaggccagagggtggatagatccctgcccgttctgggacgacaatggtcaggcctggttggtacatgctttcgcccatagccgcagcggcattaagcataaactgcagttgtttgcgatggtgccggacgccagcgaattactgggcgaagggcagattatctatgacggctgctgcgatttacccacccttgaggggccaaaggtttatcaacgcgccggttggtactacatctttgctcctgcgggcggggtagaaaatggctggcagacggtgctgcgcgcgcgccagatgacggggccctgggaagccaaaaacgtgcttttccagggaaacacatcgataaatggaccacatcagggcggctgggtggagggcgagaagggcgaatgctggtttgttcatttccaggacttacatctctatggccgcgtggttcacctccagccgatgttctggggtgacgacggctggccgcgtatcggtgagcagattggcagttgcggcgtcggacagccggttttacgttggccgcgtccgaaagggttaacgccttcaccggcgttggcgccgcaaaccagcgactattttgcgcaaggccaaccgggaatacagtggcagtggcaggctaaccccagccctgagtggctgctgccggcggaaggcgaactccgattacgctgcaccccattatcccaagtcgatggacagagagcgttatactgggcgccgcagctgttgctgcagaaattcccggcgctaacttttagcgcgaaaacaagcgtaacgttatatgccgctcaggacggtgatgccggaggcctgatcgtatacggcgaacgctacgccgctttgctggtggagtttgggcaagggagttgccggctcgtgtggcgacacggttggatgagcgatgcgggcgttgtgcgcgaaactcgtcaggttcttgctgagcttaagcgcggcaagtgtcagctgcaggttgccgtaggcgaaggcggcttgtgtcaattttcctggcgagctgaggaggaggagtggcagggggttcccctttgttttgctgccgggaaggggaaatgggtcggtgcgaaatttggcctgctggctgcttcaatggatggcctgcaaagcgagggctactgctctttgcaggactttgaggtcatcctataa

SEQ ID NO: 172869 - DNA, 495 bp, Klebsiella oxytoca
atggaacgctttctggaaaatgctatgtacgcctcgcgctggctgctggcgccggtttattttggcctctcgctcggtctgattgcgctgaccatcaaattttttcaggagatcttccacatactgccgcatatttttagcgtcagtgagtcggatatgattctgaccctgctgtcgctggtggatatgaccctggtgggcggtttgctggtgatggtgatgttctccgggtatgaaaattttgtctcgcagctggatattaacgagggtaaagaaaaactcagctggctgggcaaaatggacgcgacgtcgctgaaaaataaggttgccgcctccatcgtggcgatctcctctattcacctgctgcgggtgtttatggatgcgaaaaacgtcccggacaataagctgatgtggtacgtcatcatccacctgacctttgtgctctcggcctttgttatgggctacctcgatcgtctgaccaaagtgaaacactga

SEQ ID NO: 172870 - DNA, 888 bp, Klebsiella oxytoca
atgacgcgattaacggccaaagatttcccgcagcagctgctcgagtattatgactactatgcccacggcaaaatcagcaaacgcgagtttctccagctggcggggaaatataccgtcggcgggatgaccgcgctggcgctgtttaatctgctgaagcccgactatgccctggcagagcaggtaccgttcaccgacccggatatccgcccggagtatattcattatccctctcctgatggccacggcgaagtgcgggcttacctggtgacgccgacgaaaatagccgacaaagcgcccgccgtggtggtggttcatgagaaccgcggcctgaacccctatattgaagacgtagcccggcgggtagcgaaagcggggtatatcgcgctggcgccggatggcctgagctccgtcggcggctatccggggaatgatgatgaaggccgcgcgctacagcagaaagtcgatcccgtgaagctgatgaatgacttttttgcggcggtcgaatttatggcgaagcatccgcaggcgacggggaaggtcggtatcaccggtttttgctacggcggcggcgtcagcaacgcggcggcggtggcgatcccggagctggcctgcgcggtgccgttttacggccgccagccgccgttgaaggaggtcgataaaataaaagcgccgctgctgctgcactatgccggccttgatagcggcattaatgaaggctggcccgcctatgaacaggcgctgaaggcgcataataaagtctacgaggcctatctctatcagggcgtgaatcacggctttcataatgattccacgccgcgctacgatcgggctgcggctggcctggcctggcaacgtacgctggcgtggtttgaaaagtatttacgctag

SEQ ID NO: 172871 - DNA, 288 bp, Klebsiella oxytoca
atggaaaatcattttggaaaaggcttaatggcggggctacaggcatcccatgctgacaccgccgcgcatgcggcgaatttttgcaccgactataaacgcgggtttgtgctcggctactcgcaccgcatgtttgaaaaaaccggcgaccgccagctcagcgcctgggaagcggggatcctcactcgtcgctatggcctggaaagagacatggtgatggacttcttcaaagagggcggttcttcgaccgcgatgcgctactttatggcgggctatcggctggaaagctaa

SEQ ID NO: 172872 - DNA, 867 bp, Klebsiella oxytoca
atgtcagagaataactaccagccacctaaagtgtgggaatggaagcaaaacaacggcggcgcattcgccaatatcaaccgcccggtctccggcgcaacgcacgagcgggagctgccggtgggcgcgcatccgcttcagctctattcgctggggacgcccaacggccagaaggtgaccatcatgctggaagagctgctggcgttaggcgttagcggcgcggaatatgacgcctggctgattcgcatcggtgaaggcgatcagttctccagcggctttgtcgaggttaatccaaactcaaaaatcccggcgctccgcgaccattccaccactccgccgacccgcgtttttgaatccggcagcatcctgctctatctggcggaaaagttcggtttcttcctgccaaaagatccggcaggacgcactgaaaccctcaactggctgttctggctgcagggcgcggccccgttcctcggcggcggctttggccacttctttagctatgcgccggtgaaaatcgaatacgcgatagaccgctttacgatggaagccaaacgccagcttgacgtgctggacaagcagcttgcccgcggtcgttttgtggcgggagaagagtacaccatcgccgatatggccatctggccgtggtacggcaacgtggtgctggggaatgtctataatgccgccgaattccttgatgccggaagctataaaaacgtgctgcgttgggcgcaggatgttggcaatcgccccgccgtacagcgtggacgcatggttaaccgtacctctggcccgctcaatgagcagcttcatgagcgccatgccgccagcgacttcgaaacgcaaaccgaagataagcgccaggcgtaa

SEQ ID NO: 172873 - DNA, 561 bp, Klebsiella oxytoca
atgagcacaccttcgcatctgaccgcccaaccgctggtctggggtcatgggccacgcacctttgaggtgttccttgaacccacatgcccctattccgttcgcgcctttaataagcttgatgacctgctggatgaagttggcgcagataacgtgacgatcaaaatacgtttgcagtctcaaccgtggcatctgttttccggcgtcatcgtccgctgtattctcgccgcgtcaaccctcccgcacggccgcgagcaggcgcataaggtgcttaaagccgtcgccgaccaccgcgaagagtttgagtttaccgaccactgtagcgggccgaatatggacgccacgccgcagcagattattgaacgtctcgaacgctacagccgcgtctcgctggccgcagcgtttgcccgccccgagctgcaaaacgagatcaaatggcatagcaaatacgcccgccagaacggcatccacgtgtcgccgacctttatgattaatggcctggtgcaggcggatctcggcagcggcgacgacgtcagcgtatgggccgcgcggattctggcttag

SEQ ID NO: 172874 - DNA, 1872 bp, Klebsiella oxytoca
atgagcaaaggttcgacaagcagtgacgccccgtttggtacactattaggctacgcaccgggcggcgtggcgatttattcatctaattacagtagcttaaatccgcaagattatccggatgacgccacgttccgcagctatatcggtaatgagtatatggggcataaatggcagtgcgtggagttcgcgcgccgctttctgttcctcacctacggttttgttttcaccgatgtcggcatggcctacgagattttctccctgcgttttttacgcgaggtggtcaacgacaatattctgccgctgcaggcgttcgccaacggctctcgtcgtccgccgatcgccggctcgctgctgatctggcagaaaggcggcgagttcaagcacacgggccacgtggcggtcattactcagctggtagggaacaaggtgaggatcgccgaacagaacgtgattcactcgccgctaccgcaggggcagcagtggacccgcgagctgacgctggaagtgaaaaatggcctctacacgattaaagacacctttgccgataccgaaatccttggctggatgatccaaaccgccgataccgaattcagcctgccgcagccggtgctgccgggtgaggcgatggcgattaaaggcgcgcggttgccgaacaaaggccagtttcgcggcaactggctcaacgagaaagattccctgcaaaaagcctatgtcgaagccaacggccacgtcatcaataaagacccttaccagtatttcactattaccgaaagcgccgagcaggagctcatcaaagccaccaacgagctgcatctgatgtacctgcacgctaccgacaaggtgatgaaggacgatagcctgctggccctgtttgatattccgaaaattctctggccgcgcctgcgcctctcgtggcagcgccgacgccatcatatgattaccggtcgtatggatttctgtatggatgagcgcgggctcaaggtgtatgagtacaacgccgactccgcgtcctgtcataccgaaggcgggctgatcctcgaacagtggctgaagcagggctactgcggcaccggccataacccggcggaaaacctgctcgatgagcttgccggagcgtggaagcacagccgggcgcgcccattcgtgcacatcatgcaggataaggatctggaggagaactaccacgcgcagtttatccagcgttcgctgacgcaggccggtttcgagagcaaaattctttacggccttgatgagctgcgctgggatgccgccgggcagttaattgatgccgatggacgcctggttaactgcgtctggaaaacctgggcatgggagaccgccattgagcaggtgcgcgaagtcagcgccgacgagtacgcggcggtgccgatccgtaccgggcaccctgataatgaagtgcgtctgattgacgtcctgctgcgcccggaagtgttagtcttcgagccgctgtggacggttatccccggcaacaaggcgattttgccggtgctttggtcgctgttccctaatcatcgctatctcctggataccgattttgtggtcaacgagcagctggcggaaagcggctatgcggttaagcctatctcaggccgctgcggcagcaatatcgatctgattggcccgcaggatgaagtgctggataaaaccagcggccagtttttcgatcgcaaaaatatttaccagcagctgtggtgcctgccgaaggtggatggcaaatacatccaggtttgcacctttacggttggcggtaactatggcggtacctgcctgcgcggagacgattctctggtggtcaaaaaagagagcgatattgagccgctaatcgtgctaaaagacaatgatagccgttaa

SEQ ID NO: 172875 - DNA, 1182 bp, Klebsiella oxytoca
atgcacgatcggcgactcgccgcccgcgcgggtgaacttaagccctccgccgtccgcgaactcctcaagcacagtaaactgcccggcgtgatctccctgggcggcggcattccggctccggagctttttgataccgaaggcctgaacctggcggtgcagcaggtgatgaacgggcgctttaatgatgcgttccagtacggtttgaccgaaggttatccgccgctgcgtcaggccgtcagcgaactgtgtcaggcgcgcggcgtggactgcccggcaagccacgtttatatcacttccggttcgcagcagtcgctggatatcgtcgcccgcacgctcctcgatccgggcgatgcgattgtcgttgagcgcccgacctatctggcggcgctgcaggtcttccagctggcgcaggccaatattctcagcgtggataccgatgatgacggcatgctggtggaacagctggccgatctgctggaaaccacgcgcgtgaaagccgtttacctggtgccgacgtttggcaacccaggcgggaagaccctcagcgaagcgcgccgtcgtcgcctggttgagctggcgaaaaagcacgacttcgtgatcattgaagacgatccgtacggtgaaatcagcttcaccgatgaagtgcgccgtccgctgtatcagcacgcggttgaactgggctgtgtcgatcaggtggtgtatacctccaccttctccaagatcctcgcgccggggatgcgtattggctggatcgtgatgccggactggctggcgcagcagacggtgatcgtcaagcaggcggcggatctgcacaccaacatgctatcgcaggtcatcactgcggaatacctgagcatgaaccgtctggaaaagcagattgccctgatccgcgaagattaccgcaagaagtgcgtggcgctggccgacgcgctggaatcgcagcttggcgagcatctggagttcagccgtcctaaaggcggtatgttcctgtgggctcgcttccgctatccgttcgataccatggaatggatgaagaaaacgctggaaaacggcgtggtctacgtgcctggggaagcgttctataacgacaacccggatacccgcacgctgcgtctctcctactctacggtgtcggctgacggtctgatgaccgccgtcgagcgcctggcgaaatcgctgtaa

SEQ ID NO: 172876 - DNA, 189 bp, Klebsiella oxytoca
atgcctactattaccgccagtagtatgaaagaagcaaaagagttaatgaactgtggcaaatacagagaaatcgttctcaatttcgatattgatgctgacgatttcttcaccctcgccacctcacaatcagccacaaaagtgaccattacggacagaaacaatcgctcatcggtaaaagcagaaaaataa

SEQ ID NO: 172877 - DNA, 339 bp, Klebsiella oxytoca
atgctgaagaaactcgcttttattatcccgcttatcgcgcttatcgccctgcttatctggtggttcacgccgcgctactccgcagaggacgaagcgtactaccgctccgttttctgcgtgatcgaccaccaggatagccagacatttctccgcgatatggaaaatatcattgaaggcggcaattcagattatgcgctgcataaagcccattacgttcccgcgctgggccagcggatgctggacacctggcagcagctcactccggaagagcagaaaagcctcggccaggatcagcagcgctgccgccagctgatgagcgaaaaacagcgttcacgctaa

SEQ ID NO: 172878 - DNA, 603 bp, Klebsiella oxytoca
atgaaaatcatcgttattggcgccagcggtaccgttggccgcgcggttgcgcaagaattaaaccagcgtcatgaagttattcgcgtcggccgcactcagggcgactatcaggttgatatcacctcacagcagagcgtgcagagcctgtttgagaaaatcggtcaggtagacgcgattgtttccgccaccggtaatctgttctttggcccgctggcgaccatgaccgatcgcgatttcaaccagggcttacaggataagctcctggggcagattcgcctggcgctgaccggccagcattatcttaacgatggcggctcgattacgctgattagcgggatcgtggcgcatgagcctatcgctcagggcgtcaatgccaccaccgtgaacgccgggctggaggggtttgttcgcgccgccgcttgtgaactgccgcgcgggatccgtattaacctgattagccccactgtattaacggaatcggcggcagcctacgacggtttcttccccggctttgccagcgtccctgccgccagcgtggctcaggcctaccgtcgcagcgtggaaggcgttcagagcgggcggatctatcgggtcggctattga

SEQ ID NO: 172879 - DNA, 900 bp, Klebsiella oxytoca
atggataagctacgggcgatggagacctttattgcggtcgtggagtgcggcagctttaccgacgccgcggcgcggctcgagatgtcggcggtgatggtcgggagatatatcgcgctgatcgaacggcagcttaatacccgtcttcttgagcgcaatacccgccgccagagcctcaccgacgccgggcgggtctattttgacgaggcgaaacgcgtcctggagcaggtttcaatcgctgaaagcgcggtggagaggctgcggatcgcgcccgcgggcacgctgcgggtaagcgcgccgacgtcgtttggcgcctgcgtcattgctccgctgaccgccacgtttctgcaggcatggcccgacgtgcgcgtggagctggatctgactaaccggatggtcgatctggtggatgaggggttcgatttggcgatccgcatcggcgagatccgcaatagcgatctggtggcaaaatatctcgcgccctaccggatgacgatctgcgccgcgcccgggtatttagcccgctacggtacgccgacgacgcctgctgacctggccgatcacctctgcttgtcgcatacggtgtggaccgcgcgcaatgagtggaagctgcctggcgccgaggagggtgtccgctggaagcgcgatgccgtcctgcgctgcaatgacggctatgccctgcgaacggcggcgatcgccggggccggactggtgttgcagccggaagtcctgctggccgatgcgctggagagcggtaaactggtgcgcgtgctggaggcgtataccccgcagccgaggccggttcacctgctctggcggcaggatctgcggccgctgccgaagctgacgcgctttgttgaacatcttctgcaggggcaacgccagaacgggcggaccgcttaa

SEQ ID NO: 172880 - DNA, 1146 bp, Klebsiella oxytoca
atgacaaatttgcataccctgagcgtacatagcggcacatttaccgatgaacacggcgcggtgatgccgcctatttatgccacctccacctttgcccagcccgcgccgggccagcataccgggtacgaatattcgcgcagcggcaacccgacgcgccacgcgctggagacggcgattgccgacctggaaagcggcacgcgcggctacgcctttgcttccggccttgcggccatctcaaccgtgctggagctgctggataaagacagccacctggtcgccgtcgacgatgtttacggcggcacataccggctgattgaaaacgttcgccgccgcagcgccggcctgcgggtgagctgggtgaagcccgacgatctggcggccatcgaagcggctattcaacccgacacgcgcatgatctgggttgaaacgccgaccaacccgctgcttaagctggccgacctcagcgccatcgccgccattgcgcggcggcacaatattatcagcgttaccgacaacaccttcgcctcgccggccatccatcgtccgcttgagctgggctttgatatcgtggtgcattcggcgaccaagtaccttaacggccactccgatgtggtcgccggactggcggtggtcggcgacaacgccgcgctggcggaaaagctgggctatctacaaaacgcggttggcggcgtgctcgatccgttcagcagtttcctgacgctgcgcggtattcgtaccctggcgctgcgtatggagcgccacagcagcaatgcgctgctgcttgccgagtggctggagcagcagccgcaggtcgaaagggtctggttcccgtggctggcctcgcatccgcatcatcagctggcgcgcaggcagatggcgcttcccggcgggatgatttccgtggtggtcaaaggcgacgatggctacgccgagcggatcatacgcaagctgaagctgtttacgctcgcagagagcctcggcggcgtggaaagcctggtgagccagccgtttagcatgacccacgcatcgatcccgctggagcagcgtttagccaacggcattactccccagctgattcgtctgtcggtagggatcgaagatccgcaggatctgatcgccgactggcgccacgcgctgcgcgactaa

SEQ ID NO: 172881 - DNA, 1371 bp, Klebsiella oxytoca
atgtcagtttttcattccgttagcgacctgattggtcatactcccctgctgcagcttcataagctggataccggcccctgcagcctgtttctgaaactggaaaatcaaaatcccggcggctcgataaaagaccgcgtcgcgctatccatgattacgcaggcagagcgcgaaggaaaattaaaacccggcggcacgattatcgaagccaccgccggcaataccggcctcgggctggcgctgatcgccgcgcagaaaaattatcgcctgatcctggtggtgccggacaaaatgagccgcgagaagattttccacctgcgcgcgctgggagcgcaggtacagcttacccgctcggacgttaacaaaggccatcccgcatactatcaggactacgcccggcgtcttgccgacgaaacgccaggcgccttttatatcgaccagtttaataacgaggctaacccgctggcgcatgccaccaccactgccccggaaatcttccggcagctggagggcgatatcgacgcgattgtcgtcggcgtcggctccggcggaaccctcggtgggctacaggcctggtttgctgaacactccccgaaaacggaatttatcctcgccgatccggcgggctccattctggcggaccaggtcgaaaccgggcgctacggtgaaaccggctcctggctggttgaagggatcggcgaagactttattccgccgctggcccatcttgacggcgtccgcagcgcataccgcgtcaccgatagcgaagctttcgccaccgcccgccagctgctgcaggttgaaggcattctggcaggctcctctaccggaacgctgctcaccgccgccctgcgctactgccggtcgcagacatcccctaaacgcgtggtgactttcgcctgcgacagcggcaataaatatttatcaaagatgtttaacgatgactggatgcgccagcagggctttttaagccgcccttcgcgcggcgatctcagcgattttatcgctctgcgccacgacgaaggggcaaccgttaccgccgcgccggacgataccctggcggccatcctcgcgcgtatgcgtctctacgacatctcacaactaccggtgctggaaaacggccgcgtcgtcggcatcgtcgacgaatgggatctgattagccacgtccagggtgacagtcagcgcttttctctgccggtcagggaagcgatgacccgtaacgtggagaccctggataagcacgcgccggaaagcgcgctgaaggccattttcgatcgcggtctggtggccgttatcgccgacaacgatcgttttcttggcctcattacccgcagcgatgtgctgaccacctggcgtaaccgactcgaacagtaa

SEQ ID NO: 172882 - DNA, 279 bp, Klebsiella oxytoca
atgctttttggccgtccggagggaaaggttgttagccgcctgggcgtgttgatttccagaatagcgcgcttttgcccggtttttcgccgaattatccgtttttacgcgctgctttatctctatttcagaaaaggattgccaaaaatattcgatagtttccagcggcaattttcaggtgccagcgaaaatatcagcgccggtataccgggacattgttcaacggaacaaattcagatggatgaattattcctgataagatgctccctctcgtttcaataa

SEQ ID NO: 172883 - DNA, 1389 bp, Klebsiella oxytoca
atgaataaaaacgacatgagtcctttacctaccaatacccacgagtggttttttaatcgtaacagcatcatcattttgctcgatattgttctgtttatcgttctctacaacacgctaccctatgagccgaaggtggtcatgggactgagtatgctcgcttttatcgccgtattatggttaacggaagcgctgcacgtgaccgttacggcaataatggttcccgttatggccgtgctgttgggggtatttaatacccaggcggcgctaaacagtttcgctaactctacgatattccttttcctcggcggctttgctctggcggcggcgatgcatgtgcaggggctggataaagtcattgccgataaagtattagcgatggcgaggggcaaaatgagcctcgcggtctttatgctgtttggcgtgacggcgctgctgtcaatgtggatcagtaatacggcgacggccgcaatgatgatgccgctggtattggggatcctgagtaaagtcgatggcaaaaacagccattcgacctatgtgtttgtgctcctggggattgcctatagcgccagcattggcgggatggcgacgatcgtcggcagtccaccgaatgcgattgccgccgccgaggtggggctctccttctttgactggatgaagttcggtttcccggcaatgatcgtcttactgcctgtcgctattgcgattctttacctcgtgttcaggccggaacttaagggaacctttgaaacgaacactgaacaggtcgattgggataaaggcaaagttgtcaccctggctatttttgcgcttaccgtattcttctggattttcagcggacccattaacgacctgctgggcggttttaaatccttcgataccattgtggctttaggcgccattatattagtcaatttcgcccgggtggttcactggaaggatatagaaaaaacggctgactggggcgtgctgttattattcggcggcggtatctgcttaagtaatgtgttgaaagagacgggcaccagtctgttcctggcaaaccagattagcgggatggtggctcatatggggatatttattattatcctggtgattgcaacattcgtggtgtttctgaccgagtttgccagtaatacggccagcgccgctctgcttattcccgtatttgcctcagtggccgaagcgttcggcatgtcgcctgtgattttgtcggtattgattgccattgcggcttcatgcgcttttatgctgcccgtggcgacgccgccaaacgctatcgttttcgccaccggccatatcaagcagcaggagatgatgcgcgccggcctgtttttgaatattgcctgtatcgtcgttttgaccggttttagcatgttgttttggttataa

SEQ ID NO: 172884 - DNA, 1173 bp, Klebsiella oxytoca
atgaagtggtttgtttttatgttcgttactaccgtaacggcactcaccgtcacccccgaggttaaaagcggatcgtttgatccagtaaccggcgcttatactaccgatccgataaccgtcacgctgacgccaaagaccgttacggccagcgcgtcggtaatccctgacggtgaaaaagttttttgggcacccgccatcggtagtggtaattatgttcaagaaaatgggctgatttactggggatcgcatacttatagcatgacaagtaacactgtcgccacagctgccgccgcctcaattaatgccaggggaacctgtactgcaaccgccagcggtgcatctcttaccataaacggctgcttcacctttaaggtcaattacgatatacgcatgggcaaaggtgccacatgtaaatcttttttcggttcggggaatgaaccatacgttataagttcgtttggtactttcgttcaattgaaatctaataataatgggtcacaaagcactcgatccttgacccgtccagattcagcaaatgtcggtgtaacaacgcttacttacccacgtcagactttcacgacaatgccatcatcatcctcctacgatacaaatctgcaggctacactttctgccgcaacgccaccaagtgtctttctttactgcactgtaacgcaaggcgcccttacatctttggccagtggatcgacaatcagccattcttttatactggtgccttcaggcaaacgacccgcctacgccccgacgatcagttattcaccggccttacctatcaccaatactatcgccgttaatatccgcaatattgctgcgatagaaattctccccagcacggtattcaacaccggaactatctccgcctggcgcacaacctatatggaacaaccgcttaccgtaaccggacagggccatataacccgcaattttggcgcatcggaaaactttaacgttcttgaatcatggagctgcgcgacaacagggcaaatcgactttcgaataatgcgcgacaataccaacgccaacgtctgttcgggcgccacctatacccaccccgtgcagacgccacagtcgttgacggcgcagtggaaagcgcaaagctcgaacgcctcaggcgcctggagcgccagggcaacggtcacctttacgctaccctag

SEQ ID NO: 172885 - DNA, 2523 bp, Klebsiella oxytoca
ttgcgacagataaatttcactgcgaaatatacatcccttttgattatcattacgcttctgaatgttcctgataaatcttttgcggatgagtattttaatcctgccttgcttgaggttcgggatggtgtttcagagcgtacaaccgacctctcggtctttgaagtcgccaatggtcagcctgcgggaaaataccgggtcgatatctcagtgaataatgagatggtgaccgccgaggcccgtgacgtgatgttctcgaaaactgctgatggcaagctggaaccctgcgttaccctggaggaactcacccagtgggggattaataccgccccgtttccagagctgcaggacagtaacagcgaatgcattaagctggacgctattccagacgcgtttactgactttcagtttaaccgacagcggctaaacctgagcattccccacgcggcattaaaggcacgcagtcaggatgaagtgcccgtcgagctttgggatgaggggattcctgccgtgttactcaattacagcatgaacagttatcagagccagtataacggtgctgatacctataaaagtacgtacctcaacctgcggccgggaataaacatcgggccgtggcgtctgcgcaactacaccacctttgagcatagtaatcagagtggaagtaaatgggacaacgtctacagctatcttcagcggaatattatctctttgcgaagccaactgacgttaggtgacagttccgccccttctgatgtcttcgatagcgtaccgttccgcggtgttcaactagcctcagatgatgacatgctgccttccagcgtacgcaactatgcgcctgtagtgcgggggattgcccgcagtaatgcccttgtcaccatacgccagaacggatacgtggtttatgaaaccaaagtggcgccgggagcatttgaaataacggatctcgcctctacaggcggggcaggcgatcttgacgtcacgattaaagaagcgaatggaagcgaacaacatttgattatcccctatgcctctttgcctgtgctgcagcgcgaagggaaatttcgttatagcgtaacgggcggtcagtttcgcgcctatgatccgcaaacggaaaaaaatctgtttgtgcagggaaccggtatttatggtctcccgctcggttttacgctgtacggtggggtgcaaaacgcaggcagcaaataccagtcttacgctctgggcgtgggcaagaacatcggcgcatggggcgctttttcagccgatgtcatccactcggtgtcagcgccgacggatacgggcaggcaacagggtcagtcgctacgggtgcgctatagcaaaaatttcctgcaaacgggaacaaacttcaccatcgccggttatcgctattcaacctccggatttcgctcgctggaggagacgctcggcacctacagaagcgatagtaacattccatcatatgttactgaccgccgtcgtaaccgggctgagctgtcggtgaatcaggatcttggcgccaattttggcgcgtttaatgcctccttgatcagtgaggattactggcataacaaacgtaacagcctgtcggcgaacctggggtactacaaaaacttcaacgccattggcatcagtttgaactactcctggaaccgcaacaccggcctgtatggccatgccgatcaggataatgttgtctcttttgaaattaatgtgcctctggataagttcctgccccagacttacgcctcctatggcacaacccggacgagtggaaacgggaccagccataacctgaggctcaacggctcggcatttgatgatggcagccttgactggggcatcaacgccactcactccagccataacgaacaactggtaggagcaaatgccaactggcagacaagctatggaacggtaaatggttcttacagccacagccgtgatacccggcaattggggtacggcatcgccggcgggctcgtcgttcatgaaaatggtatcaccctgtcacaacccttaggtgaaaccattggcttggtaaaagcaccggatgccgaaggcgtcggtatcaataactatagcggcatcactacggacagccgcggctatgcggttgttccttacctgaccccgtaccgccgcaatgatattagcctgaatagcaagaccctgcgggacgataccgatatcacctatatgaccagtaaagttgtccccacccgcggggcactcgtcagagcagagtataaaacggccattggccaccgcgtcctgatgacgttaacgctgcccggcggcaaaccaatcccctttggggcggtggtatcgctgcttaaaacagagggaaacacctctattgtcggtgacggtggggaagtattcctgagcggtttaccgcaaaaaggaactctgcttgtgcagtggggcaacggtcaggggcaggaaacaacctgtcaggctgattatatcgcccgtaaacccgctggcgcatccggtctctggagcgcgacgagcgtctgtcaataa

SEQ ID NO: 172886 - DNA, 699 bp, Klebsiella oxytoca
atgaaagcgttcctttttttatctttatttttggcttcagtctcagttagcactagcagcgttgcagctgtttctgtcgggggcactcgtctggtttttaacggcaatgaaaaagaggcttccattactgtcagtaactcaaacaaagggattccggtacttattcagtcctgggtagaccggggggagcatgacaaatctaaagctccatttacgatcacgccaccattgtttcgcctggaaccagggcaggataataccttacgcgctatttacagcggcgaacgactcccggatgatcgcgaatctttattctggctcaatattaaaagcatcccgtcaattaaaaaagaggacatgcgcgaaaacactttacagctggcgattaaaaaaaggctgaaatttatttaccgccccgcatcaattaagagtataccggaagaaagcgccagcctgcttagctggaaaagagtaggtaatcagattcaggttactaacccaacgccgttttatatgaactttgggatgatcaaggtaggaggtcagatgtttaagcctgtgctccctgaacaaacctatgtagcgcccaaatcagagctgttaattactattccatccggtgcggccagcaatagtgttgactggaaaataattaatgactacggaacgagtggcaaagagtttcacgccacatattaa

SEQ ID NO: 172887 - DNA, 519 bp, Klebsiella oxytoca
atgaaaaaattatcagcagttgcgtttgcatttggtctgttatctgtgtctgcatctcaggcactggctgcagatgccaccgttaacttcagcggaaccattcttcaggaagcctgtagcgtagctacctcgaataatactgtaaacgttcagctcggcacattcggtatcgcgcaattcccgactgtgggaacgacgaccctcccggttcctttttccattaacttaacgggttgtccggcatcaggtggtccgactgccgcgctggttaccttttcaggcgcagcggatgcggcaggcgacctggcactgaacggcggtggcgcaaccggtgtatcgattaatatcaaaaaggctgacggcaccaatatcgatattaactccgccgattctggtattgcgttgacatctgccgctacgcagcagctcaactttacggctaattatatcagtacctcagccgctgtcaccgcgggccaggctaacgccgtagcccaggtaaatatctcttatatgtaa

SEQ ID NO: 172888 - DNA, 363 bp, Klebsiella oxytoca
atgagtaagattataaggcacgaaattaatgaaagctgggcaatatccggagtggtcgaatcctgtggtttggtctttgtgagttactgtattggtaacatcgggaagcccatcgaggaacagataaatggcgctttcgataatttgagcgaaaggcttaacactatcggcctgacgctggagtcagtcgtaaaaattgatgctctgtttcgcgacgtatggaatatcccattaatggaaaaagtcatgcgtcagcgattcaacggccattatcccgccagaaaatcaattcaaaccgagtttgcccatgctggcggggccacaggtatgctctttcagcttgatgcgattgcctgtcgttaa

SEQ ID NO: 172889 - DNA, 405 bp, Klebsiella oxytoca
atgttttcttatattatgctgggaaccaatgaccctcaagcttcctataaattttatgcgcctttgatgcgcgtgcttggccatcctctcgatgggcgtaacgaaaaaggcgccgcatggggaacgttcaaagataatcatactaccggattatgcgttggaatgccgtttgataatctccccgccacccgaggtaatggcgtcatggttgcattgaatgcggtatccgttgaaatgatccaggaactttatagattagcgattgagaatggtggcgaagatgaaggcccaccggcttttcgtccgcactacggcgctgatttttacagtgcctacgttcgcgatcctgacaaaaacaaaatcgcttttgttttttacgacccggcaaaaaaagcgatggtttaa

SEQ ID NO: 172890 - DNA, 825 bp, Klebsiella oxytoca
atgtattggatcataaacaaaaatatagaattttggcctgaaaataagcggttaatctcgttgaaaaacccggcgctgagcgtcacattgacggctccggcaagccactgtcttgttcttttactggaagcctcaccggagctggtcagccagcagactttttttaaaaaagtttgggaagatgaggggatcctggttcctgcaaataccttgtatcaaaacatatcgattgtcaggcgcggactgcgcgatgtcggagaaacggataactcattagtcgtgacggtgccgcgtaaaggttttcatatcaatgccaacgttaacattgaaaaacgtgaaaaaatatctttagattcagtaggttctgctgatgcatctctcgcggtgcaggatagcgttgcgggaaaaaaagcaaccactgaatctgtggctaccgtgcatacggctgataagaaaaacgcccgctcaaaggctgtcacactcttgattatggcattgagtttactggcgggctttttttctctgcattacctctggcactttaatgatgaaaagcccttttttagcagctatacattagttgaaagcgatcgcggatgtcatttttataccatagatgataatcatgccagcattgataaatttaatagttataagtcactgattttcaaatccggactggactgtaagaagtatccctttgtttatttttccatgtcgcagatgactccaggttttatagtgtttatttgcaggaaaagctacaccgcgaaggcttctgccggatgtgttactctctcttttcgtggaattgtacatgaatag

SEQ ID NO: 172891 - DNA, 474 bp, Klebsiella oxytoca
atgaatagaataaaaattatgattggcttttttatttctggcgctctggcaggggggatctataattttgtgaacgataaaatacatcataaggaagagtgtacggcatcgctcgtggtcttcaaggataatacacaaactaatttgaccttaaatttcatgtattcacttgctgaaggtaagggtaccgttgcggtcagcggtagctatctggatggcgggaaactgcagggccatatcagaagagatgtcatctatgatatggtcaaaaatcatgaaactcaccatttccactccagagaaataaaccgatacggtaacattgactctgtgtcggatgagttcctggccagcatcctgcctgacttttacgtttatccaaatgaaaaaataagctatattatttcaaagcaaaatgagcatagctttctgataaaaattgggtcacgaccgctactgtattgtgctaattaa

SEQ ID NO: 172892 - DNA, 549 bp, Klebsiella oxytoca
atggctatcttcatcatcagcaataaccagtatcttcgagatggcattatctgtgtcggacaatataacgcgatggaaatcaaaagctgtcagtgtgacgacccgcaactcgatcgtttaaactatgaagatattgttatcctgcatctgagtttagaaaacaaatgcaacgccagcaaactttcctcgttaaaccagcgatgcaaagtattactgattctgagttcgtcgcagcatgcactcatctgtgatgcagataccgtgataaatgctaaagcgccgccggaagtcataatgaaagcgctccgctgcctgatcagacgggttaagtgtaaaccgaccaaaaaccagcgcttaagcaaaattgaaaaaatcattctcaacaaaagccttgaaggtaaagatacgcatgttatcgctgaatctctatcgctcaccagtaagatcgtcagcaattacagatatgtggcctgtcgaaaaattggcgcagggaagctaactgatttactcattataaaagaccatttaaaggacgattatgccagataa

SEQ ID NO: 172893 - DNA, 879 bp, Klebsiella oxytoca
atgaatggggttatggaacttgaattctggatgcgtgttgccattggtgaagctgaagagagtttgcgtgaggggaataaaggttttggcgccgttatcatcaaggatggtgagatggttgcggcggcgcatgactatgaggaaacagagggagacgcaacctcacatgctgaaatcaacgcgattaagattgccagccaaaaaattggcaaaaatttaaacgggtgcatactgatatccaccagtgagccttgtcctatgtgcgcatttgccatcacctggtccgggataagcgaaatagcttttggtttttctattcaggatgcacttgctcaagggcggcggcgaattgcatttcagtgcgtcgaggcttttgataaggcgagcacagaggttattgttcataaaggtattctgcggcgggaatgcgcaattctctatcgtgctgacgttcgccgcgaaattaatcatctgcgcaacgcaaccgatgaagaccttaaggcgctgaacgcggattccattgcccgccgtactgcatggttctgccaaaataaagccgggttgaatattggcgatagccatttattagacaccgcacaccgcttacttataatgcgattccacgctgcagaggtcgaaatgcccgtggtgaacagaacagagaagcaaattactttccactctatgaatttctgcccaacgcttgaggcatgcagaattctgcgccttgatacccggcacgtttgcaaactcctgaatgaagagtccaccgatatgttagtgaaaaagatagatagccgacttcgcttctctcgaaattataataacctcagaccatattcctctttctgcgaagaatctatttctattgaggattga

SEQ ID NO: 172894 - DNA, 894 bp, Klebsiella oxytoca
atgaaattaatcgacttgcacatgcattcggcatatagcaacgatgccgatttcccggtcagcgatctgcttaccatggctaaagcggcgaatcttgcggccctggcgataaccgatcacaactcggcgcgatccgttgaggagtctattcgctatggcagagcaaatagcgtaagcgtgatgaccgggattgaaatcgactgcgcgtttgcgggcaataattatcatctgctgggctacggttttcgtcgagacagccgggattttgatgccgtcgaacacaacttccatcgtctggaaactgccgcgacgccgctaaagctggagaaactgcgggcgctggggttccagcttgatgaagatcgcctgtatgccatggccggcgatcgggtcccgcaggaagaggagatggcagaacttattttagaggatgcgcgcaacctgaatcatgatctgctgctgccttaccgcgcggggaatgcgcgcagcgatatgccgttaattaactttttttgggacttttttggccgaggcaaaccctgccaggtgacggtggaattgccgccgatggcggagatggcggcgctgataatcgacaacggcggcattccggtcattgcgcatatcggcgctaacgtgaaggaaaagccgctggcggtgattgaacagatgttgccacttggcgtacgcggcgtggaagtgttctccagctatcatgatgaggagctatgtcgcgaactttatcactacacgctggataaatcgctgctggcgacctgcggcagtgactttcatggtaaaaacaaacccaatattaagcctggcgactgtagaccatggcgtgacgcgctaccgaaaaccctggaaatcctcgagcaggttgatctttattga

SEQ ID NO: 172895 - DNA, 912 bp, Klebsiella oxytoca
atgctgagtaacggagcaaaagattataaagctaagctatttgaaaatcatgatgaaaatattcattttcttttgaataccccactctcccttcagcgccaggtctgggagtctgcagccataaaggcaacactacctgcgggtgtatgcatcgaaacggttaacgatacagagataactgcggaatggatttcatatcccgattcgataaataccaggattattctctatttccacggcggtggaaattctcagggatcgtgtctgactcacagaaaactcgctgcctgtctcgcacaatattctggttgtcgaactctggtactggaatatcctctggcgccagaaaatcgatttcctgcggccttattaaattgtcatcaggcctatttatggctgcttgctaatggttattcagcagaggacattatcctcgcgggagactccagcggtggtggactggtcatgtcgcttttactcctgttaaaacagcatcaagatcctttgccggactcgtctgttctgctgtctcccatgttagatttcacactttctggtaagagcataacgctgtgtaaggatctcgatccgctgctttgcatagaagacctgataatgactgtgaaatactactgttcggacagtgaacgaagcgatcctcttgtctctcccctgtttggtgatttgtctggacttcctcccgtatttattcaggtgggaagcgaggagttattgcgcgatgatgcattacgcctctcccgatatgctaaaaaggctgggatgcaagttgagcttgagatatgggacgggctctggcatgtatttcagtcatcggtaggaaaggtacctgaagcggatgaggcgttacaagccgtagctaaatttatccgaaggagagagtcattgtcgtga

SEQ ID NO: 172896 - DNA, 717 bp, Klebsiella oxytoca
ttggttacagggccatttattaacgccggtgcggtccttctgggcggcgtacttggcgcactcttaagtcaaagattgccggaacggattcgtacatcaatgacctctatttttgggctggcgtcgctgggcatcggtattctactggtgatcaaatgcgccaacctgccggtgatggtgctttcaacgctggtgggcgcgctgttcggcgaagtatgtaatatggagaaaggcattaatacgctggtgagtaagcttcagcagctgctttcgccaaaaaagggccagataaagagttcggcgcatgagtcgtatattcaaagctacgtcgcgattatcgtcctgttctgcgccagcggaaccgggattttcggcgcgatgcgcgaaggaatgaccggtgacgccagcattctcattgccaaagcgtttctcgacttctttaccgccaccattttcgcctgcaccctggggctggcggtctcggccattagcgtgccgatgctggccatccagctggcgctggcggcctgcgcatcgttgattatgccgttaaccacgccgatgatgatggcggatttcagcgctgtcggcgggatgctgctggttgccaccggtttgcgcatctgcggaattaaaatgttcgccgtggtgaatatgctgccggccctggtgctggcgatgccgatttcggtagcctggacggcgtttttcgcctga

SEQ ID NO: 172897 - DNA, 2187 bp, Klebsiella oxytoca
atgccctggcctaagccttttactctccggaaacgggtattcgcgctcatgaaatcaatgcacattgccgccagccgcgagctggtatcccacctgtccacccaccgtcgcgtggtggccctggacagtactgattttaccgatgtggcggcagtcgtcattaccgtggcggacagccgcagcggcatccttgcgttgttgaaacgcacgggctttaacctgccggtctatctgttcagcgaagctgaccacgaaaaaccagaaggcgtgacggccatcgttagcggcaaagagcaggagtggctcgaactggaagccgccgcctgcgactatgaagagaacctgctgccgccgttcttcgatacgctgactcagtacgtagagatggataacagcaccttcgcgtgccccggccatcagcacggcgccttctttaagaagcatccagcggggaggcagttcttcgacttctttggtgagaacgtctttcgcgccgacatgtgcaacgccgacgttaagcttggcgatctgttgattcatgaaggatcggccaaacacgcgcagaagttcgcggcgaaggtcttcaacgccgataaaacctattttgtccttaacggtacctcggcggcgaacaaagtggtgactaacgcgctgctgacccgcggcgatctggtgctgtttgatcgcaataaccataaatcaaatcatcatggggcgctgattcaggcaggcgcgacgccggtctatcttgaagcatcgcgcaacccgttcggttttatcggcgggattgacgatcgctgcttcgatgaaaaatacctgcgcgatctgattcgcgagacggcgccggaaaaagccgatacgccgcgcccgttccgccttgcggtgatccagctcggaacctatgacgggacggtatataacgcccgccaggtggtcgataaaatcggcagcctgtgcgattacatcctgtttgactcggcctgggtcggctacgagcagtttatcccgatgatggccgactgttcgccgctgctgctggacctgacgccgaatgacccgggcatttttgttactcagtcggtgcataaacagcaggccggtttttcgcaaacttcgcagatccataaaaaggataaccatctgcgagggcaggcgcgtttttgcccgcataagcggttgaataacgcctttatgctgcatgcctcgaccagcccgttttatccgctgttcgcggctctcgacgtgaatgccaaaatccatgaaggggagagcgggcgccgcctgtgggccgaatgcgtggcgctgggtattgacgcgcgcaaagcgattatcgctaactgcaaaatgatccagccgtttattccgccaatggtcgcgggacgcccgtggcaggatcaccccaccgaaaccatcgcccgcgagcggcgcttctttagctttgaaccgggcgcgcgctggcacggctttgagggctatgccagcgaacagtacttcgttgacccctgtaagctgctgctgacgacgccaggaatcgatgcgcagagcggggaatatactgattttggcatcccggcgaccattctggcccactatctacgcgaaaacggcattgtgccggagaagtgcgatctgaactctattctgtttctgctgacccccgccgaaagcgcggagaagctggcgcagctggtggcgatgcttgcccagtttgagcagcatatcgaatcggatacgccgctggccgaggttctgccgagcatcgttaacaaatacccggtgcgctatcgggactacaccatccgcgagctgtgtcaggagatgcacaacctgtacgttagctttgaggtgaaggatctgcaaaaagagatgttccgcaagcagagcttcccgcgggcggtcatgaatccgcaggacgccaaccgcgagtttattcgcggtaacgtcgaactggtgcgcttaagcgaagcggaagggcgcattgcggcggagggcgcgctaccgtatccaccgggcgtgctgtgcgtcgtgcctggcgaaatctggggcggggcggtgctgcgctattttctggcgctggaggagggcgtcaatatgctgccaggcttctcgccggagctccagggggtctatagcgaaacggactctgacggcattaagcgtctgtatggctatgtgctgaaagcataa

SEQ ID NO: 172898 - DNA, 1257 bp, Klebsiella oxytoca
atgaatcttaagctgcagctcaaaatactgtcgttcctgcagttctgcctctggggaagctggctgaccacgctcggctcatatatgttcgttaccctgaagtttgacggtgcggccatcggagcggtttatagctcgctcggtatcgctgcggtatttatgccgacgctgcttggtatcgttgccgataaatggatcagcgccaaatgggtttacgccatttgccatctggtcggcgcgctgacgctgtggctcgccgctcaggtcactacgccgggcgagatgttcctcgtcatcctgcttaactcgctggcctatatgccgacgctggggctgattaacaccatttcctactaccgcctgcagtctgcgaacatggatatcgtgaccgatttcccgccgattcgtatctggggcaccatcggttttatcctcgccatgtggggcgtcagcttctccggctttgagctgagccatatgcagctctatatcggcgcggcgctctccttgctgctggtgctcttcactctgacgctgccgcatattccggtagccaatcagcagaaaaaccagagctggaccgccatgctgggccttgatgccttcgcgctgtttaaaaacaaacgtatggcgatcttctttattttctcgatgatgctgggcgccgaactgcaaatcaccaatatgttcggcaacaccttcctgcacagctttgataaagatccgctgttcgccagcagctttatcgtgcagcacgcctcggtgatgatgtcgatttcgcagatctcggaaaccctgttcattctgaccatcccgttcttcctcagccgctacggcatcaagaacgtgatgctgattagtatcgtggcgtggatgctgcgcttcggcctgttcgcttacggcgacccgactccgttcggcaccgtgctgctggtgctgtcgatgatcgtttatggctgcgccttcgacttcttcaatatctcggggtcggtgtttgtggaaaaagaggttcgcccggaaatccgcgccagcgcccagggaatgttcctgatgatgaccaacggtttcggctgcatacttggcgggatggtgagcggcaaagtggtggagcactttaccgtcgaagggattaccgactggcaaaccgtatggctgattttcgccggctattcgctggttctggcgtttgctttcgtcgcgctgtttaaatacaagcacgttcgcgtaccagccggtgcgcagaccgtcgtacattaa

SEQ ID NO: 172899 - DNA, 1083 bp, Klebsiella oxytoca
atgaaaaaatacttagcgctagcgctgattgcgcctttgctcgtttcgtgttccagctcaaccaaaaaaggcgccgagtataacgaggcgtgggtgaaggacaccaacggctttgatattctgatgggccagttcgcccataacatcgagaacatttggggttataacgaagttctgctcgccgggccgaaggactacgtcaaatacaccgaccagtatcaaacccgcagccacatcaactttgacgccgggacgattaccgtcgaaaccatcgccggcaccgacccggccgggcgtctgcgccaggcgattattaaaaccctgctgatgggcgacgaccctaactccatcgacctctattccgacgtcgatgacattcagatctcaaaagaaccgttcctgtatggtcaggtcgtggataacaccggtgagtcgattcgctgggagtggcgcgcctcacgctttgcggactacctgctgcaaacgcgtctgaaaagccgcagcaacggtccgcgcatgatctacagcatcaccatcaacctggtgccgaaccatctcgacaaacgtgcgcataaatacattggcatggtccgtcaggcgtcgcgcaaatatggcgttgatgagtcgctgatcctggcgattatgcaaaccgaatcgtcctttaacccctatgcagtcagccatgccgacgcgctggggctgatgcaggtggtgcagcacagtgccgggaaggatgtgttccgctcgcaggggaaatccggcctgccgagccgcagctatctgttcgatccggccaataatatcgataccgggaccgcctatctggccatgctgaacaacgtctatctggccggtattgctaaccccacctcgcgtcgctatgcggtgattaccgcctataacggcggcgctggcagcgtgctgcgggtcttctccagcgataagattcaggccgcgaatatcatcaataacatgacgccgggcgacgtttatcagaccatcaccagccgtcacccgtccgccgaatcgcgccgttatctctacaaggtaaacaccgcgcaaaaaggctaccgccgcaagtaa

SEQ ID NO: 172900 - DNA, 276 bp, Klebsiella oxytoca
atgagcagaacgattttttgtactttcctgcagcgtgaagccgatggccaggattttcagctgtatccgggcgaactgggcaaacgtatctataacgaaatctctaaagaagcctgggcccagtggcagcacaaacagacgatgctgatcaatgagaaaaaactcagcatgatgaaccccgagcatcgcaaactgctggagcaggagatggttcagttcctgtttgaaggtaaagacgtacacatcgaaggctatacgccgccagaaaaacagtaa

SEQ ID NO: 172901 - DNA, 1059 bp, Klebsiella oxytoca
ttgacttttctcgccgcgcaattttcagcccaggtactggactggtacgacaaatacggacgtaaaaccctgccctggcaaatcggcaagacgccctacaaagtatggctctccgaggtgatgttgcaacaaacgcaggtggcgacggttatcccctattttgagcgctttatggcgcgtttcccaacaattaccgatctggccaatgccccactcgatgaagtcctccatctgtggaccgggctgggctattacgcccgcgcgcgcaatctgcataaagcggcgcagcaggtggccaccctgcacggcggaaacttcccgcaaacttttgatgaagtcgccgcgctgccgggcgtgggtcgttccaccgccggggcgattttatccctttctctcggtcagcattatccgattctcgacggcaacgtgaagcgcgtgctcgcgcgctgctatgctgtcagcggttggccggggaaaaaagaggttgagaaacgcctgtgggatattagtgaggacgtgacgccagcgaaaggggttgagcgttttaaccaggccatgatggacctcggggcgatggtgtgtacccgctctaagcccaaatgcgagctctgtccgctgaataacggctgcgtagcctacgccagtcattcatgggctcaatatccaggcaaaaaaccgaaacagacgatcccggaacgtaccggctatttcctgctgatgcagcacggcgatgaggtatttctctgccagcgcccgccggtgggtttatggggcggattgttctgcttcccgcagtttgaagatgaagatgcgctgcggcagtggctggcgcagcgccagattaaggccgataatctgacgcaattaaccgcgtttcgccacactttcagccatttccatctggatattgtgccgatgtggcttacagtgcactcatccggcgcatgcatggatgaagggggcgcactctggtataacttagcgcagccgccgtccgtcggtctggcggcccccgtggagcgcttgttgcaacagttaaaagccggagcaccggtttag

SEQ ID NO: 172902 - DNA, 720 bp, Klebsiella oxytoca
atgaaaaacgacgtcatatctccggaattcgatgaaaacggccgtccgctgcgccgtattcgcagcttcgtccgtcgtcagggccgcctgactaaaggtcagcagcacgcgctggacaccatttggccggtgatgggcgttgaatttaacgatgcgccgctcgattttgccgcgctgtttggccgtgaagcgcccatcacgctggagattggttttggtatgggcgcttcgctggtggcgatggcgaaagagaagccgcagcagaatttcctcggcattgaagtgcactctcctggcgtcggcgcctgtctggcgtctgctgaagaagagggcgtgcaaaatctgcgcgttatgtgccacgatgcggtagaagtgctgcacgcgatgatccccgataactccctgagcatggtgcagctgtttttccctgacccgtggcacaaagcgcgtcataataagcgccggatcgttcagccgccttttgccgaactggtgaaaagtaaactgaagctgggcggcgttttccatatggcgaccgactgggagccctatgccgagcatatgctggaagtgatgtcctcgcttgaaggatatcgcaaccggtcagaaagcaacgactatgtgccgcgcccggaatcgcgcccggtaaccaaatttgaacagcgtggccatcgtcttggccacggcgtatgggacttaatgttcgagagggtgaaataa

SEQ ID NO: 172903 - DNA, 327 bp, Klebsiella oxytoca
atggcaacgaatcgtagccgtcgtctgcgtaaaaaaatgcatatcgacgaatttcaggaagtgggtttttccgtcgcgtggcgtttcgcggaaggaaccagcgaagagcagatcgaccagaccgttaacgatctgattgatgaggtgattgagcctaataagctggcctttgacggcagcggctatctctcctgggaaggcctgatctgcctgcaggaaatcggtaaatgcaccgaggagcaccaggccattgtgcgtaaatggctggaagaccgcgggctggccgatgtacgcaccagcgaactttttgatatctggtgggactaa

SEQ ID NO: 172904 - DNA, 717 bp, Klebsiella oxytoca
atgcgcaaaacgctgttagctgtggcgctttccgtcaccgctttgtccgcgcatgcggactaccagtgtagcgtcacgccgcgtgacgatgtcatcctcagcccgcagcaggtgcaggtgaaaggcgaaaatggcgatctggtgattaagccggacggcagcctgagctttaacgggaaagcgtattctctgaacgccgctcagcgcgaacaggctcaggactatcaggccagcctgcgcagcagcctgccgtggattgatgaaggcgcacgctcgcgggtagaaaaaggccgcgccgcgctggataaaattattaccgaacaggtaggggccagcagcagcatgcatagccgcctgaccaagcttgatgcgcagctgaaagcgcaaatgagccgcataattgaacatcgtaacgatggcctgacgttccactataaagctatcgatcaggtgcgcgccgacggccagcagctggtaaaccaggcgatgggcggcatcctgcaggacagcatcaacgagatgggcgcgaaggcggttctcaaaggcggcggtaacccgctgcaggggatcctcggcagccttggcggcctgcaaaccgccattcaggatgaatggaaaaatcaggaagccgatttccagcagtttggtaaggatgtctgcagccgcgtggtttcccttgaggatagccgcaaagcgctggtggggtcgttaaagtaa

SEQ ID NO: 172905 - DNA, 1008 bp, Klebsiella oxytoca
atgaaatatgcatggaaaacactcaccgtcctgatgatcgcttccccttgtcacgtgctggcggatgccaacacgccaacagacgacgtggtaaaacagcagtttgctgaacagactggcgggattatgcgcttgcaaaacgtgacgctgaagcagctcgacgccaggggaaatcaggcgacctatatgctggaaggcgatatggccgccgcggaagatctctatattcgcgtcggcgtcgcgggagattactttttttatgagcgagtctggaccagggggcggccggtaaagttctccgccatgatgaccgcggtagggaccaaagactccggctggcagaccgaattcttttctctgcagatggcggcgaagaggggcgggagaacctttaaggaaatcggaggggatgaaagtaaaaccctgatcgtcaatgaccacaaatttatggcgcaatttgccaaaattgacgccagctttgccgccagcaaagccacgatgaagacgctgcaagggcaacaggatgcgctgaaaaccgagatcgccgcgttagaggagcggattaaccgttcatggggtacggatgcgaacggcaagccgctcgatcgcagcgacgtgcagcaggcgatgctggaaaaaatgtatgaagtagaccggcaaaacgatccgctgaagttcgagaatcattactacaaaactctctatgaacccgcactggccgcctgtcagaaaaaagcggtttgcgatgctgcgccgctgcgcgccgagcgcgatgccgtgctgaatgagcagaagcgtaactattatcgccagcataaagagatgagtgaaaatatcaaagcggagatggccgcgcgcgataaaaagatagcgccgctgcagaagcaaaaaggcgaactgaacgcgcagctgatggcgctggagatccgctaccgggagttggctcgcgacgaaaaatactggcaggaggggctggagaagatgcgccgcaacggggttctaaagtag

SEQ ID NO: 172906 - DNA, 1302 bp, Klebsiella oxytoca
atggacagctatatcgcactgatgctatttggctctttctttattctggtttttattggcgtacctatctccttctccattggcatcgctaccgtcggttcgatgctgctgatgttcccctgggatatcgcagtgattaccgtttctcagcgcctggcaaacggcctcgataacttcgcgctgctggcgattccattctttatctttgccggaaccctgatgaacagcggcgggattgccatacgtttaatcaatctggcccaggtgatggtcggacgcgtgccgggctctctgggccacgtcaacgtgctggccaatatgatgttcggctcgatttcaggctcagcggtcgccgccgccgccgcggtcggcggcacgctcaaccccatacagacgcagaaaggctacgatccggccttctctacggcggtgaacgtctcatcctgcatcacgggtctgcttattccgccgtcaaacgtactgatcgtcttttccctgaccgcaggcggcgtctcggtggcctcgctgtttatggccggctatttgccgggcatcctgatgggcctggctattatggtggtctgtgccgtcattgctaaacgtcgcggctatccggtttccgagcgtccgacctgcgcccaggcggcaaaagcgtttttcgatgctctgcccagcctgctgctggtcatcattgtgatgggcgggatccttggcggcatttttaccgcgacggaagcctctgccatcgccgtggtctacacctttatcctgtcggtactgatatatcgggaagtgaagtggcgcgatctgccgaagctgattctggaatcggtagtcatgacctctattgtgctgctgctgattggcttttccgtgggcatgtcgtgggcgatgaccaacgccgacattccctatatgataagcgacgcgctaatgggcgtttctgaaaacccggtggtgattctgctgttgataaatatcgtgctgttaatcgtcgggatctttatggatatgaccccagcggtgctgattttcacgccgatattcctgccaatcgcgcaggacctggggatggatccggtgcacttcggtattatgatggtcgccaatctgtgtatcgggctgctcaccccaccggttggcagcgcgctgttcgttggctgttctatttctggcgtcaaaattcagcagttgatcaaacctctgctgccgttctacgccgccctgctgatcgcgctgatgatgattgtctatatcccgcagatttcgctgtttattccgcagctgctggggctgatgtag

SEQ ID NO: 172907 - DNA, 504 bp, Klebsiella oxytoca
atgatacttaaccgcataaagctggcggtggaccgcacgatcgccgcattctccgtcgccgttatgattgcgctggtggtctgcgtcgtctggcaggtatttagccgctacgtgctaaaccagccaagcaccctgaccgacgaactggcgcgctttttaatgatttgggtcgggctgctgggtgcggcatataccgtcggcgcccagcgtcatctggctatcgatttactggcgatgacgctccctcctcgcaggcaggcgcttctcagcgtcatcattaatctgctgatctttatttttgctggttcagtaattgtgaccggcggcgtgaagctgattgagaaaacgctatcgacgtcccaggtctcagcggcgatgcaaatccccatgggctacgtgtatctgatcctgccgctaaccgggatcattatgatgttctacgcgttgtgttttatcagcaccggactgaaaaacatgaagcactctgcagcgggggcaaattga

SEQ ID NO: 172908 - DNA, 987 bp, Klebsiella oxytoca
atgaaaaaactctcgttttctcgttctctggtgtgtgtttctttgcttgccctgctctcagcgggcgccagcgcagctgaaaaagttacgttaaaactggcacataaccttgaacgcagccacgttgttcatcaggcgtttgagcagatggcgaaagaggttaaccaactttccaacggcaatatgaaaattcgcatttacccgagtagccagatgggcagcgcgcgtgaaacgatggagttattacaaaacggcgcactggatatgacgaaaggttccgccagcgacctggagtcatttgataacgtctacgcgatatataatttaccgttcctgttcaaggatcagaatcacttcaataaagtcgtcttcggtgaagtgggtaaagaaataatggagtccacgaaagataaaggattctttgccctttccgcttatgttgccgggacccgaagtttttatgctaaaaaacccattactaaaccggaagatttaaaagggctgaaaatccgcgtccaggccagtccgacaacgttgaaaatgatcgaattaatgggcggttcgccaacgccaatttcgtttggtgaagtctataccgcgatgcagcagggcgtagtggacggcgcggaaaataacgtaccttcctgggtacaaacgcgccatatcgaaatcgctaaggttttctcagaagatgaacatgcctccatcccggacttcctcgttatctccagcaaaacctgggacaagctgacgccggagcagcagcaaatcctgaacgaggcggcgaaagcctcagaggcctatcagcaaaaactgtgggacaaaattgacgccgacacccgcgcgcaggccaaagccatgggcggcgaaattatcaaagttgataaagcaccgttccgcgccgccgttcaaccgctctttgatgacttcaaaaaagatccgaagcaggcggctctgctggccaaatttgaagctgctgctgaataa

SEQ ID NO: 172909 - DNA, 1137 bp, Klebsiella oxytoca
atggctaatttgccgcccctgagcctctacattcacatcccgtggtgcgtgcagaaatgcccgtactgcgatttcaactcgcatgcgttgaagggcgaagtgccgcatgatgactatgtccagcatctgctgaacgatctgcgcgccgacgcccactatgcgcagggacgtgaaatcgggacgatttttattggcggcggtacgccgagcctgctctccggcccggcgatgcaaaccctactcgatggcgtacgcgcggctcttccgctggcggccggagccgaaatcacgatggaagccaaccccggcaccgtggaagcggatcgcttcgtggagtatcagcgcgccggcattaatcgcatctccatcggcgtacagagctttagcgagcaaaagctgcagcgtctggggcgcattcatgggccacaggaagccaaacgcgcggcaaacctggcaagcggtctgggactgcgcagctttaacctcgatttaatgcatggtctgccggaccagtctctggaagaggcgctggacgacctgcgccaggcgattgcgctcaatccgccgcatctctcctggtatcagttgaccattgaaccaaataccctgtttggttcgcgaccgccggtcctgcctgacgacgatgcgctgtgggatatttatgagcaggggcatagcctgcttagcgccgcgggctaccggcaatatgaaacttccgcctatgcaaaaccgggatatcagtgccagcataatctgaactactggcgctttggcgactacctgggcattggctgcggcgcgcacggtaaagtgacgtttgcggacggacgcattctgcggacggcgaaaacccgccacccgcgcggctatatggaaggccgttacctggagcgccagcatgatgttgagaacacagataaaccgtttgagttctttatgaaccgtttccgcctgctcgaagcggcgccacgggatgaattcagccgctttaccggcctcgacgagcggacgatccgcccgcaaatcgatgccgctattgcccagggctacctgacggaagatgaaggctgctggcagattaccgagcacggcaagctatttttgaactcccttctcgaattattcctcagcgaataa

SEQ ID NO: 172910 - DNA, 594 bp, Klebsiella oxytoca
atgcaaaaagttgttctcgccaccggcaatcccggtaaagtgcgcgagctggcctcgctgctggcagattttggcctcgatatcgtggcgcaaaccgaactgggcgtggattccgcagaggaaaccggcctcacgtttatcgaaaacgccattcttaaagcgcgccacgccgcgcagattaccggccttccggctatcgccgatgactcaggtctggccgtcgatgcgttaggcggcgcgcctggcatctattctgcccgctattccggtgaagatgcgaccgaccagcgcaatctggaaaaactgctcgacgcgctacgcgacgtgccggacgataagcgccaggcgcagttccactgcgtgctggtctatctgcgccatgcggaagatcccacgccgctggtgtgccacggcagttggccaggcatcatcgctcgccaggccgccggcagcggcggctttggttacgatccgattttctttgttccgacggaaggtaaaaccgcagcggagctgagccgtgaagagaagagcgccatttcccaccgcggccgagcgctgaaactgttactggaagccttacgtaatggctaa

SEQ ID NO: 172911 - DNA, 291 bp, Klebsiella oxytoca
atgagtgctgtccaggcctgcgctgacggtctggtcttaaggctgtatattcagcctaaggccagccgcgacagcatcgttggtttacatggcgacgagctcaaagtcgccattaccgcgccacccgttgacggccaggccaacgcccatctggtaaaatttcttgccaaacagtttcgcgtggcaaaaagccaggtgcttattgagaagggcgaactgggtcgccacaaacagataaaaatcattcatccgcagcagatccccgacggggtcgctgcgctgacagaatag

SEQ ID NO: 172912 - DNA, 567 bp, Klebsiella oxytoca
atgaagacgttgactttcctgctctcaacggtcattgagctttatacaatggtcgtgttgttacgcgtctggatgcaatgggcgcgctgcgacttttataacccgttttcgcagttcgtggtcaaagctacgcagcctgtcgttgggccgctgcgccgcattatcccggcgatggggccgctcgacagcgcctccctgctggtcgcctttattctctgcgtcgtgaaagctatcgtcctgtttatggtcgtcaccttccagccgattatctggatctccgcgctgctgatccttatcaaaaccgtcggctcgctgatcttctgggttcttctgttaatggcgatcatgagctgggtaagccagggccgtagcccggtggaatatgttctgatgcagctggcagacccgctgctgcgccctatccgcaggctgctgccctcaatgggcggaattgatttctcgccgatggtgctggttctgctgctgtacgtgatcaatatgggtatcgccgaactgttgcaggctaccggtaacgttctgcttccggggctgtggatggcgctatga

SEQ ID NO: 172913 - DNA, 705 bp, Klebsiella oxytoca
atgaacgatattgcgcataacctggcacaggtccgggacaaaatctcagccgctgccgcacgctgcggccgtgctccagaagaagttacgctgcttgcagtcagtaaaacgaaacctgcgagcgctatcgaagaagcgatggccgcaggccaggtcgcgtttggcgaaaactatgttcaggaaggggtggagaaaatccgctactttcaggagatcggggcaagcgagctgcagtggcactttattggtccgctgcagtccaacaaaagccgcctcgtggccgaacattttgactggtgtcataccgtcgatcgactcaaaatcgccgctcgcctcagtgaacagcgccctgccgacatgccgccgctcaacgtgctgattcaaatcaacattagcgatgagcagagcaagtcgggtattccgcctgcagagctggacgcgctggcggcagagatcgctaaattgccgaatctgcagctgcgcggtttaatggccatccccgcgcctgagtcagaatatgtaaggcagtttgccgtcgcccaacaaatggcggtagcatttgcgcggctaaaaacgcactaccctaccgtcgatacgttgtcgctgggaatgtcggatgatatggaagccgccatcgcggcgggaagcactatggtgcgcatcggaaccgcaattttcggcgcgcgcgactacagcaaaaaataa

SEQ ID NO: 172914 - DNA, 981 bp, Klebsiella oxytoca
atggaactggaagaaatagtggcccttagtgtaaagcataacgtctccgatctacacctgtgcaatgcttcagcgccgcgctggcgtcgccagggaaagctggagcctgcgccttttacctcccctgatatcagcaaaatactccatgactggctcaacgccgagcagctcgcgcagtggcaggccagcgggcaggtcgatttcgctttagcgccggctggcgggccacgccttcgcgccagcgcatttgcccacagccgcggcctgtcgctggcgctgcgtctgctggcggaaacctgcccgcagctggaggcgctcggtgtaccagccgccttaagcgagctgctcaatgaggagagcgggcttatcctcgtcacgggcgccaccggcagcgggaaatcaactaccctggcggcgatggtgggctatcttaatcagcgcctcaatggtcatatcctgacgctggaagatccggtcgaatttattcaccacagcgagcgttgcctgatccagcagcgggaaatcggccgccactgcccctcctttgccgcggcgttacgcgctgcgctgcgtcaggatccggacgtcattctgttaggggaactgcgcgatagcgaaactatccgcctggcacttacggcggcggagaccggacatctggttatggcgacgctgcatacgcgcggcgcggcgcaggcggttgaaaggctggtggatgtttttcccgcccaggagaaagagcaggttcgcagccagctggcgggaagtttgtgcgcggtactggcacaaaaattgtttccggatgctgcaggtggcagagttgcgctatacgagcttttagttaataccccagcagtggcgaatttgatccgggagggaaaaacgcatcagctgcccggcgtgatgcaaaccgggcagcaatctggcatgcaaacatttacgcaaagctttcagcaacgtacggcagcgggtcttttatag

SEQ ID NO: 172915 - DNA, 654 bp, Klebsiella oxytoca
gtgattaatttttctgaggattcagttctttctcatcaggttacctttattactcacccctcaattcaaagcaaggcatttgcaacctggctggctgacaggttatctgctacagtgatcctgcaaaatattaacaaacccctcgcgcaacgacttgtgaaagattctgtaatattatttgatattgcggtttcaaataaaaagttgaatagcgtgtggcgtgatattattcgcctgcaggtagataacccccgtttattgattatcaacagcgcacaaaagtatgagctctacgaaatggcacagtggccagcgctttatggcgttttccgtcacgacgatgatgaattgcgcttaattgagggcgttaaagctgtgcttaacggcgaacagacggctgaattgagcgtaatgcacccggctatgtacgcagcggatcatcaatcggcgcctgtggaaagttcgccgctgaccgagcgcgaatgtgaaatccttaatgaacttcgctgcggggcgaccaatatggatattgctcgcgcgctgtttatcagcgaaaacacggtgcgtacccatctgtacaacgtgttccgtaagctaagcgtgaagaaccgaacccaggcggtcagctgggcgaatgagcatctgcgtcactaa

SEQ ID NO: 172916 - DNA, 417 bp, Klebsiella oxytoca
atgagcggaacgtttttaggctttgattttggtaccaaaagcatcggcgtcgccgtagggcagcgcatcaccggcactgcccgccccctgcccgcattgaaggcgcaggacggcaaacctgactggaatattatcgagaagctgctcaaagagtggcagcccgaaaaggtggttgtcggcctgccgctgaatatggacggtacggagcaacctctgaccgcgcgcgcgcgcaacttcgcgaataaaatccatggccgtttcggcgtgcagataatcctgcacgatgagcgtctgagcacggtggaagccagagccgggttatttgaacacggtggattccgtgcgctcaataaaggcagcattgattcagcgtccgctgtcattattctggaaagctacttcgagcagggcttctga

SEQ ID NO: 172917 - DNA, 564 bp, Klebsiella oxytoca
atgaatttacagcatcactttctgattgccatgcctgctctccaggacccgatgttccgtcgctccgtagtctatatctgcgagtataacgatgacggcgccatgggcatcatcatcaataagccgatggaaaatctgcaggttgaagggatcctggagaagttaaaaatcacgcctgagccgcgcaatcccgagatccgcctggataaaccggtgatggttggcggcccgctggccgaggaccggggttttatactgcactcgccgccctctgacttttcttccagcattcgtatttccgataatacggtgatcaccacctcccgcgacgtgctcgaaacgctgggcacggataaacagccggacaacgtgctggttgcgctgggctatgcctcctgggagaaaggtcagctggagcaagagatactggataacgcctggctcaccgcgccggcggatcggaacattttgttcaatacgccaatagccgaccgctggcgcgaggctgcgaagctgatcggcatcgatatcgtcaccatgccggccgcagcggggcatgcctga

SEQ ID NO: 172918 - DNA, 948 bp, Klebsiella oxytoca
atgattaagctcggcatcgtgatggaccccatcgcaaccatcaacatcaagaaagacaccagcttcgctatgttgctggaagggcagcgtcgcggctatgaactccactatatggagatgaacgatctgtacttaatcaacggtgaagcccgcgcccgtacgcacaagctgagcgtcgagcagaactacgacaaatggtacgagttcaacggcgagcaggatctgcctctggcggacctggacgtcattctgatgcgtaaagatccgccgtttgataccgagtttatctatgcgacctacatcctcgaacgcgccgaagagaaaggcacgcttatcgtcaataagccgcagagcctgcgcgactgtaacgaaaagctgtttaccgcctggttctccgagctgacgccggaaacgctggtcacccgcaataaagctcagctgaaagccttctgggaaaagcacggcgatgtcatcctcaagccgctggacggcatgggcggtacctccattttccgcgtgaaagagggtgaccctaacctcggcgtgattaccgagaccctgaccgagctgggcagccgctactgcatggcgcagaactatctgccggccattaaagacggcgataagcgcgtactggtcgtggacggcgagccggttccttactgcctggcccgtattccgcagggtggcgaaactcgcggcaacctcgccgccggcggccgtggcgaagcgcgccccctgaccgaaagcgactgggctatcgcccgccgcgtaggcccgacgctgaaggccaaaggcttaatcttcgtcggcctggatatcatcggcgatcgcctgacggaaattaacgtcaccagcccaacctgcgtacgtgaaatcgaagccgccttcccgatttccatcaccgggatgctgatggacgccatcgaaaagcgcctcaataaataa

SEQ ID NO: 172919 - DNA, 732 bp, Klebsiella oxytoca
atgcgcatccctcgcatccatcacccggaacgcatcactacgggtagccagatagccctctccgacgacgcggccaaccatgtcggtcgcgttttacggatgggtaaaggccaggcaatcgagctttttgacggcagcaatcaggtcttcgaggcggtcattgtcgaggcaggtaagaaacatgtgctggttgaagtacagagcggcaaaatcgataaccgcgaatcccctctccatatccatttaggccaggtgatgtcacgcggcgaaaaaatggaattcaccatccagaaatcgatcgaacttggcgtaagcctcataacgccactgttttccgaacgctgtggcgttaaactggacgccgaacgtttgcacaagaagattcagcagtggcagaaaatcgccattgccgcctgcgagcaaagcggccgcaacgtggtgccggagatccgcccggcaatgcagctcgaagcctggtgcgcggagcaggacgagggcctgaagctcaatttacaccctcgcgccagcgccagcatcaatacgctgccgctgccggtcgaacgcgtccgactgctgatcggtccggaaggcgggctttcggcagaagagatagcgatgaccgctcgctaccagtttactgatatcctgttgggaccgcgcgttctgcgtacagagacaactgcgctcactgccattaccgccctgcaggtgcgttttggcgacttaggttga

SEQ ID NO: 172920 - DNA, 708 bp, Klebsiella oxytoca
atgtcccgtatttatatttttgctgccgcgtttcttagcgcggcggcgtgtgccccgcttgctgcggagggaatcaacagtttttctcaggccaaagccgctggcgtcaaggtcaacgccgacgtccccggcgatttctactgcggctgtaaaatcaactggcaggggaaaaagggcgttatcgatctggaatcatgcggctataaagtgcgtaaaaatgagaaccgcgccagccgggtagagtgggaacacgtggttccggcctggcagtttggtcaccagcttcaatgctggcaggacggcgggcggaaaaactgcgccaaagacccggtctatcgcaagatggaaagcgacatgcataacctgcagccggcggttggcgaggtcaacggcgatcgcgccaactttatgtacagccagtggaacggtggcgaaggccagtacggccagtgtgcgatgaaggttgattttaaagataaagttgcagagccgccggctcgcgcccggggcgcgattgcccgcacctacttctatatgcgcgaccgctaccagctcaatctttcccgccagcaaacccagctgtttaccgcctggaataagctgtacccggtaacacgctgggaatgcgaacgcgacgcgcgtattgcaaaagttcagggcaaccataatccttacgtcctgcaggcttgccaggcgcaaaagagctaa

SEQ ID NO: 172921 - DNA, 459 bp, Klebsiella oxytoca
atgcgcagcctgcgggaaaatcttgccaaagcgaacctcaagctgggacgacattaccctgaaccggtgctggtttatcagcagcggggaacctccgccggtaccgcctggctggagaaaaacgaaattcgccttaacccggtgctgctgctggaaaaccagcaggcttttatcgacgaagtcgtgccgcacgagctggcccatctgctggtatggaaacactttggccgcgtggcgccgcacggaaaagagtggaaatggatgatggagagcgtactgggcgtaccggcgctgcgtactcatcgtttcgaactcgattctgtccgtaaaaataccttcccctaccgctgccagtgtcagcagcatcagcttaccgttcgccgccacaatcgcgtgatgcgcggtgaggccacctatcgctgcgtgcgctgcggcgacgtgctggtggcggaaaagtaa

SEQ ID NO: 172922 - DNA, 1395 bp, Klebsiella oxytoca
atgcctgacaacaaaaaacaagggcgttcaaacaagacgatgacgttctttgtctgcttcctcgccgcactggcaggcctgctatttggcctggatattggtgttattgcgggtgccttaccctttattgccaacgagttccagataagcgctcatacgcaggaatgggtagtaagctccatgatgttcggcgccgcggtcggcgcggtcggcagcggctggctctccttcaaactcgggcgtaaaaaaagcctgatgattggcgccatcctgttcgttgccggttccctgttctccgccgccgccccgaatgtggaagtcctgctcatttctcgcgtgctgctcggcctcgccgttggcgtcgcttcctacacggctccgctgtatttgtcggaaattgcgccggaaaaaattcgcggcagcatgatttcgatgtaccagctgatgatcaccattggtattctcggggcgtatctttcggataccgctttcagctacagcggcgcctggcgctggatgctcggggtgatcattatcccggcggtgctgctgctgattggcgtagttttcctgccggacagcccgcgctggtttgccgctaagcgccgctttgtcgatgccgaacgcgttctgctgcgcctgcgcgacaccagcgctgaagcgaaacgcgagctggatgagatccgcgaaagcctgaaggtaaaacagtccggctggtcgctgttcaaagaaaacagcaacttccgccgcgcggtgttcctcggcgtcctgctgcaggtgatgcaacagttcaccggtatgaacgtcatcatgtactacgcgccgaagatttttgaactggcgggctatgccaacaccaccgaacagatgtgggggaccgtcatcgtcggtctgaccaacgttctggcgacctttatcgccatcggactggttgaccgctggggccgtaaaccgacgctgatcctcggctttatcgtcatggcgctcggcatgggcgtgctgggcagcatgatgcatatcggcatccactccgccacggcgcagtactttgccgtcctgatgctgctgatgttcatcgtgggttttgcgatgagcgccggcccgctgatttgggtgctgtgctccgaaatccagccgctgaaagggcgtgatttcggtatcacctgctcaacggcgaccaactggattgccaacatgatcgtcggcgcgaccttcctgacgatgctgaactcgctgggcagcgccaataccttctgggtctatggcggccttaacatcctgttcatcttcctgactctgtggttgatcccggaaaccaaaaacgtttcgctggaacatattgaacgtaatctgatgaaaggccgtaaactgcgcgaaatcggcgcgcgcgactag

SEQ ID NO: 172923 - DNA, 1155 bp, Klebsiella oxytoca
atggcaaaacacctctttacgtcagagtccgtatccgaagggcatcccgacaaaattgctgaccaaatctccgacgccgtgctggatgcgatccttgaacaggatccaaaagcgcgcgtagcatgtgaaacctacgtcaaaaccggcatggttctggtgggtggcgaaatcactaccagcgcctgggttgatatcgaagagatcacccgcaatacggtccgtgaaattggctacgtgcattccgatatgggctttgacgccaactcctgcgcggtgctgagcgctatcggtaaacagtctccggacatcaaccagggcgttgaccgcgccgatccgctggagcagggcgcgggcgaccagggcctgatgtttggctatgcgactaacgaaaccgatgtgctgatgcctgcgccgatcacctacgctcaccgtctggtgcagcgtcaggctgaagtacgcaaaaacggcaccctgccgtggctgcgcccggacgcaaaaagccaggtgacgttccagtacgacgacggcaaagttgtcggtattgatgcagtcgttctctccacacagcacgccgaaagcatcgatcagaaatcgctgcaggaagcggtcatggaagagatcatcaaaccggtgctgccgaccgagtggctgaacagcgcgaccaaattctttatcaacccaaccggccgttttgttatcggcggcccgatgggcgactgcggcctgaccgggcgtaaaatcatcgttgatacctacggcggcatggctcgccacggcggcggcgcgttctccggtaaagatccgtctaaagtcgaccgttctgcggcctacgcggcgcgctatgtggcgaaaaacatcgttgccgccggtctggccgatcgttgcgaaattcaggtttcctacgccatcggcgtcgcagagccgacctcgattatggttgaaaccttcggtaccgaaaaagtatcgtccgagcagctgacgctactggttcgtgagttcttcgacctgcgtccgtatggcctgatccagatgcttgacctgctgcacccgatctacaaagagacggcggcttacggtcactttggtcgcgaacatttcccttgggaaaaaaccgacaaagcagctcagctgcgcgaagcggccggcctgaaataa

SEQ ID NO: 172924 - DNA, 1977 bp, Klebsiella oxytoca
atgtctgacgacatgtctttatcttcgccttcgtcagcaggcgatcacggtgtactacgttccatgcaggaggttgcgatgagctcccaggaagccagcaagatgctacgtacttacaatattgcctggtggggtaataactactacgacgttaacgaactgggccatatcagcgtctgcccggatcctgacgttccggaagcgcgcgttgaccttgccgagctggtgaaagcgcgtgaagctcaggggcagcgcctgcctgcactgttctgcttcccgcagattttgcagcaccgcctgcgttcgattaacgccgcctttaaacgggcgcgtgagtcttatggctataacggtgactactttctggtttatcccatcaaggttaaccagcatcgccgcgtgattgaatcgctgatccactccggcgaaccgctgggtctggaagccggctcgaaggccgagctgatggcggtactggcgcacgccggcatgacccgcagcgtgattgtttgtaacggttataaagaccgtgaatatatccgcctggcgctggtgggtgaaaagatgggccataaggtctatctggtcattgagaaaatgtcggaaatcgccatcgtgctggaagaagccgagcggctgaacgtggtgccgcgtcttggcgtgcgtgcgcgtctggcttcgcagggctctggcaagtggcagtcctccggcggcgaaaaatccaaattcggcctcgcggcgacccaggttctgcagctggttgaaattctgcgcgccgcagggcatctcgacagcctgcagctgctgcacttccaccttggctcgcagatggccaatattcgcgatatcgccaccggcgtgcgtgaatcggcgcgtttctacgtcgagctgcataagctgggcgtgaatattcagtgcttcgacgttggcggcggtctcggcgttgactatgaagggacccgttcgcagtccgactgctcggtgaactatggcctgaacgaatacgccaacaacattatctgggcaattggcgatgcctgtgaagagaacggtctgccgcatccgacggtgattaccgaatccggccgtgcggtcaccgcgcaccacaccgtactggtatccaacatcatcggcgttgagcgtaacgaatataccgaggcgaccccgcccgcggaagatgccgcgcgtccgctgcaaagcatgtgggaaacctggctggagatgcaggaaaccggcaaccgccgctcgctgcgcgaatggctgcacgatagccagatggatctgcacgatattcatatcggctactcctccggcacctttaatcttcaggaacgcgcctgggccgagcagctgtatctgaatatgtgccatgaagtgcagaaacagctcgatcccagcaaccgcgcgcatcgcccgataatcgatgagctgcaggagcgtatggcggataagatttacgtcaacttctctctgttccagtcgatgccggatgcatggggtatcgatcagctattcccggtgatgccgctggaagggttgaacaaggtaccggaacgccgcgcggtgctgctggatatcacctgcgactccgacggcgcaattgaccactacgtcgatggcgatggcattgcgaccaccatgccgatgccggaatacgatccggaaaatccgccgatgctgggcttcttcatggtaggcgcctaccaggagattctgggcaatatgcacaacctgttcggcgatacggaagccgtagatgtgtttgtcttccctgacggcagcgtcgaagtggagctgtcggatgagggagacaccgtcgcggatatgctgcagtacgtccagctggatccgaacacgctgctgacgcagttccgcgatcaggtgaaaaagaccgatctcgacgctgacctgcagcagcagttccttgaagagttcgaagcgggtttatacggctacacttatctggaagacgagtga

SEQ ID NO: 172925 - DNA, 921 bp, Klebsiella oxytoca
atgagcaccttaggtcatcaatacgataactccctggtatccaacgcatttggctttctgcgtctaccgatgaattttatgccgtacgacagcgatgcggactgggtcatcaccggcgtaccgtttgatatggcgacctccggacgcgcgggcgggcgtcatggcccggcggcgatccgtcaggtgtcgactaatcttgcgtgggagcataaccgtttcccgtggaactttgatatgcgcgagcggctgaacgtcgtggactgcggcgatctggtttacgctttcggcgatgcgcgtgaaatgagtgaaaagctgcaggcgcatgcggaaaaactgctggcggcaggtaagcgcatgctttcattcggcggcgaccactttgtgacgctaccgctgctgcgcgctcatgctaagcacttcggcaaaatggcgctggtgcatttcgatgcccacaccgatacctacgccaacggctgcgaatttgaccacggcaccatgttctataccgcgccgaacgaaggcctgatcgatccgcaccattcagtgcagatcggcattcgcaccgagtttgataaggacaacgggtttaccgtgctggatgcgggtcaggttaacgaccgcagcgtcgacgacgtgatcgctcaggtgaaacagatcgtcggcgatatgccggtgtacctgacctttgatatcgactgcctggatccggcgtttgcgccgggcaccggtacaccggtgatcggcggactgacctccgatcgcgcgatcaaactggtgcgcggcctcaaggatctgaacattgtcggtatggacgtggtggaagtcgctccggcctatgaccagtccgaaatcaccgccctggcggcggcgacgctggcgctggaaatgctctacattcaggcggcgaaaaaaggcgaataa

SEQ ID NO: 172926 - DNA, 1212 bp, Klebsiella oxytoca
atggcggcaagatggcaaggtactatcgcattacttttgttaataattatttcttacgtcgatcgggtaaatatctcagtgatgattctgaaccccgaatttgccgctcactttcatttaaatgaaaacagaatgttacaaggcatgctgatgacatgctttcttcttggttatggtttatcggctttaatattaactccccttatagaaagtaagctcaactatcgccaggggctgttaagcagcgtagcgatatgggcgctggtttgcgcggtttctccgctgctgggctccctgctgggcatgttaatcgcgcgcatcgttctcggcgttgccgaggggccgctattctcgctgaaaacccgctttatcagcgatagcttcgccgccgatgaggtcggtaaacctaacgccgtgaccgctctcggcgtttcgctcgggctggcggctggctttccgctggtcacctggctgatggcgcacgtcggctggatgggatcgttttacgccctggcgctgctcaacctgctgctcggcggcggcttagtctggcgctttttacctgctccagtcgtcaatgaacgccgcgccaggcccggtatgattacaaccttgaccctcgcctggcgcacgccgctgctgggctggatcctgctggtggagatcgccaccctcagctatctatggggcagcagcgcctggctgccggcctggctgcgcgacgagcatcacttctcgctacaggctaccggcctgctggcggcggttccgtttctgctgagcctgggttcaaaatttctcggaggggtacttctcgataaaatgcgcccggagcaggcgccggtgctgtttattatcggcggcctgctgaccgctctgtcggtactggcgctgatgctcagccaccagcaggcgatgctggcgctgtttatgctggcggcgaacgttttctgggggctgcagggcgcggcgatcccggcggtcttgcagcatcatgcgccgcgcgaagcggtaggcagcgcctatggcattattaatggcatcggtaatatctgcgcggcgtttatcccgctgctgatgggaatggtcatgaaatcggcgggatcggtaagctcaggattctcggtactggtggtatcgcagctgataacgctttgcgcaggaggcatgctgctgctgcgcatgcgtcgcgcagcagcagtcagcgtctga

SEQ ID NO: 172927 - DNA, 324 bp, Klebsiella oxytoca
atgagctggattggcgtgtgtgacgcggagcaagtacaggaagatttcccctatagcggcagtatcgacggtaaagaaatcggtatctatctgattgatggcgaatattacgcgctggaagacgtttgtccccatgcgtatgcgcttctgagccagggctttgtcgaagatggcaaggtggagtgcccgctgcatgaagcggtattcgacgtcaaaaccggccagtgtctgcacggccccggcgggcgcaacctgcatcgctacccggtgcgggtatacgacaagcagatccagatttcttttatcgaggagaacgtggcatga

SEQ ID NO: 172928 - DNA, 309 bp, Klebsiella oxytoca
atgagcgaaaccctggactttaacccggcgctgccggaaagccgtcagtttacgccgccggcggaaggcggaaacggcaacattcacaaacccggcgactacaccaatctgatctggcaaacccgcagccgggtgccggaaagctgggagctacagcttatcgccaccctcgagacgctctttgaacagggcgcagaaagcctcggtgagctggtgaacggcctgaacggcgtcagaatgcacgaccagcagggggaaccgtggagcgagagcagcttccaggcatttctgcaggtaaacggatactga

SEQ ID NO: 172929 - DNA, 1023 bp, Klebsiella oxytoca
atgacaacaacggtacagaactatcttgataaaggattacgcggcctgtggtatccggtgctggcgagctgggaagtgcagtcggcgccggtggggattacccgcctcggcgaacagattgtggtctggcgcaataaagatggccaggtgcaggcgctggaagaccgctgcccgcaccgcggcgcgcgcctgtcgatgggctggaacctgggcgatcgcattgcctgctggtatcacggcgtggaagtggccggtaacggcgaagtgaaagacgtcccggcggttgaccgctgcccgctggtgggtcagcagtgcgttcgcagctacagcgttcaggaagcgcatggcgccattttcctgtggtttggcgtcaccgccgaccagcagcctgatgagctgagctttccggaagagctggccaatagcgacaaatttagccacttcctgtgtaccgcagcgtggaaatgcaactaccagtacgcgctggaaaacgtgatggacccgatgcacggcacctatcttcactcctcctcgcactcgatggcggaaggcgatcgcaaagccgacatggtgctgcagccgacgaaaaccgggtttatttttgagaaaaaagggcaggttggcgttaacttcgactgggtcgaactgggcagcagcggggcctactggatgcgcctctctattccgtacaaaaagcgcttcgggccgggcggccacttctggattgtcggcatggtggtgccggaagataacgacaactgccgcgtcttcttctggcgcatccgcggcgtacagggctggcagcgcgatctatggcgatttatgtaccgcaaccgcctggaaaaactgcactgggaagtgctcgaacaggatcgcgtggtgctggaaagcctggcgccgaatgcccgcgatcgcgaatatctttatcagcacgacgtcggcctttcccgcctgcgccgcatgatgcagaaagcggcaaaagagcagctggcggccctggaagagcagcagggagccgcctga

SEQ ID NO: 172930 - DNA, 750 bp, Klebsiella oxytoca
atgaacggtctgttgaacggaaaacgtatcgtcgtcaccggcgcggcgcgcggcctgggctaccactttgccgaagcctgtgccgggcagggagcggcggtagtgatgtgcgacattctgcggggcgaactggcggaaagcgctcatcgtctgcaggaaaagggctactgcattgaatcccatgagatcgatctcgccgatagcgagtcgatcgaccgggtattcagcgctatcggcgagcggggggcgatcgacgggttagtgaataatgcggcgatggccaccggcgtcggcgggaaaaacatgctcgattacgatccggatctgtgggatcgggtgatgacggttaacgtcaaaggcacctggctggtgacccgcgcggcggtgccgctgctgcgtgaaggggccgggatcgtcaatgtcgcttcggataccgctctgtggggagcgccgcggctgatggcctacgtggccagtaaaggtgcggtgatcgcgatgacccgctcgatggcccgcgaactgggggagaaacggatccgcataaacgccatcgcgccggggctgacccgcgttgaggcgacggaatacgtgcccgcggaacgccatcagctgtatgaaaacggtcgcgcgctcagcggcgcgcagcagccggaagacgtcaccggcagcgtagtctggctgctcagcgatctgtcgcggtttatcaccggccagctgatcccggtcaacggcggttttgtttttaactaa

SEQ ID NO: 172931 - DNA, 789 bp, Klebsiella oxytoca
atggcgaacgagcaggaagtgaagtatctggtgccggggcttgagcgcggcctgcagctgctgctggcttttggcgaacagcatcgcgatctgaccttcgccgagctgcaccggctggtggatatgccgaaagcgaccgcctatcgcgtggtgcaaacgctggagtatatgggctttctcgaacgcaacgcgcgcaccaataccttttcgctggggatgaacgtgctgcggctgggctttgaatatattgcctcgctggatatcgcccaggtaggtcagccggttatcgagcagctgcgtgatgtcagccagtgcagcagccatctggcaatccgcgatggccgggacatcatctacatcgctcgcgtcagcgcggccggttcgcggataaaccaggtcagcgtcggcacccggctgccggtgcactgcacctcgctgggccgcatgctgctgaccgatgtttcacgcagcgagtttgaacagctgttccccaacgagcggctgccgggcaacaccccgggccagctgcacgatcgcgaagcgctgtggcagatggtgcagcaggataaagcccgcggctatgtgattggcgagtcgttctttcgccacggcatttcgtcgattgtctacccggtgtatgaccgcagcggccgggtggcgggagtcgtcagtatcctggtgccctccgatgagatcccgcaaagcgatcgcgagcggctgcagaacgacgtcagcctggcggcggacaaaatttccggtttcctgggatatttgtctcaggcaagttaa

SEQ ID NO: 172932 - DNA, 927 bp, Klebsiella oxytoca
atgagtattaccggaattgaaaagctggaatttggcgtagatgacctgaaccatagcgccaaatttatgcacgattttggcctggctggcgacgccagaggccgcgtgttcaccaccctcagcggcgcgcgcattgagcttaacccgttggaggccgccgacctgccgccggcttttgaaaccggcaatacgctgcgccgtatgacctggggcgtagcggaccaggcggcgctggaagcgctgcgtccaaagctggaacgtcagcctggcttccgcagggtcgacgccgcgctggagtgcctcgacccgaacggcatgacgctgcgagtgcaggtcagccagcaaaaggcggtggagctgaacgtcgagccaattaatcagtggggcgatattcgtcgtatcgacacgccgagtccggtttacgaccgcgcgcagccgatcaacgtcggccacgtggtgttcttcgttgaagagctggcggcggtcgaaagcttctatcgcgaggtgctcggcttccaggtgtcagaccgctacattaaccgcgcggtcttcctgcgctgcggcgcgcgcggtggccatcacaacctcttcctgctgcagctgccgaaccgtaagcgcgggctgaatcatgttgctttcaccgtccgcgatattcacgaggtgatcggcggcggcatcgcgatgaacaaaaatgcctggagcactttcatcggtcccggtcgccacccggtctcctcggcctacttctggtacgtcaacagccccaccggcggcgccttcgagtactacaccaacgatgattatctgacggaaaactggcagccgcgcgaactggagcactcgttggtctcctttaccgagtgggcggtggaaggcggaatcgaccacgatacccgccgccagcagaaaaaaacggaggcggtatga

SEQ ID NO: 172933 - DNA, 1188 bp, Klebsiella oxytoca
atgacggcgcggatcgtgatagtcggcggcggccaggcgggcggctgggcggcgaaaacgctgcgcgaccagggcttcgggggcgagatttgcgtagtggcggaagaggaatgggatttctatgaacggccgccgctgtccaaagccgcgttgctggataccgatgcgcagctaccgcgcttgttttcgcacgaggcgcagcaggcgctgaacctgacctggtaccgtccgctgcgtgcagagcggattgaccgactagctaaaacggtgattttaagcaacggcgaacgcctgagttacaacgtccttttaatcgccaccggggggcgagcgcgtctaccggacgagtcgtgggcggcgcatccccaggtttataccctgcgtcactggcaggatgcgcagcgtctgaaaagtcgtctggcggcaagtcaaaaactggcgatagtcggcggcggctggattggccttgagattgccgcttcggcgcgcaaatgcggcgtggccgtaaccctttatgagcagcagccagcattgtgcatgcgttcggtgagcgcggaagtttcgcaggcgctggcgcagatgcaccgcgagcagggtgtcgatattcgctgcggctgcggcgcgctggagctggaagaggataacgctctgccaacgctgcactgcgacggccggcgggaaaccttcgatgcggtggtggtggggatcggggtcgatcttaatctcgaactggcgcgcgacgcggggctgaaaaccgagcgcgggatcgttgtggatagccaggggcgaacgtcggatccgttcatctttgctgccggggatgtggcgcagcatcatcactacggcctgtgcatccagtcctgggccttcgcccagaatcaggcggtggcgacggcaaaagcgatgctcaaccccgatgcgccaggctacgacgacgcgccgtggctgtggtcggatcaatatcagcacaatatccagatcctcggtattccgcagccgggcagcagaacgatagcgcgtgaagattcgctgtacttctcgctggacgaaaacgggcggctgacgcagctggtggcgtttaatgatgcgcgcaccgtcaagctggcgaagcgctggatggcggcggggcgagatttatccgctgtaccgctcgccgatccggctttttcactgatgtcattgcgatag

SEQ ID NO: 172934 - DNA, 1257 bp, Klebsiella oxytoca
atgaccacattagagactaacgccgcgcctgctgaggcgagcggcgagggcatccgcacgcctgaaaaagcggttcgctgggccattccgctgtcgctgctggcctgcgtactgctggcgttcttcgacaaaatcagcatcgccgcgctgttttccgatagctacttccagcaggcgatggggatcgatttcgacaccacccgtctgggcatactgatgagcgctttcctgctgagctatggattctcttcggtgctgctaagcggcctgggcgaccgtattgcgccgctgcgcctgcttaccggaatgatggcggtgtggtgcgttttgatgctggtgatgggctttacccataactatacgctgatggtgacgctgcgaattttgctgggtatcgccgaagggccgctgttcccgctggcgttcgctatcgtccgccatacctttccccagcatttgcaggcgcgcgccaccatgctctggctgctcgggacgccggtcggcgcggcgattggcttcccgctgtcgatttggttgcttaacaccttcggctggcagagcaccttctttgtgatggcgatgctgacggtaccggtactgatttttgtgcgcatcgggctgcgcggcatcacgctggaggcaaaagccagcggcgggcaaacgtcgcaggaggcacgccgcagcgcgcgccgcgagctgtttgtcagcccgcacttctggatgatctgcatcttcaacatcgcctttctcgcctatctgtggggcatcaacggctggctgcccggctacctgattaagggtaaaggcattcatctcgaacacgccggctggctgtcgtcgatgccgtttatcgccatgctgctcggcgaaattatcggcgcctggctgtctgaccgcgtcgataagcgcgccgccgcctgctttatttccctggcgggcgcaggcattggcctggcggcggtgatgcattttaccaccccgctgccggtgattgcggcgatgagctttagcacctttatgtgggggatcggcgcaccgaatatttttgcgctgctggccaaggcaacccatccgcgagtcagcgccacggcgggcgggattttcaacgggctgggaaactttgccggggcgttatcgccggcggtgatgggcgcgctgatcgccttcacccacagcatggattccgggctgatttttctggcggtgatggcggcggtgggctgcgtcctgttactgccgctgctaagacgttactga

SEQ ID NO: 172935 - DNA, 531 bp, Klebsiella oxytoca
atgactgattcaaccgtaactgcaaaaccgagtctcaaacctgaacatctgacgatggaggagtgggtcgagtcgcgtatcgcgcgctttgaaggccgtaaatacgactggaatgcgctgaagttccaggcagattttgacccgaaatatcgtcgcgcgcagatgcgctacattggcaccggcgcgaccggcgtcgccagcgatagcaataccgtccaggcggaacactttaccttctccaccatggtactgccgtccaggtgcgaaggccccctgcacctgcatgatgatgtggaagaggtgttcttcatgctcaaagggcagatcactctgatgattcaggatggcgacaactacaccgagaccgttctgcgcgaacgcgatctgatttctgttcctgccgggatttatcgcgggctattcaaccacggcgaggaagaagcgctgatgtgcgtgatgctcggtacgccaaagccgcatattccgacctacccggaagatcatccgctgtcgaaagtgaagcgtagctaa

SEQ ID NO: 172936 - DNA, 771 bp, Klebsiella oxytoca
atgacgggttttcgtgaacaaggaagcggtacgccgctgacgctgctgcacggcatcagttccggcgcggcctcctggcataaacagatggcgcttcccggctaccgcgtgctggcctgggatatgcccggttatggcgaaagcccgatgcttgcgacggcgagggcggatgccggcgcctacgccgatgcgctggcgcggatgcttgaccgcgccggggtgcagaaaaccgttctgctcggccattcgctgggcgcgctggtcgccgccgctttcgccgccagatatccccagcgcgtgcggtatctggtgctggccgacgtcgcccagggctacggccaggcggaggccgcgcagcgggaaaaaatctggcaggggcgtcagcagcaaatggctttgggcggcgaggcgatggccgaggggcgggcggcgaagctgctgcgcgccggcgcgcgcgaagccgatgtggcgacggtcgcggcaggcatgcgcaggctgcgcagtgaaggctatctcgccgccgcctggatgctggcgcacgacgacatccaccgctggcttgccgggtatcgcggccgcttcgccgtgtggtgcggcgagcaggatgccatcacccagcccgagctggtgcagggggtggcgctacgctacggcatgccgtatctcgccatcccgcaggccgggcacgccagctatctcgataacgctacgttttttaaccaacagcttttacgcataggggaagaggtgcgcgatgaatgcacaaattga

SEQ ID NO: 172937 - DNA, 795 bp, Klebsiella oxytoca
atgaatgcacaaattgaaggacgcgtcgcggtggtcaccggcggctcgtcagggattggcttcgaaacgctgcgcctgctattgggcgaaggggcgaaagtcgccttttgcggccgcaacccggaccggctggccagcgctcacgcggcgctgttaaacgaatatcccgcaggagacgtgttttcctggcgctgcgacgttctgaacgaacaagaggttcaggcctttgcagatgcggtcggggcccactttggcggcgctgacatgctgataaacaatgctggccagggctatgtcgcccatttcgccgatacgccgcgcgaggcctggctgcacgaagccgaactgaagctgttcggggtgattaatccggtcagggcgttccagccgcagcttgaacggtcggacatcgcttcaattacctgcgtgaactcgctgctggcgctgcagccggaagagcacatgatcgccacctcagccgcccgcgccgcgctgcttaatatgacgctgaccctgtcgaaggatctgattggcaaagggattcgcgtcaattccattctgctgggcatggtcgaatccgggcagtggcagcgccgttttgcagaccgcagcgataagagccagagctggtcagagtggaccgccgacatcgcccgtaagcgcgggatcccgatggcgcggcttggcaaaccacaggaaccggcgcaggcgctgctgtttctcgcttcgccgctggcttcgtttaccaccggcgcggcgctggatgtgtccggcggcttttgccgtcacctgtaa

SEQ ID NO: 172938 - DNA, 765 bp, Klebsiella oxytoca
atgaaaaaggtgatgttaatcggctatggcgcgatggcgcaggcggtcattgagcggttaccgccgcaggtgtcgctgggctggatcgtggctcgcgagccgcatcatgcggcgatccgccagcagtttgccggggcggttacgccgctgagcgatccgcagcagtgcgatcggacgccggatctggtgcttgaatgcgccagccagcaggcggtagcgcagtacgccgaggcggtgctggcccgcggctggcatctggcggtgatctccaccggcgcgctggcggatagcgaactggaacagcgccttcgccaggcgggcggcaagctcacgctgctggcgggcgcgatagccggtattgatggcctggcggcggcgaaagagggcggccttgagcgcgtcacctatcagtcgcgtaaaagtccggccagctggcgcggcagctacgctgagcagcttatcgatctcagcgcggtacatgaaacgcgcattttctttgaaggcagcgcccgcgaagcggcgcggctgtttccggcgaatgccaacgtggcggcgaccgtggcgctgggcggtattggtctcgatgccacccgggtgcagctgatggtggatccgacgacccaacgcaacacccatacgctgcacgccgaaggactgttcggcgagtttcacctggagctgagcggtctgccgctcgccagcaatcccaaaacgtcgaccctggcggcactgagcgcggtacgcgcctgctgcgaactgacataa

SEQ ID NO: 172939 - DNA, 1470 bp, Klebsiella oxytoca
atggacgagttagacatttttatcggcggtcagtggcggcgcggcggtggcaacctgatgcacagccgctttccggcggatggatcgcttaacgcttcattatatgcggccagcctggacgacctgcaggaggcgatcgactgcgccgatcgcgcatggcgggaaccgacgtggcggaccatgctgccgcatcagcgggcaaagatcctgcataacgtcgccgatctgattgaagcgcaaattgacgagttaacccgtaaacagagccgcgacaacggtaaaccgctggcggaagcgcggggcctggtcatgagcgcggcgggcaccgcgcgctattttgccgccgcctgcgaactgctggaaggcgagctgccgacgccgcgtcaggcggatctgctgaccttgagccgctatgaaccgctgggcgtagtggcggcgattacgccgtggaactcgcccatcgccagcgaaatgcagaaggtggctccggccatcgccgccggtaacgcggtgatcctcaagccggcggaagcgacgccgctgatggcgctggagctggcgaagatttttgcacaggccggattacctcccgggctgctgagcgttctgcccggaaaaggctcggtcattggcgatgcgctggctcgccatcctaaggtgcgcaaaatttcctttaccggcggtaccgctaccgggcggcatctggcgcacgtggcggcggaaaagctgatcccggcgtcgctggagctgggcggaaaatcgccaactattgtgctggaagatgccgacatcgaacaggcggcgcggggtatctgctacggcatattcagctccggcggccaggcctgtatcgccggatcgcgtctgttcattgatgaaaaagtctatccgcaattaatggcccgcctgctggaattaacccgagggctgcgggtgggccacccgtttagcggggatacccacgtcggaccgctgattaacgataagcatcgtcagagcgtgctggagtatgtcgagctggcgaagcgcgaaggcggtagcgtgctgtgcggcggcgagatcccggcggatccggcgctggcggcgggcagctacttcctgccgacgatcgtcgagggactcaacaaccgggctcgcgtctgtcaggaagagatctttgggccggtactggtggcgatgcgctttcgcgacgaagcggcgctgatccgcgaggccaatgattcggtgttcgggctggccgcggggatctggacgcgcgataccggccgcgccctgcgcctgagcgaacagctggaggccggtacggtgtggatcaacacctacaaggttttctctatttccaccccgtttgggggatttaaagagagcggtctgggccgcgaaaaaggtatccagggcctgaaggcctggatgcagcagaagagtatttatctggcgacgggtaatagcgtcaaccactggtgtgattga

SEQ ID NO: 172940 - DNA, 1641 bp, Klebsiella oxytoca
atgagtgaaatgataaccgtcggcgacgccatcgccagaacgctggagcagtatcacgttgaagccatatatggcgtcatttctattcacaatctgccgatcgccgatgccgtcggccagcgggaaaaaatccgcttcgtcccggcgcgcggggaggcgggatcggtgaccatggccgacgcccacgggcgtttttccgggctcggcgtggcgctgaccagcaccggcgccggggcgggcaatgccgtcggcgcgttggttgaggcaatgaacgccggcacgccgctgctgcacctgaccggtcaggtcgaaaaggcctggctggatgccgacaccgggtttattcacgaaacccgcgatcagctgaccttcctgaaagccagctcaaagcgcgcataccgtatcagtaacgccaatcaggcggtagcgctcctgcataaagcgattcaggatgcgcagacgccgccgtgcggtccggtctcggttgaaattccgatcgatattcaaagcgtgaaaattccgctttcgctgctgaccacgccgctgaaaacgccaccggtggcggaagctgaagaggcaatggttgatgcgctgtgggcgcagcttaagcaggcgaagcggccgctgctgtggctcggcggcggagctttagaaagcggcgaggcggtgaagacgctggccgatgccgggatgacggtgatttccagcacccatggccgcggtattctgccggatagccaccgcgccagcctgcgcgcatttcacaattccccatcggttgaagcgttgatttcacaatgtgatttcacacttgtcgctggttcacgtctgcgcagtaacgaaacgcgctcatggacgctggaactgcccgcgccgcgggtgcagattgatatcgacccggcggcggccagccgtaactatctgatggacaatacgctggtggcggactgccgcgcgtttttagacgcgctggcggaacgagcgcaggggcgaatatggggcgacgcgcgctgggatagccaaataaaagaagcggtggcgatggcggagcaggggctgcgcgaacagtgcggtgattacgccagattaaatgacgctatcgcgcaggcgctgccggagaacggtatcctggttcgcgatattaccgtgtccggcagcctgtgggggagccgcctgtttcgcgcccacggtccgctgatgaatattcattctctggccggtgctatcggtatggggctgccgatggcgatcggcaccgcaattgctaatccgcagcgtaaagtggtggggctggtcggcgacggcggactgagcctgaacctcggcgagctggcgacgttggcacaggagaaggctaacgtgacgctgctgattatgaatgacggcggctacggcgtgatgcgcggtattcaggataagtactttggcggccgccagtattataacgagctgcatacgccggactttacgctgctggcgcaggccatcggtctgcaggcgtggagcgtcgatcgggcggatgatttccaggcggtgatgaccgaagcgctggcgatgccggggccctcggtggtggaagtgaagatgggccagatcggcgcgctgcgttttgccgggccgccgcaaaagacgctgtattaa

SEQ ID NO: 172941 - DNA, 1353 bp, Klebsiella oxytoca
atgattgctttcaacattatttcaggagaatatccgggctgcagtgattcccttgaatatatcgacagcagagaagtcccatcagtgaaaaaagaattatcgttaatcgcacttggctttattgccaccgcgccaacctttgccagccaacaatcaacgagtcagggctttatcgaagacagtcatctggatctgtttttacgcaacgcttatatcaaacgtgattatcgcgatgggctggcggataaagccgaatggggacaggggattatcgccaccttcgagtccggctttactcagggaccggtcggcttcggcgtggacggtattgcccagtatggcgtaaggcttgacggtggccgggggcgcagcggcgcggggggcatcgactttttcgcccaggacaacgacggccgggcaaaatccgatctcgctaaattcggcgccaccgccaaaatgcgcttctctgataccgtgctcagctacggcaaccaacgccccatgctgccgatcgtctacgccgacgattctcgtctgctgtacgagagctataccggtaccatgctaacttcgaaagaaattgacggtctggaaatcaacgcgggctatctaaccgatcaacagcgtaagagcgacgacagtcatgacagcggtttgaaaagcctgactttcggcggcgccagctatcagttcagcgaccagttcagcggcgcgctttatgcctctcacgtcgaagacgtgctgaacaagcaatatctcggccttaactataagcagccattcgctactggccagcagctgatactcgattttaacggctataattcacgtctggagcaagaatacgccgatgcccagaacaccggacgcagtaacagcatctggagtctggccgccagctatatccgggatatccatacctttaaagttgcataccagcaaagcagcggtagtacgggctatcactacggcggctatcgcaaccagggcggcgtcggcgacggcggcaataccatctggctggctaactcctactggtctgattttaatggcgaagatgaacgttcctggcaggcctcttatggactggattttgccgggctgggtttaccaggactgacctggactaccgcctacgtgcgcggcgataacattaaaactgcggaaaccagcaatggtaaagaacacgaatggttcaaccagctgcaatatcaggttcagaacggcgtggcgaaagatttgaagttcagattgcgctactcggtgctgcgggtttccagcaatgccagcgactataacgtcagcggcaatgaagtgcgtttttacgtcgaatatccgtttaacgtattttaa

SEQ ID NO: 172942 - DNA, 759 bp, Klebsiella oxytoca
atgaaaattcgctcagctcttcttgcccttgggatcgcagcaacgcttaccggatgtcagaacatggactccaatggtctgcttagctccggcgcagaagctttccaggcttattcactcagcgatgagcaggtcaaggccctaagcgacaaagcctgtcaggagatggatgcgaaagcgactatcgcgcctgccagcagtgaatacagcaaacgtctgagtaaaatcgccgccgcgctgggggacaacatcaacggccagccggtgaactataaggtgtaccagaccaaggacgttaacgccttcgccatggctaacggctgtatccgcgtttacagcggactgatggatttgatgaatgataatgaagtcgaagcggttatcggccacgaaatgggtcacgtcgcgctgggccatgtgaagaaaggcatgcaggtggcattaggcaccaacgcggtacgcgcggcggcggcctccgctggcggtatcgtcggcagcctgtcgcagtcgcagctgggcgatcttggcgagaagctggtgaactcacagttctcccagcgtcaggagtccgaggcggatgactactcgtacgatctgctgcgcaaacgcggaattaatcctgcgggcctcgcgaccagcttcgaaaaactggcgaagctggaagccggacgccaaagctcaatgtttgatgaccacccggcatcggaagaacgcgctcagcatatccgcgatcgcatgaaggccgacgggattaaataa

SEQ ID NO: 172943 - DNA, 1719 bp, Klebsiella oxytoca
atgtttagtctcgacaatgtcatcgatgacctgtggcctcaggcaaagccagcgctctggcagaaaaaggtgctgaaaaagctcctgcatgaggaagagtttcagcagtttgccgcgcgtcatcatcacctgaaaggactggatacggtcgaacaggtgctcgaacatcttaatatccgctgcgctatcccggcgcacgatctcgaacaaatccccgaacatggtccgctggtcatcatcgccaaccaccccaccggtacacttgacggcctggccctgctctacgcggtgtcccgcgtgcgccgcgacgtcaaagtggtcaccaaccgcatgctgactcaccttgaaccgctgagctcgctgtttattccggtcgataatatcaatggccgcaccgccaaagcggcgttgcagcagatggaccagcagttgcaaaacggcggcgtgctgattttcttcccggccggcgaagtttcacgcctcacccggcgcggtattcgtgataaaaaatggcactccggatttattaagctggcggcgaaataccgcgccccgctgctgccagcgtggatccgcgcgcgcaacagcgcactgttttacgccagtaccctgatgtccgagaatctgccgttactgctgctgatgcagcaaatgttccgtcgccgcaacagcagcctgccggtgaatattggtcaacagataacctggtcaaactggttcaatccgcaaagctcttctcgggaactgaccgagcgctgctatcgccacctggagctactcggcaaagggctgccgggtatattcaaaaccgaaagcgctatcgcccgtcccgaagaccgcgccctgctcaagcgcgagctggggaaggctgaaacgctgggacacacagcggatggtaaagtcatctatctctggcagcgccgcggccaggaagatgcgccgatactgcgcgagctgggccgtctgcgggaaatcgccttccgcgcggtgggggaaggcagcggcaaacgtcgcgacgttgacgtttatgacgacgactatctgcagctgattctgtgggatgaggaagatcttgagatcgtcggcgcttaccgttttatgccaaccgcaatacagctggaaaagcgcggcctgaacggcatctacagctacagcctgtttcattacgacgcgcgcatggacgatattctgcaacacggcattgaactgggtcgcagttttatccagccgcgttactggggccgccgcgggctggactacctgtggtccggcattggcgcgtatctggcgcgctatccgcactatcgctatctgttcggcccggtgtcgatttccggcgggctgccgccgtcggcgcgcgatctgctggtggctttttatcggctgtggttcccggcgacgcatccgctggcagagtcgcggcgtccttatccggcctcgctgcccgatgtactggcgcagtttggcggagaagattacaacgacgacctggcgcggctaaagtccctgctcggcaacctcggttgcgcgatcccgccgctgtataaacagtactcagaagtctgcgagccgggcggcgtgcagtttatcgatttcggcagcgacccggatttcaacaactgcgtggatgggctggtgctggtggatttgacctatctgaaggccaaccgctatcagcgctatattggggtacatctggacgcgcaaaaatcggcataa

SEQ ID NO: 172944 - DNA, 492 bp, Klebsiella oxytoca
atggtcgattatcgtcgttattacctcaagggtgggagctggtttttcaccgtcaatttacgcgacagagagagtcgatttctggttcagcatattgatgcgttacgacaggcggtggcaatagtccacaaacagaaaccttttcatattgatgcctgggtggtgctccccgaacaccttcattgcatctggaccttacctgacaacgacagcgattttccatcgcgctggagagcaattaaaaagcatttttcaggtttaacaggcgcgcataacgtgtggcaaccgagatattgggaacacgccattcgcaaccagaaggattaccgaagccatgttgattatatttatatcaatccgattaagcacgggtgggtaaggcaggtacgggattggccctattcaacctttcatcgcgatgtaagccgtagtttgtatcctgttgattggggtggggaagtgaaggaattattgtgcggcgagcgttattaa

SEQ ID NO: 172945 - DNA, 975 bp, Klebsiella oxytoca
atgacagatttaatcactcgcccacgccgcctgcgcaagtccgcttcgctacgtgccatgtttgaagagacaacactgagtttgaacgacctggtgttgccgatctttgttgaagaagaaatcgacgattacacggccattgaagccatgcccggcgtgatgcgtattccggaaaaacacctggcgcgcgaaatcgagcgcattgccaacgccggcatccgttcggtgatgaccttcggcatttcccatcacaccgatgccgttggcagcgatacctggaacgaaaacggcctggtggcgcgcatgtcccgcatctgtaaagaggcggtgccggagatgatcgtcatgtccgacacctgtttctgcgaatacacctcccacggccactgcggcgtgctgtgcgatcacggcgtggataacgacaaaactcttgagaatctcggcaagcaggcggtggtcgccgctgccgcaggcgcggattttatcgcgccttccgccgcgatggatggccaggtgcaggctattcgccaggcgctggacgccgccggatttactgatacggcgattatgtcctactccaccaaattcgcttcatcgttctatggcccgttccgcgaagccgcaggtaccgcgctgaaaggcgatcgtaaaacctatcagatgagcccgatgaatcgccgcgaagcgattcgtgaatcgctgctggacgaagcccagggcgccgactgcctgatggtcaaaccggcgggtccctatcttgatatcctgcgcgatctgcgcgagcgcaccaacctgccgatcggcgcgtaccaggtgagcggtgaatacgcgatgattaagttcgccgcccaggctggcgctatcgatgaagagaaagtggtgctggaaagtctcggcgcaatcaagcgcgccggcgcagatctgatcttcagctatttcgccctcgatctggccgaaaagaaaatcctgcgttaa

SEQ ID NO: 172946 - DNA, 1170 bp, Klebsiella oxytoca
atgctcccgttgaaacgtagtctgctcatttttgctgcgctgtgcgcggcgtcgttgacatcggtccaggccgcacagccgagcgtcgacccggaattcgccgctgatgtggtcgatcgttacgctaaccatatctactacggcagcggcgcagtcggtatggcgctggtggttatcgacggaaaccagcgcgtattccgcagcttcggcgagacgcgcccgggcaataatgagcacccgcagctcgattcggtgatccgcattgcctctatcagcaaattgatgaccagcgaaatgctggtcaaacttctcgatcagggcgtggttaagctcaacgatccgctaagcaaatatgctccgccgggtgcgcgggtgccgacttaccagggggcgcctatcacgctggtgaatctggcgacccataccagcgccctgccgcgcgagcagcccggcggcgcggcgcaccggccggtatttgtctggccaactcgccagcagcgctggaactggttatccaccgcaacgctgaaaaccgctcccggcacccaggccgcctactccaatctggcattcgatttactcgccgatgcgctctctaccgctgcaggcaagccttatccgcagctgtttgaagagcagatcacccgtccgctggggatgaaagacaccacctttacgccttcgccggatcagtgccggcgcctgatgattcccgagaaaggagccagcccgtgcaacaatacgctggcggctatcggcagcggcggcgtctattccacgccgggcgatatgatgcgctggatgcagcagttcctctcttccgatttcttcgcccgtgggcagcaggcggaccggatgcaaacgctgatttatcaacgcagccagctgacgaaggtgatcggtatggacgtgccgggtaaagccgatgcgctgggcctcggctgggtctacatgaagccgaaaaacggccagccgggcattattcagaagaccggcggcggcggcggctttattacctacatggcgatgaacccgcaggccaacgtcggcgccttcgtggtggtcacccgttcttcattgacgcgtttcaacaacatgagcgacgggatcaacgagctggtcagtgaattaagcggcgtccgcaccgggattgagaccgccagccagtaa

SEQ ID NO: 172947 - DNA, 534 bp, Klebsiella oxytoca
atggcggcgaaacgggtagtgatggtagtggatatgcaaaacggcgttttcgcgacgccgcgagttgagcgcgagcgctgcgcggcgcaaattaaccgcctgattaacgctgcggacaccgtaattttcattcagcactgcgaagcgggcggcctcgaagaggggagcgaaggttttgctttgctccccgagctgatccaacccgcaggctccctgtatgtgactaagaccgcctgcgacgccttttaccgtacccgtctggaagaggtgctgcgcgaacatcacatcacgcagtttgtgatttgcggctgcgccaccgactactgcgtggataccaccatcaaaaacggcgccagccggggctacgcgattactgtcgcggaagatgcccacactaccgccaaccgtccagcggcgccggccgtcacgctgatcgcccactacaacgatgtgtggcgttcactgaccgttcccggcaatcctttacaggtgaaaccgacagaaacaattcttagcggatggcaggcgaactaa

SEQ ID NO: 172948 - DNA, 1221 bp, Klebsiella oxytoca
atgtttaaatcctttttccccaaaccggggccgttttttatttctgcctttatctggtcgctgctggcggtgatcttttggcaggcgggcggcggcgactggctgctgcgggtcaccggcgcatcgcaggatgtggcgattagcgcggcgcgcttctggtccctcaactacctggtgttctacgccttctacatattctgcgtgggcgttttcgcccttttctggtttatttacagcccgcaccgctggcagtactggtcgatcctcggtacctcgctgattattttcgttacctggtttctggtcgaggttggggtggccattaacgcctggtatgctccgttctacgatcttatccaggccgcgctggcaacgccgcacaaggtcagcattaaccagttctatcacgaaattggcatcttcctcggcattgcgctaatcgcagtggtgatcggcgtgatgaacaacttcttcgtcagccactacgtcttccgctggcgtaccgcgatgaacgaacactatatggcgcactggcagcatttgcgccatatcgaaggcgccgcgcagcgcgtgcaggaagataccatgcgctttgcttccacgctggagagcatgggcgtcagcttccttaacgcggtgatgacccttatcgccttcctgccggtgctggtaacgctctcagcgcacgtcccggatttaccgattgtcggtcatctgccttacggcctggtgattgccgccatcgtctggtcgttaatgggtaccggcctgctggcggtcgttgggatcaagctgcccggcctggagttcaaaaaccagcgcgttgaggccgcctatcgtaaagagctggtttacggcgaagatgacgctaaccgcgcgacgccgccgacggtgcgtgaactctttggcgccgtgcgccgcaactatttccgcctctatttccactatatgtatttcaatatcgcccgtattctttatctgcaggtggataacgttttcggtttgttcctgctgtttccgtcgattgttgccggtacgattacgctgggcctgatgactcagataaccaacgtctttggccaggttcgcggttcgttccagtacctgatcagctcatggactacactggttgagctgatgtctatctacaaacgtctgcgcagcttcgagcgcgagctggatggcaaagagctgcagaccgtgacgcaaacattaagttaa

SEQ ID NO: 172949 - DNA, 1107 bp, Klebsiella oxytoca
atgccggtagcgcaatccagaatcacttctctcaccctgacgctactggcagggattgtcctcagcgcctgctccagcaaaccggagccggagctgaaaaagggcgaaaaggcgattgatgtcgccgcggtagtgcggcagaaaatgcccgccagcgtgaaggatcgcgaagcctgggcgcaggccatcgccaaaacctttgccagtcagaagctggcgccgacggaagagaacgtctgttcggtgctggcggtggcgcagcaggaatccaactatcaatctgacccggcggtgccggggctgaataaaatcgcctggcaggagatagaccgccgggcggaaaaaatgcacatcccggtttttctggtacataccgcgctgaaaatcaaatcacccaacggcaaaagctatagcgaacgtctggatagcgtgaaaaccgaaaagcagctgagcgcgattttcgatgattttatcggcatggtgccgatgggacagaagctgttcggctcgttgaacccggtacataccggcggcccgatgcaggtcagcattgctttcgccgagcagcacaccgacggctatccgtggaaaatcgacggtaccgtgcgccaggaggtgttcagtctgcgcggcggtctgtggtttggcacctatcatctgctgaactatccggcgaactacagcgtaccgctgtaccgttttgctgattttaacgccggatggtacgccagccgcaatgccgccttccagaatgccgtctctaaagcaacgggcgtgaagctggcgctggatggcgacttaattcgctacgacagcgacgaggcgggaaccaccgaactggcggtgcgccgcttatcctcccagctggcgatgagcgacgacgagatccatcgtcagttaaagaaaggcgacacgctggcgtttgaagagagcgatctttataaacaggtatttcgcatcgccgataagaaagccggtaaaacgcttccgcgggaagtcctgccgggtatacagcttgagagccccaaaatcacccgtaatctgaccaccgcctggtttgccaaacgcgttgacgaccgacgggccagctgtatggcgcgccgctaa

SEQ ID NO: 172950 - DNA, 303 bp, Klebsiella oxytoca
atggctgagttcacctttgcaaagaccgtcaacggcggcaaaaagaggagcgctattaccagcagcaacatcgcctatgctctgtttgtgctgttttgcttctgggctggcgcgcaaatgctgagcatgctaatccacgcgccgggcgttcttgagcacttgattcagatgcaggacagtagccgcccccgggtcgaaattggcctgctggtcggcaccctgtttggcctgattcccttcgtggcggccagcctgttaattggcatatcagggctgatttttcgctggcgcagccgccgttag

SEQ ID NO: 172951 - DNA, 204 bp, Klebsiella oxytoca
atgaaactcactgaaaaaatccgccgcgactggcactactatgcggttgccctggggttaatttttattatgaatggcgtagtcgggctgctggggtatgaaaccgaaggctggcgttcatacgcggttgggctggtgacgtgggtgattagcttctggatcgccggttttattattcgccgccgcccggcagaggaagcgtaa

SEQ ID NO: 172952 - DNA, 1098 bp, Klebsiella oxytoca
atggctaagatgagggttgggatcgttttcggcggtaagtcggcagaacatgaagtgtcgcttcagtcagcgaaaaatatcgtggaagcgatcgataaaacgcgcttcgacgtagttttgctggggattgataagcaggggcaatggcatattaacgacgccagtaactatctgctcaatccgcaggatcctgcccatattgccctgcgcccgtccgatattacgctggcgcagattcccggacgcgaggcgcagcagctgattaacgccgatagcggccagccgctggcggccatcgacgtcatcttcccgatcgttcacggcactcttggcgaagatggttctctgcagggtatgctgcggatggctaacctgcccttcgtcggctccgacgtcctcggctccgccgcctgcatggacaaagacgtcaccaaacgtctgctgcgcgatgccgggctgtcgattgccccttttattaccctgacccgcgctaacaggaatcaggtaagctttgccgaggtgcaggcgaagctgggcctgccgctgtttgttaaaccggcgaaccagggctcctcggtgggcgtcagcaaggtcaacagcgaagagcagtatcagcaggccgtcgccctggccttcgaatttgaccataaagtggtggttgaacaggggattaaagggcgtgagatcgagtgcgcggtattgggcaacgataatcccaaggccagcacctgcggtgaaatcgtcctcaacagcgaattctacgcctatgacaccaagtacattgacgatcagggcgcgaaagtggtggttccggcggccatcgacagcgatgtaaacgataaaattcgcgagatcgccgttcgtgcctatcagaccctcggctgcagcggcatggcgcgcgtcgatgtgttcctgaccgccgataacgacgtggtgattaacgaaatcaatacgctgccgggtttcaccaacatcagcatgtatccgaagctatggcaggccagcggcctggattacaccagcctgattagccgcctgattgaactggcgctggagcgtcacgccgccgatcgggcgctgaaaacatcgatgaattaa

SEQ ID NO: 172953 - DNA, 684 bp, Klebsiella oxytoca
gtgaaaggaaaaggtcttatcgttctgttggcgctgctggcggccggatattacggctatcgttatcttcccgcacagtacaatccattcgcgccgctgcgcctggaagaccccccgggactcctcagccactataaactgcggcgattaacgcccgccgagtgcgctggcctgcttgaggaggccaaccggcggaagctcatttccagccagccggtggccgatagcggaggagcgtgtcctctgcagaatgtggttcgggtgcgtgattttggcacggtgaagctcagcagcagctttcttgccagttgtccgctggcgttgagcagcgcgctatatctgcaacagcaggcgaaaccgttgactcgccggatgctggggcaagagctccgccagattgaccattttggcagctatgcctgccgtaatatttaccatcgccagaacgcgcggcgcagtgagcacgctaccgcggaggcgctggatgtcagcggctttcgtctgtccgatggccgacgcgtcagcgtgctgaaagggtggcccgatgcgcagtatcacccctggctgcaggcgttactggccggcggttgccgctattacggcaacgctttagggccggactataacgcggcccatgccaaccattttcacttcgggatgcgcggccagggtttctgtttctaa

SEQ ID NO: 172954 - DNA, 1200 bp, Klebsiella oxytoca
atggaatcctggaaggttaatcttatctccgtctggtttggctgtttttttaccggactggctatcagccaaattctcccctttttgccgctgtacgtttctcaactcggcgtaacctcgcacgaagcgttatccatgtggtctgggctgaccttcagcgtcacctttctggtgtcagcgatcgtctcgccgatgtggggcagcctggccgaccgcaaagggcgcaagctaatgctgctgcgcgcctcgctggggatggccatcgccattttactccaggcctttgccaccaacgtctggcaactgtttatcctgcgtgcggtgatggggctgacctccggctatattcctaacgccatggcgctggtggcgtctcaggttccgcgcgagcgtagcggctgggcgctgagtacgctttcaacggcgcaaatcagcggcgtgatcggtgggccgctgctcggcggtttcctggctgaccatgtcggtttgcgcgcggtctttatcatcactgctgttttactgaccgtgagtttcctggtgacgctgtttctgatcaaagagggcgtccgcccgcagatgagtaaagcggagcggctgagcggtaaggcggtgtttgcctcgctgccttatccgggtctggtaatcagcctgtttttcaccaccctggtgatccaactgtgcaatggttcaattggcccgattctggcgctctttattaagtcgatggcgccggatagcaataacatcgcctttcttgccggcatgatcgccgccgtaccgggcgtgtcggcgctgatttcggctccccgtctggggaaactgggcgacaggatcggcacctcgcggatcctgctggcgacgctatgctgcgcggtggtgatgttctttgccatgtcgttcgtcacaaccccattccagcttggcgtgctgcgttttctgctcggttttgccgatggggcaatgctgccggcggtgcaaacgcttctgctgaaatactgcagcgacagcgtgaccgggcggatttttggttataaccagtcgtttatgtatcttggcaacgtggccggtccgttaatcggcgcatcggtctcggccatggccggcttccgctgggtgtttatcgcgacggcggttattgtcctgatcaatatctggcagctggccatcatgctgcgtcgcagccgtcgtacaacggcttaa

SEQ ID NO: 172955 - DNA, 765 bp, Klebsiella oxytoca
atgcgaaatttattcgatttgacagggaagcgcgcgctgatcaccgggtctgctcaggggataggcaatttgctggccggcggccttgcggagtatggggcagaaatcatcatcaacgatcggactcaggcccgcgcggaccaggcggcgcaggcgctggtggcgcagggcttccgcgcggtagggtacgcatttgatgtcactcaggcgacgcaggtcgagcaggcgatagcccgcatcgaagcggaggtcggcgccattgatattttaattaacaacgccgggattcaacgacgtttcccttttaccgagtttccggaggaggagtgggataacgttattgaggtcaaccagaagggcgttttcctggtttcgcagcaggtggcgaaatatatgatcggccgccgcgccgggaagataattaatatttgctcaatgcagagcgagctggggcgtaaaaccattacgccttatgcggcctcgaaaggggcggttaaaatgctgacccgcggcatgtgcgttgagctggcggaatacaatattcaggttaacggtatcgcaccgggatattttgccaccgagatgaccaccgccctggtcaacgatgaggcgttttccgcctggctgtatcagcgcaccccggcggcacgctggggcaaaccggaagaactgattggcgccgcggtgtatctggcttcttcagcggcaaactttgttaacggtcatttgttattcgtggatggcgggatgcttgccgccgtctga

SEQ ID NO: 172956 - DNA, 1290 bp, Klebsiella oxytoca
atgcaaatgctcgcgaaattacccgtgcgtcgctggtggtatttaatgccgattatatttattacctatagtctggcctaccttgaccgcgcaaattatggttttgccgctgcggcgggaattgaaagtgatttagggattacgaaaggaacggcatcgcttattggcgcactattttttctcggctatttctttttccaggtgcccggtgcgatatatgcggtaaaacgcagcgtgcgaaaaatgattttcttcagtcttattttatggggattttgcgcggcggcgaccgggttcgtcagcaatattccgatgctgatggcgattcgctttacgctgggcgtggtcgaggcggcggtgatgccggcaatgctgatttatatcagtaactggtttaccaaaaccgaacgttcacgcgccaatactttcctgatcctcggaaatccggtgacggtgctgtggatgtcgatcgtttcgggctacctcattcaggcgtggggctggcgcgagatgtttattatcgaaggcattccggcggtgctgtgggcggtatgctggtggattctggtgcgcgataaaccgtccgaggtttcctggctgaatgagcaggaaaaagagaccctgcagaaggtgatggacagcgagcagagtcatatcaagccagtgcgcaactacggtgaagcgctgcgctcgcgcaatgtcattatgctctgcgcggtccatgcgctgtggagcatcggtgtgtacggcttcatgatgtggatgccgtcaattctgaaaaacgccgcgcagatggatatcgtggcggtgggctggctggcggcggtgccgtacctggcggcaatcatcctgatgctgacggtctcctggctgtcggataagtttcagaatcgaaagctgtttatttggccattattactgattgccgctatcgctttctttggttcgtggatggtgggcaaccaggcgttctggctctcttacctgctgctggtgattgccgcggcgtgcatgtacgcgccctatggcccgttcttcgcgctcattcctgaactgttgccgcgtaacgtctccggggtatcgatgggcctgatcaacagcttcggcgcgctcggcgctttccttggcgcgtggctggtggggtatctgaacggtattaccggcggaccgggggtatcctatacctttatggctatcgcgctgttgtcctccgtcgtgctgatgtacaacgtgcgcgctaacccacaacccgccacctcctcggtgacggcaaaaaaggtcgccggttaa

SEQ ID NO: 172957 - DNA, 993 bp, Klebsiella oxytoca
atgaaaaacaaccggatgacattgcaggatatcgccaacctggcggggttgaataaaatgacggtcagtcgttatttacgcgaccccggtcaggtttcccagcgcagccgtgagctgatttcgaaggtcatggaagagaacaactatattcctaatcgggcgccggaaatcctgcttaatgcccgcagcaaaacgattggcgtgctcattccctcttttcgcaatcagatttttgccgatgtgctggccggaatcgaatccgtcacttccgctcaccagtaccagaccctgattgccaactacgaatacgatccgcagcgtgaagagcgcgaggtgcttaacctgctctcttataacattgacgggctgattttgaccggaaaacagcatagcgatcgcatggtgcaatacgtccgcgccagcggtattcctgttgctgaactgatggattttggcggtcagcaactggatatccaggtaggtttcgataacgaaaaggcggcgtgggacatgacgaacgcctttcttgagagcggtaaacgggcgatcgccttttttggttcaatggacgatccccgcgatttaagccgctttcacggaaccgaactggcgctggcggcccacggtttgaagccctatcatatggcgccgcgcaccatctcctcggttgcgcttggccggcagatgtttctgcaaatgcagcaggtgcggccggatatcgatgcaatcttttgtaccaacgacgatctggcggtaggcgtgctgctggagtgccaggctcagggaaaaaccgtcccgcaggagatggcgattgccggttttcacgggctggaaattggccgcgcccggctgcaaaaaatcgccagcgtcattaccccacgttatgaaatcggtaaaactgcgagcgaaatacttattgcacgtctggccggaaaagacgcgccggacagcgttaatctggcctaccagatatattatggcgatacgttatag

SEQ ID NO: 172958 - DNA, 261 bp, Klebsiella oxytoca
gtgaagaatctcattgctgagctactggtaaaactcgcccaaaaggaagaagaatcgaaggaactgacggcccaggtcgaggcgctggaagtggtggtcactgctctgctgcgccatatggcgcaggacgcccagcaggcgctcatcagcgatatcgagcaggcgatcgacgaggccagccccggcccgctggtcgatgaccgcgatacccagctactgcagcaatatataaaaaagctgttacggcatcctcgtagttag

SEQ ID NO: 172959 - DNA, 1416 bp, Klebsiella oxytoca
gtgaaattaagcgccctgtttattgccctgctacctctgctgggctccccgattattcacgcagaaacaacaaccgcaccggttctggaaaatcgcgccgcccagggcgatatcaccacgccgggcggcgcgcgtcgtttaagcggcgatcggaccgaggcgctgcgcgcttcgttaatcaataaaccggctaaaaatattattttgctgattggcgacgggatgggggattctgaaattaccgccgcgcgaaattatgcagaaggggcgggcggattttttaaagggattgacgcgctgccgctgactggccagtacacccactattcgctggataagaaaaccggcaagccgaattatgtgaccgactccgccgcttccgctaccgcatggaccaccggcgtaaaaagctataacggcgcgctgggcgtcgatatccatgaaaaagatcatcagactatccttgagctggcgaaagcggcgggtttagccaccggtaacgtctcaacggcggaactgcaggacgcgacgccggctgcgctggtggcgcacgtcacttcgcgtaaatgctacggcccgagcgtgaccagcgaaaaatgcgccagcaatgcgctggaaaagggcgggaaaggttccattaccgaacaactgctgaacgcgcgtcccgacgtgacgctgggcggcggagcgaaaaccttcgctgaaagcgcgacggccggcgaatggcagggcaaaacgctgcacgagcaggcggtggcccgcggctaccagatcgttaccgatgccagctcattggccgccattagccaggcaaatcaggataaaccgctgctcggtctcttcgcggaaggcaatatgccggtgcgttgggaaggcccaaaggcgtcttatcacggcaatatcgataaggcggcagtaacctgtactccgaacccgaaacgcgatgcatcggtgccgacgctggcgcagatgactgaaaaagccatcgatctgctgagcagcaatgagaaaggcttcttcctgcaggtggaaggcgcttccatcgataaacaggatcatgcggcgaatccgtgcggccagattggcgagaccgtcgatctggatgaagcggtacagaaggcgctggaatttgccaaaaaagagggcaacaccctggttatcgtcaccgccgaccacgctcacgccagccagattatccccgccgataccaaagcgccgggcctgacgcaggcgctgaacaccaaagatggctcggtgatggtgatgagctacggcaactctgaagaagagtcgatggagcataccggtactcagctgcgtatcgccgcctatggcccgcatgcggctaacgtggtgggcttaaccgatcagaccgacctgttttacaccatgaaagccgcacttaatctgaaataa

SEQ ID NO: 172960 - DNA, 321 bp, Klebsiella oxytoca
atgaaaataacattacttgtgaccctactttttggcctggtatttatgacagcggtgagtgccgcggaaaaagagttgaccccccagcagcaaaagatgagcgtctgcaataaagaagcatcagcgaagtcgctaaaaggggatgagcgtaaaacgtttatgagcagctgcctgaagaaagagggcgcggcccaggacggtaaggggttaacgcctcagcagctaaaaatgcgcgagtgcaacggtcaggcgacccagcagtcgctgaaaggtgacgatcgcagcaaatttatgagcgcgtgcctgaaaaaacaggtgtag

SEQ ID NO: 172961 - DNA, 810 bp, Klebsiella oxytoca
atggagaagaaaatcggctttatcggctgcggcaacatgggcaaggccattctcggcggcctgatcgccagcgggcaggttcagccgggacaaatctgggtctacaccccgtcgccggataaagtggcggccctgcacgaccagtacggcataaatgcggcgcaaagcgcgcaggaagtggctcaggtagcggatattatctttggcgccgttaagccgggcgtgatggtgaaagttctcagcgacgttgcctccagcctgaataaagactctctggtggtttccattgccgctggcgtcaccctcgaccagctggcgcgcgctctgggccacgatcgtaaaatagtccgcgcgatgcccaatacgccttcgctggttaatgcgggcatgacgtcggttacgccaaacgcgctggttagcgccgaagagaccgcggatatcctgaccatcttccgttgctttggccaggcggaaattattgctgagccgatgatccacccggtggtaggcgtcagcggctccgcgccggcttacgtctttatgtttatcgaagcaatggctgatgccgccgtactcggcggaatgccgcgcgctcaggcatataaattcgcagcccaggcggtgatgggctcggccaaaatggtgctcgaaagcggggaacatccgggcgcgctgaaggatatggtgtgctcgccgggcggcacgacgatcgaggccgtgcgcgtgctggaagagaagggtttccgttccgccgttatcgaagccatggcgaaatgcatggaaaaatcagagcagctgagccgttcctga

SEQ ID NO: 172962 - DNA, 459 bp, Klebsiella oxytoca
atggctatttgggttgatgcggacgcgtgtccgaacgtcattaaagatattttgttccgcgccgccgagcgtacgcaaatctcgctgacgctggtcgctaaccagccgctgcgcgtcccgccgtcgcgctttattcgcacgctgcgcgtggcgcagggttttgacgtggcggataacgaaatcgtacgtttatgtgaaccgggggatctggtgattaccgccgatatcccgctggcggcggaagtgctggcgaagggtggggcggcgctgaacccgcgcggcgaacgctacagtgaggcgacgatacgcgaacgcctcacgatgcgcgattttatggaaacgatgcgggccagcggcgtgcagaccggcggcccggatagcttatcccagcgcgatcgacagcagtttgccgccgcgctggagaaatggctgctggacgtcaagcgccagcagggttaa

SEQ ID NO: 172963 - DNA, 699 bp, Klebsiella oxytoca
atgcaatctgaagagcaacgccttatcgatggactgttttcccggttaaaagaggccgagagccgcagcgcatcgcgcgattccagcgccgaggagcggattgccgggcacattaaagaacaaccgttcgccccttactatatggcgcaaacgattctgattcaggaagcggcaatcaagcagctcaacgagcggattcaggcgctggaaagtcaggtcagccagctgcaggccgcgaagccgagcagcggtggctttctctctggtctgtttggcggcggtcagtctcgcggttccgatcccattcctggggccgagcagtatggtcgccctcaggccagcgtccagcctcagtatgctccgcagacgcaacagcagagctatgcgcctcagggcgcccgcagcggcggcggttttatggccggtgcgctgcaaacggcggcgggcgttgcgggcggggtggtgctgggaaacatgctcaccaatatgtttagcggctcgcatccgcaggagatcgttaatatcatcgaagagaaaccgcagccggatctcagccaggcgcaggacaatagcgtcgctgacgataccttccgccaggatgacagtcagttccttgccgacaacaacgactatgatgccgacttcgacgccggttttggcaacgatgatttcggcagcgacgacgacagctgggtttaa

SEQ ID NO: 172964 - DNA, 528 bp, Klebsiella oxytoca
atgacacagctaatttttcttgtcgggcctcgcggctgcggtaaaacgacgatcggtcatgcgctggcggaagctcgcggtttccagttcgccgatacggatcatgagcttcaggagcatgaacaacgcagcgtggcgactatcgttcagcaggaaggctgggaacgctttcgcgctctggaaacgcaggcgctggaacgcgtcgctcaacccgcaacgatcatcgctaccggcggcggcattattctcagcgaatacaatcgtcagtttatgcgggaaaatggcgtcgtgatctatcttgaggccacggtttctgccctgattggtcgtcttgaagcctatccgaaggcggaacagcgccctacgctgaccggaaagccgatccgcgatgaagtgggggaggtgctggcacagagggaagcgctgtatcgggccgccgcgcatcatattatcaacgcgaccgtcccgccggatgaagtcgttgaacagattatgacgaccgtctgcggtgagacctataccagttaa

SEQ ID NO: 172965 - DNA, 192 bp, Klebsiella oxytoca
atgccgaccagacctccatatccaagggaagcgcgcgttgtcgccgttgagaaaggccccgaggggcaaacggtgacctggtatgaactgcgcgctgaccatccgacgcctgactcgcttatcagtgagcaccctacagaacaggaagcgctggacgctaaacggcgttacgaagatcctgataagtcataa

SEQ ID NO: 172966 - DNA, 666 bp, Klebsiella oxytoca
atggcaattttgaccattggggtggtaccggtggcggagatgttgccgcttttaactgaacatatcagggaagatcagattaatcatattagcctgttaggcaaaatggcgcgcgaagaggttatgcgcgattactgcgtggaacccggcgatgaagcgctgttaaccttgctcaatgataatcaaatcgcgcaagtctcgcggcagaaagttgaacgtgatttacatagcgtcattgcgatgctcgataaacaaaattacgaccttattttactgatgagtacccatccttttagcggatttaaagcaaataatgcaatcctgctcgagccgcaaaggatcattccgccgctggtcgcgtcgattgttgacggccatcaggtgggagtaattgttccggtggaagagatgctgccgctgcagcgggataaatggcaggtgttaacgcatactcctttttatgctatctgcagtccggttaacggtagtaaagaacagctgctggccgcgggcagggagttaattgaacaaggcgctgacgtattaatgctggattgtctttgttaccaccagcagcatcgcgatatattacaaaaagcgctggatattccggttttattgtcaaatatactgatttcacggctggcggcagaactattagtttaa

SEQ ID NO: 172967 - DNA, 285 bp, Klebsiella oxytoca
atgcttcaaagcaatgaatactttgacggaaaagtaaaatccattggcttcaccagcagcagcaccggtcgtgcgagcgtgggcgttatggcggaaggggaatacaccttcgggaccgcgcagccggaagagatgaccgtagtcagcggcgcgctgaacgttcttctgccgggagaaaccgagtggaaagtctatgccgccggggaagtattcaacgttccggggaatagcgagtttaatttgcaggtggctgaacccacgtcttatctgtgccgctatctgtaa

SEQ ID NO: 172968 - DNA, 912 bp, Klebsiella oxytoca
atgctgtggttcaaaaatttaatggtttatcgtctcagccgcgacatttccctgcgcgccgaggagatggaaaaacagctggccgagctgacatttaccccatgcggcagccaggatatggccaaaaccggttgggttccgccgatgggctcgcacagtgatgcgctgacccatacggcaaatggccagatagttatctgcgcgcgtaaagaagagaagatcctgccgtctccggtgatcaaacaggcgctggaagcaaagatcttcaagctggaagccgaacagggccgtaagctgaaaaaaacggaaaaagattcgctgaaggatgaagtgcttcattccctgctgccgcgcgcctttagccgcttcagccagaccatgatgtggatcgataccgtcaacgggttgatcatggtggactgcgccagcgccaaaaaagcggaagatacgctggcgctgctgcgtaaaaccctgggctcgctgccggttgttccgctggcgctggaaaccccgatcgaactgacgctgaccgagtgggtacgttccggtaccgtggctcagggcttccagctgctggatgaagccgagctgaaagcgatgctggaagatggcggcgtgatccgcgcgaaaaaacaggatctggtcagcgacgagatcgccgtgcacattgaagccggtaaggtcgtcaccaagctggcgctcgactggcagcagcgcattcagttcttaatgtgcgatgatggttcgattaaacgtctgaagttctgcgacgagctgcgggaccagaatgaagatatcgaccgggaagatttcgctcagcgctttgacgcggactttattctgatgaccggcgaactggccgcgctgattcagaatctggtagaagggttaggcggcgaagcgcagcgctaa

SEQ ID NO: 172969 - DNA, 906 bp, Klebsiella oxytoca
gtgcgcattgggattgatttaggcgggaccaaaacggaagtcatcgcgctgagcgaccagggagagcagctatttcgccaccgcctgcctacgccagggggggattatcgccagacgatagagacgatagcctcgctggtcgagatggccgagcaggctaccgggcagagcggcacggtcggcgtcggcatccccggttcgatttcgccttataccggcgtagttaaaaatgccaactcaacgtggctcaacggccagccgtttgataaagacctttgccagcgcctgcaacgtgaagtgcgtctggccaacgatgccaactgcctcgcggtgtcggaagcggtcgacggcgcggcggccggggcgcaaacggtattcgcggtgatcattggcaccggctgcggttcaggcgtggcgcttaacggacgcgcccatattggcggcaacggcacggcgggcgagtggggacacaatccgctgccgtggatggatgaggatgaactgcgctatcgcgctgaagtaccgtgctactgcggtaaacagggctgtatcgaaacctttatttccggcaccggctttgctatcgattacaagcggttaagcggccaccagctaaagggcagcgagattatgcagcgcgtcagcgagcaggatccggtggcggaactggcgctgagccgctacgagatgcggctggcgaagtcgttggctcacgtggtcaacattctcgatccggacgtcattgtgcttggcgggggaatgagcaacgttgatcgtctctatcaaacggtgccgaatctgctaaaaccatgggtattcggcggtgaatgcgagacgccgattcgccgggcggtgcacggggactccagcggcgtgcgcggcgcggcctggctgtggccgctgtaa

SEQ ID NO: 172970 - DNA, 363 bp, Klebsiella oxytoca
atgaaaaatttactaattttgattgccggcccggtacgcagcggcactcacaatcgcgcggaactaatcgacgctaacctgaacaatatggcccaggttgcgctacgcgtttatcagaaaggacatatccccgtggtcggcgaatggctggctctccccattgccaaagccgcgggctccacggaaattggcgatgcgattagcgaggaatatctctaccccgtcgcccaccggttaattagccgctgtgacgctattttacgcctgccgggcgaatctcgcggcgcggatctggatattgaggaaggcaaaaaaagggggctgtcgatttactacagcctggaagagatcccggaccgataa

SEQ ID NO: 172971 - DNA, 3135 bp, Klebsiella oxytoca
gtgaaaatactcagcttacgcctgaaaaacctcaattcactgaaaggtgaatggaaaattgatttcaccgctgagccgttcgccagcaacggtctgttcgcgattaccgggccgaccggcgccggaaaaaccacgctgctggatgctatctgcctcgcgctctatcacgaaaccccgcgcctgagcagcgtgtcgcaatcacaaaacgatctgatgacccgcgacaccgccgaatgtctggcggaagtggagttcgaagtcaaaggcatcgcctatcgcgccttctggagtcagaaccgggcgcgaaaccagccggacggcaacctgcaggtgccgcgcgtcgagctggcgcgctgcgaggatggcaaaatcctcgccgataagatcaaagacaagctggaaatgaccgcctcgctcaccggcctggactatggccgcttcacccgctcgatgctgctatcgcaggggcagttcgccgccttcctgaatgctaaaccgaaagagcgcgccgagctgctggaagagctgaccggtaccgaaatttacggccagatttccgcgcaggtctttgaaaagcataagcaggcccgcgtcgagctggagaaaatccaggctcaggcttccggcgtcctgctgctaagcgacgaccagcagcaggcgctacagcaaagtttgcaagcgcttactgatgaagaaaaacagaaggttagcgaacaaagccgtctgcaaaatgcccgtcagtggctggtacgccgcgcagagctgacagcagaagatctgcaggcgcagagcgcgctacgcgaagcccaatctgcgctggagcaggcgcagccgcagctgaccgtgctgctgaatgcccagcctgcagagcacttacgtccacagtggacgcgtcagcaggaacaaaccaccgcgctggcgcaaacccgtcgcctgagagaagaagtaaatactcgcttacatgaaaggctgcgacggcaagcggggattcgcctcgccgcccgccagcagtctgaacgcctgcagagccaccagcaaacgctctccgcatggctaaaagagcatgaccgttttcagcggtggggcaatgcgctggcgggctggcgggcggctttccagcagcagactcgcgatacccagcagcaagccgccctgcagcaacgtctggcggaaacccgtcgcagactggcagacctgccgcccgccgggctgacgctggatgccgaacaggtcagcgccgggctggcgcagcacgccgcggctcgcgctctgcgccagcagctctcagcgctacatagtcaacttcagcctctgggccagcgcctgatgcagctcaacgccgccgggcaggccaccaggcaggagcaggaaaaactggaagcgatactggctcagcgccgtcaggcttataaagagaagaatcagcagctgagcgatgtgaaagccctgtgcgaaatggaagcgcgcattgccggtcttgaggccgagcgtgctcgcctgcagcccggtaccccttgtccgctctgcggttccgcgcagcatccggccgtcgccgaatatcaggcgctggttcccggcgttaatcaggcgcggcgcgatgcgctggagcgcgaagttaaacagctggcggaggctggcgccctggtgcgcggcgagctggacgccctgattaagcaccagcaaaaagaggcggctgagaaagcatcgcttctgcagcaggagcaagcgcttacatcacgctggcaggagacgatcggcggattaaatatcgacctgacgccaaaggatgatattccgggctggataaatgcgcagcaggagcatgaacagcggctctatcagcatcagcagcgtctggcctggcaggctcagcagcaggagtgccagcagcagcttcagcagctacagcaggaacaagagcagcgcagcgccgcgctggcggccgaactgagcgcctttagcctgagcctaccggctgcagagcagaccgcgagctggctggcgctgcgggaagaagagacccgcagctggcaggccaaacagaatgaactgctcgccctgcaggaacagctccagcagctgaccccgctgctggaggccttaccggaaacggacttagcggcagaacccgcgccgctcgacggctggcgtcaggtgcacgatgactgcctcgcgctccagagccagtggcaaactctggggcagcaggagagccagcagcaggttcagttgaaagagagcgaagcgcagttcagcgcagcgctggccgccagccccttcgcggaccggcaggcatttctcgccgcgctgcttgatgaggaaacgcgccagcgtctcgaaaacctgaaacagacgctggagagcaggctacagcagaatcaggcgctggcgctacgggctcgcgaagcgctcgataaccacagccggcagccgccggcggaaatggacttcagccagtctcttgagcaggtgcaggaacagcttcagcagctaacgacgctgctgcgggaaaacagcgcccgtcagggagagattcgccagcagctgaaacagaatgcagaaaaccagcagcgtcagcagtcgttacgccagcagatggagcgcaccgcgcaggaagtggaagactggggatggctgaactcgcttatcggctccagggagggcgataaattccgtaaatttgcccagggcctgacgctggataatctggtgtggctggccaaccatcagcttaatcgcctgcacggtcgctatctgctgcaacgtaaagccagcgatgccctggagcttgaagtggtcgacacctggcaagcggacgcggtgcgcgacacccggaccctctccggcggcgagagtttcctcgtaagcctcgcgctggcgctggcgctctccgacctggtgagccataagacgcggatagactcgttgtttcttgatgagggcttcggcacgctggatagcgaaaccctcgataccgcgctggatgcgctggacgcgctcaacgccagcggcaaggttatcggcgtcatcagccacgtcgaggcgatgaaagagcgcattccggtgcaaattaaagttaaaaagatcaacgggctgggctatagccgcctggataaaaccttcgccgccgagtaa

SEQ ID NO: 172972 - DNA, 1203 bp, Klebsiella oxytoca
atgcgcatccttcatacctctgactggcatcttgggcaaaatttttacagcaaaagtcgcgccgccgaacatcaggcgtttctcgactggctgctggccagcgcgcaggaacatgacgtcgatgccattattgtcgcgggcgatatttttgataccggctccccgccgagctacgcgcgcgagctgtataaccggtttgtcgttcagctgcagcaaaccggctgtcggctggtggtgctggcgggcaaccatgattcggtcgccaccctcaacgagtcgcgagacattcttgcgttcctgaaaaccacggtcgtggccaatgccggccacgccccctttattctgccgctgcgcgacggttcgccgggggcgattttttgcccggtgccgttcctgcgcccgcgtgaactggtaaccagccaggccgggcactccagcggcgaaaagcagcagcagctcctgagcgccatcagcgactattaccagcagcagtaccagcaggcctgcgaactgcgcggcgaccgggcgctaccgattatcgccagcggccatttaaccaccgtcggcgccagcaaaagcgacgcggtgcgcgaaatctatatcggtacgctggacgcctttccggcgagccgttttccgcctgccgactatattgcgctcggccatattcaccgtgcgcaggtggtgggcggctgcgagcatatccgctacagcggctcccccatcccgctgagctttgatgaaacagggaaaaataaaagcgtcaatctggtcacttttacccacgggcgtctggcggatgtcacgccgcttatcgttcccgtcacccagccgctggcggtgctaaagggcgatttcgccagcattagcgagcagctaaaccaatggcaggatagcgccctgcagcccgcagtgtggctggatatcgaaatcaccagcgacgaatatatgcatgatatccagcgtaaaattcaggcgcagaccgaaacgctgccggtggaagtcctgctggtgcgccgcagtcgcgcccagcgcaaccgcattctggccggcgctcagcgagagaccctcagcgaactgcaggtggaggatgtcttcgcccgccgtctggcgctggaaacgctggaagccgcgcagcagcagcgcctggaacagctttttaatgaaacgctgcatagcctgaacggtgaggatcgcctgtga

SEQ ID NO: 172973 - DNA, 690 bp, Klebsiella oxytoca
atggcgagaagaattctggtcgttgaagatgaagctccaatccgcgagatggtttgctttgttctggagcaaaacggctttcagcccgtcgaggcggaagattttgacagcgcggttaatcagctcaatgaaccctggccggatttgatcctcctcgactggatgctgccgggtgggtcgggtctgcagtttattaaacagctcaagcgtgaagcgatgacccgcgatattcccgtggtgatgctcaccgcccgcggcgaagaggaagatcgcgtccgcggtctggagaccggcgccgatgactacatcactaagccgttttccccgaaagagctggtggcgcgaattaaagccgtgatgcggcgcatttcgccgatggcggtggaagaggtgattgaaatgcaggggctgagcctcgacccctcttcgcatcgggtcatgaccggtgaaaatccgctggatatggggccgacggagtttaaattattacacttctttatgacccacccggaacgggtttatagccgcgaacagctgctgaatcacgtctggggaaccaacgtttatgtcgaagacagaacggtagacgtgcatattcgccgtctgcgcaaagcgctggaacatagcggccatgaccggatggtacaaacggttcgcggtacgggatatcgtttctccgcccgattctga

SEQ ID NO: 172974 - DNA, 1290 bp, Klebsiella oxytoca
gtgctggaacggctgtcatggaaaaggctggcgcttgagcttttcttgtgttgtatcccggccctgatcctcggggcgtttttaggtcatctgccgtggtttttattggcggcagtgaccggtcttcttatctggcatttctggaatctgatgcgcctgtcatggtggctgtgggttgaccgcagcatgacgcctccgccgggtagtggcagctgggagccgctgctgtacggactgcatcaaatgcagatgcgtaataaaaagcgtcgccgtgagctgggcaacctgattaagcgctttcgcagcggggcggagtctctgccggatgcggtagtgctgaccaccgaagaaggcgcgatgttctggtgtaacggcctggcgcagcagatcctgaatctgcgctggcctgacgataacgggcagaacatccttaacctcttgcgctatcctgaatttgccaattacctgaaatacagggatttttctaaaccgctcaacctggtactgaataacggtcgccatctggagattcgcgtgatgccctacagcgataaacagctgctgatggttgcgcgcgatgttacgcagatgcaccagctggaaggggcgcggagaaactttttcgctaacgtcagccatgagctgcgtacgccgctgacggtgctgcaggggtatctggagatgatgcaggagcaggtgctggaaggggggacgcgcgaaaaagcgttgcacaccatgcgcgagcaaactcagcgaatggaaggcctggtgaaacaattgctgacgctgtcgcgaatcgaagccgcgccggtcctggcgatgaacgataaaatcgatgtgccgatgatgctgcgggtcgttgagcgcgaagcgcaaacgctaagccagcagaagcatgcgctgcatttttcggttgatgaatcgctgaaagtgctgggtaatgaagaacagctgcgcagcgcgatttccaacctggtgtataacgcggtcaatcatacgccgccgggaacggatattaccgtaagctggcagcgagcgccgcacggggcaatgttcagcgtcgaagataacgggccgggcatcgcgccggaacatattccgcgcctgaccgagcgtttctatcgggtggataaagcgcgctcgagacagaccggcggcagcggtctggggctggcgattgtcaaacatgcggtcagccatcacgatagccgcctcgaaattgagagtacgctgggtaaaggcacccgctttagcttcctgctaccggaacgtttaattgccaaaaattga

SEQ ID NO: 172975 - DNA, 1320 bp, Klebsiella oxytoca
atgacccatcagttaaaatctcgcgacatcattgcgttgggctttatgaccttcgcgctgttcgtcggcgcaggcaatattatctttcctccgatggttggcttacaggccggcgaacacgtctggaccgcggctattggctttctgattaccgccgtgggtctgccggtgctaacggttgtggcgctggcgaaagtcggcggcggcgtagagagcctgagcacgccgattggtaaagttgccggtatcctgctggcggtggtttgctatcttgccgttgggccgctgtttgcgactccgcgtaccgccaccgtctcttttgaagtggggattgctccgctgaccggcgacggcccgctgccgctgctgatttatagcgttatctattttgccctggtgatcctcgtttcgctctatccgggcaagctgctggacaccgtcgggaatttcctcgcgccgttgaaaatcatcgctctgattattctcgccgttgcggcgatcgtctggccagccggtccgctgagccacgcgatggaagcctaccgtaccgcgccattctccaacggcttcgtcaacggctatctgaccatggacacccttggggcgatggtctttgggatcgtgattgtcaacgcggcgcgttctcgcggcgtgaccgaagcccgcctgctgacccgttacaccgtctgggctggcctgatggccggcgtgggcctgacgctgctgtatctggcgttgttccgtttaggttccgatagcggcacgctggtggagcagtccgctaacggcgcggcgattctgcacgcttatgtccagcacaccttcggcggcgcggggagcttcctgctggcagcgctgatcttcatcgcttgcctggtgacggcggtaggcctgacctgcgcctgtgcggagttttttgcccagtatctgccgttctcctatcgtacgctggtctttatccttggcctgttttcgatggcggtttccaaccttggcctgagccacctgattcagatttcgattccggtgctgacggctatctatccgccgtgtatcgcactcgtggtattaagctttacccgtagttggtggcataattcgtcccgcgttattgccccggcaatgtttatcagcctgatgtttggtatcattgacggcattaaagcgtcggcgtttgcagagattttgccatcctggaccgcgcgcctgccgctggcggagcaagggctggcgtggctgatgccaaccgccgtgatggtgattctggccgttatctgggatcgcgcagcagggcgtcaggtggcctccagcgcgcactaa

SEQ ID NO: 172976 - DNA, 1371 bp, Klebsiella oxytoca
atggaaagtagtaacaagcttaagcgcgggctaagtacccggcatattcgttttatggcgctggggtcggcaatcggtaccggccttttctatggttcggctgacgcgattaaaatggcggggccgagcgttctgttggcttatattatcggcggcgtcgcggcctacattattatgcgcgcgctgggcgaaatgtcggtgcacaacccggccgccagttcgttctcgcgctatgcccaggattaccttggcccgctggcgggctatatcaccggctggacctactgttttgaaatcctgattgtcgccatagccgacgtcacagccttcggcatctatatgggggtctggttcccggcggtgccgcactggatctgggtactcagcgtggtgctgattatctgcgccgtcaacctgatgagcgtcaaggtcttcggcgagctggagttttggttctccttcttcaaagtcgccactattatcatcatgatcctcgccggttttggcatcattatctgggggatcggcaacggcgggcagccgacgggtatccacaacctgtggagcaacggcggcttcttcagcaacggctggctggggatggtgatgtcgctgcagatggtgatgttcgcctacggtgggattgaaatcatcggcatcaccgccggtgaagcgaaagatccggagaaatccattccgcgcgccattaactcggtgccgatgcgtatcctcgtgttttacgtcggtacgctattcgtgattatgtctatctatccgtggaaccaggtcggaaccaacggcagtcctttcgttctgaccttccagcatctgggtattacctttgccgccagcatcctgaactttgtggtgctgaccgcttcgctgtcggcgattaattccgatgtctttggcgtggggcgtatgctgcacggtatggcggagcagggcagcgcaccgaagatgtttaccaaaacgtcccgtcgcggggtgccgtgggtaaccgtgatggttatgactatcgcgctgctgttcgccgtttaccttaactacattatgccggagaacgtctttctggtgatcgcctccctggcgacattcgccaccgtctgggtgtggattatgatcctgctgtcgcagatcgccttccgtcgccgtctgccgccggaagaggcgaaggcgctgaagtttaaggtgccaggtggagtaacgaccacggtgattggcctgctattcctggtctttattatcggtctgattggctaccatcctgacacccgcatctcgctgtacgtgggctttgcgtggattattctgttactgattggctggcagtttaaaactcgccgcgagcgtaagctggcgaaagcctag

SEQ ID NO: 172977 - DNA, 1818 bp, Klebsiella oxytoca
atgttgaaggcatggcacctcccggttgctccgtttattaaggagcagccggaacgactgattatcacgctatggttaagcggcgaggatctgccgccgcgggtcacgctacgcgcggaagaagataacgaggagctgtcgctgccgatgcgccgcctgcggcaggaaccgcatccgggcgtggtggcgtggcgcggggaaatcagcctcgtcaacgggctaccgcgtcgccgctacagtttcaagctgctgtgggccgaccgccagctgtggttcacaccgcaggggttcaatcgttttccgccggcgcggctggagcagtttgcggttgatatgccggacagcgggccgcagtgggtggccgatcaggtgttttaccaaatcttccctgaccgcttcgcccgcagccagtcacgcgacgccgggcaggataacgtttattaccaccatgccgccggtcacgatatcgtgcgcaaggcgtgggatgagccgctaaccggcgaggcgggcggctctaccttctacggcggcgatctcgatgggatcagcgaaaaactgccgtacctgaagcagcttggcgtcacggcgctttatctgaacccgatatttgtcgctcccagcgtgcataaatacgataccgaggattaccgtcgcgttgacccgcagtttggcggcgatgcggcgctgctgcgcctgcgtcacaactcgcaaaaagaggggatgcgcctgatccttgacggcgtgttcaaccacagcggcgattcgcatgcctggttcgaccgccatcagcgcggtagcggcggcgcctgccacaacgccgattcgccgtggcgcgactggtataatttttctcccgagggcattgcccacgattggctgggatacgccagtctgcctaagctcgactaccggtcggcgacgctgatagatgagatctatggtggagaagatagcgtggtgcgccactggctgaaagcgccgtggagcatggacggctggcggctggatgtcgtgcatatgctcggtgaagacggcggggcgcgtaataacctgcgccatatcgccggcattacccaggcagcgaagcaggagcggccggaagccttcgtgttcggggagcatttcggcgacgcgcgccagtggctacaggccgacgtagaagactcggcgatgaactaccgcggctttaccttcccgctatggggctttctcgccaataccgatatctcctacgacccgcagaaaatcgatgcgcaaacctgcatggcgtggatggacaactatcgtgccggactgtcgcatcagcagcagctgcggatgttcaaccagcttgatagccacgataccgcgcgctttaagtctctgttgggtaaagatgttgcgcgtctgccgttggcggtggtgtggctgttcagctggcctggggtaccgtgcatctactacggcgatgaagtgggcgtggatggcaataacgatccgttctgccgtaaacccttcccgtgggatccggctttgcaggatggcgaactgctcgacctgtacaagcgcatgagcaaactgcgtaaggctaatcaggcgctacgctacggcggctgtcaggtgatctatgccgaagagaacgtggtggtgttcgtgcgagtctataagcaacagcgcgtgctggtggcgattaaccgcggcgcggcctgcgaggtggtggtagaagattcgccgctgcttgacgttcacggctggcagttgaaagagggcgccggtgatctgcacgagagcgtgctgacgctgccagcgatctccgccagcgtgtggtttagccgttag

SEQ ID NO: 172978 - DNA, 903 bp, Klebsiella oxytoca
atgcgcctgaatcttgatgtcctgttaattctcgacgcgctggacaaacatggctcttttgccaccgccgccgaatcgctatttaagaccccagctgcgctgagctacatgatccaaaagctggaaaacgatctgaatatcactctgctggatcgctccggccaccgggctaaatttaccgatacgggcagaatgatgctggagaagggtcgattgctgctgaatgccgctaaggatctggaaaagcaggcggtgcagctcagcgccggttgggagcgggatctggctatcgcgctggatgactctttcccgtttagcgcgctgctgccgctgatcgatgctttctacgcccagcacccgcaaacccggcttaactttacccaccataccctcgcgggctcgtgggaagagctcacccacaacggcgcggatattattcttggggcgatcaatgaaccgccaacctccgccgagtggtcgtggaaaatgctcggcgccatggacaatattttcgtcatcgcgccggggcacccgctggcgcaaacgacccaaccgctgaccaacaagcagctcagcctgcaccgcgcggtcgtgatcagcgacagcgcccgctactgtcatccgctcaacagcaacctgctcgacgaacagccgcaaatccgcgtggatgatttcgccagtaaagttgaactcttgcgcgccgggctgggctgcggctttttaccgcgccatattgcccggcggtggctggaaagcggcgagctggtcgaaaaggccgtcatctcgtgccgcgagaaagatatcacctatatggcctggcgcagcggtaatgacggactggcccagcgctggtggcgcgaggccattttgcagagcgagagcctgagccagctctatgactaa

SEQ ID NO: 172979 - DNA, 642 bp, Klebsiella oxytoca
atgtctattcgtgaactgatcgatccctctaactcggcgcttatttttattgaccaccagccacaaatggcttttggtgtggcaaatattgaccgccagaccctgaaaaataatacggttgctttagccaaagcaggcaaaatttttaatgtcccggtaatttatacttccgtcgaaaccaaaagcttcagcggctatatctggccggaattgctggccgtccatcctgatgtgaaacccattgaacgtacctcgatgaactcctgggaagacgcggcttttgttgaagcggtaaaggcgaccggacgcaagaaactgattatttctgctctgtggactgaagtctgcctgacgttcccggcgctgatggcgctggatgcgggctatgaagtttacgtggtgaccgatacctccggcggcacctcggttgatgcccacgaacgctccattgaccgtatggtgcaggccggtgcggtgccggtgacctggcagcaggtgctgcttgagtaccagcgcgactggtcgcgtaaagagacctatgacgcggtgatggatctggtgcgcgagcatagcggcgcttacggcatgggcgtggattacgcttatacgatggtgcatggcgcgccagagcgtaaagcttaa

SEQ ID NO: 172980 - DNA, 546 bp, Klebsiella oxytoca
atggcgcagcagaaatcggtgaccctggttatcagtcatgtgctcgacccggagcatggccaacggtatgaagcgtggctgggcaaaattatgccgattgcggctgaatttcccggtcatcttggcgcaaacgtgattcgcccggctcccgggcagaatttatggagcattatcattcgcttcgacaccattgagcatctttacgcctggacccagtcggaaacccggcgcgaactggtggcggaaatcgcaccgctgctgagcgaaggcgatcgcaccgaagtccggactgaaccggccttctggtttacgccgcctgcggcgaacgtgcgccagccgcgacgctggaagcaatttttaatcaccctgctggtgattttccccagtactaacctggtgccgtcgataaccggaatgctgttgccctcgctgaagggaagcctgctactgcacctcatcaatgatgcctgtgtggtcgcgctggtggtctggttctggatgcccatcgtgacccgtctgtttgctggctggttaaagaaaaactga

SEQ ID NO: 172981 - DNA, 1869 bp, Klebsiella oxytoca
atgtcgcaaactgccacactgatcctgacccacggtcgggttcatactctcgatcgtcaaaaccccctggccgatgcggtggcgatcgctgacggtaaaatcctcgccgccggtagccacgatcggatcatgagctttgccgcggaagggacgcaaattatcgatcttaaaggtcatacggtgatccccggtcttaacgactcccacctgcacctgatccgcggcggcctgaactacaacctggagctacgctgggagggggttccctcgctggcggatgcgctgcggatgctgaaagatcaggccgatcgcacgccgtcgccgcagtgggtgcgggtggtcggcggctggagcgaatttcagttcgccgaacggcggatgccgacgctcgaggagcttaacgatgcggcgccgcataccccggtatttgtcctgcacctgtacgatcgcgcgctgctgaaccgcgcggcgctgaaggcggtgggctacaccaaagagacgccggatccggcgggcggcgagatcgttcgcgacggcaacggtaatcctaccggcatgttgattgccaaacccaacgcgatgatcctctactcaacgctggccaaagggccgaagctaccgctggaactgcaggtcaactcaacgcgccagtttatgcgcgagctgaatcgtctggggctaaccagcgctatcgatgccggaggcggtttccagaactacccggaagattatgaaattattgaacagctgcacgccaaagagcagatgaccgtgcggatcgcctataacctgtttacccagcgacctaagcaggagctggaagattttgagcgctggaccgatatgctcaagccgggacagggcaccgacttttaccgcgccaacggcgccggggagatgctggttttctcggcggcggattttgaagatttcctgcagccgcgtccggacctcccggagggaatggaagatgagctggagcgggtggtgcgccacctggtagagcaccgctggccgttccgcctgcacgccacctacgatcaatccatcagccggatgctcgacgtcttcgagaaggtaaatcgcgaaattccgttcaatggtctgcactggttcttcgatcatgcggaaaccatcaccgaacgcaatatcgaacgcgtcaaagcgctgggcggcggcatagcggttcagcaccgtatggctttccagggcgaatattttgtcgaccgctacggtaaagatgcggtcaaacatacgccgccggtggcgaaaatgctcgagctggacgttccggtagggctggggacggatgctacccgcgtggcgagctacaatccgtggaccgcgctctactggctggtttccggacgtaccgtcggcggaatggcgatgtacgacgacagcaaccgcctgccgcgcgacgtggcgctggagctgtggacggcgggaagcgcgtggttctcaagcgagcagggtaagaaagggcgcattgagcaaggccagcttgccgatctggtggtgctgtcgaaagactatttcagcgtcgcggaagaggaaattaaggggatcgagtcggtactgacggtcgttgacggcaaggtggtgtacgccgccggacacttttcgccgctggcgccgccgcccattccggtgctgccagagtggtcaccggtggtgaaggtgccgggtcattaccgttccgcgccgccgaccgccgcgaaaatcggcgcgatagttcagatgcaccaatgctgcggcagctgcggcgtacacgggcatcagcatgatattgcgcgccagtcggcgattccggttgccgatgagcaggcgttctggggcgtactcggctgctcctgctttgcgttttag

SEQ ID NO: 172982 - DNA, 861 bp, Klebsiella oxytoca
atgttagtttctatgaaggacatgcttcagcatgccctacgggacggttatgccgtagggcaattcaatattaataatcttgagtgggtcggcgctgtattaagtaccggacaacaactgcgatcgcccattattttaggcgtttccggcggtacggtgaaacatatgctgggattaaaatgtattcatgacatcgtggtcaatgccatggattatttacatattgatattccggtggctttgcatctggaccacggtaccacccgcgaggcctgcgaggcggctatcgaggccggattcagctccattatgtttgacggctcgcatctgccgttcagcgaaaacctcgccatcactcgccatctggttgcgctggcgcacagcaaaggcatctccgtcgaggcggagctggggacgattgccggaagcgaagatggcatcgtcaattcggcggtcatctacgccgaccctgaggagtgctacaccctggtgaaagaaactcaggttgactgcctggcggcggcgctgggttcgacccatggactgtataaaggcaaagccaaactgggttttacggagatgaaagccatttctgagcgagtcaatgttccgctggtcctgcacggcggtaccggtattgccgatgacgacatgcgtaaagccatcgcctgcggtacggccaaaatcaacgtcaataccgaaaatatgtacgcctggtgtcaggaggtgaaagccctgcttgccgccgataccggtcatgacgtgaacgacccgcgcaaagtgattaatcagggactgaaaccggtacgcgaaatgattgcgcggcgcatcgcgctttttggttcacagaaccgctattaa

SEQ ID NO: 172983 - DNA, 963 bp, Klebsiella oxytoca
atggctatcttgtccatcgggttttcatgttttgatcagtttttctttttaaatgaatggccgcaggagaataccaaaaatttctgtcacgactttattgaaagcggcggcgggccggcagcgaatgcggcatggctgttggggctatggggggaggatgtctattacatcggccatctgaatcaggatctttacggccagcgaattattgctgaatttgccgaagcgggcgttgataccagtcaggtggtcttttctgatgaaatgatcacccccctggcttcggtgctggtcaatcgcctgacgggttcgcggacgatcatcacccgtaaaatgcagacgccgccgtcgctgacctacgatcagaagctcaagctcgatgatttagccgaacggctcatcgccgctgaagaaccagtaacgctattagtggatggccatgaagccgagatcagcgagtatttaattaagaaactgccaaacgcccgggtagtcatggatggcggctcactacgcgccagtaatattaaactggcggcctggaccgattattttgtggtcagtgaacattttgcccgggactatatgggatatcgcgccctgagtactgaagcagaaattaaggcggcgctcattgagcttaataaaatttgccgcggcgaagcctttattacccttggtgaaaaaggctgcgcatttttaaagagcgggatgctgcaaatagttccctcctggctgtgcaatgctgttgataccaccggcgcgggagacgtattccatggcgcttttacctacggcgttcactactcctggcacattgacaatattattttattcgccagcctcaccgccgctatttctattgagaaaaaaggtgtacgtgaatcgatgccggatcttgccgtcgttcacaattctttaaatagctatgaaagaaacttaaagcaatattttgatgaatga

SEQ ID NO: 172984 - DNA, 1392 bp, Klebsiella oxytoca
atgcaggctattcttagtttcttatcggaaatatttagtcaacccgcatttctgatggggattatcgcatttgtcggtttagtggcgctgcgctcccccggaaataaattactcaccggcaccttaaagcctatcctgggctatttaatgctaagcgccggcgcaggggttatcgttgctaacctcaatccgctgggtgggattatcgaagccgggtttaatatccgtggcgttattcctaacaacgaggccattgtctccgtcgcccagaaggtgctgggcgtagaaaccatgagtattctactgttaggttttatttttaacctgcttattgcccgctgcactaagtataaatatatcttccttaccggccatcactctttcttcctcgcctgtctgttctcagcggtgctacaggcggcggaattccgcggctggatgctggtgctcatcggcggattcctgctcggctcatggtcggcgatatctccggccattggccaacgctataccaagcaggtcaccgaagatggcggtattgcgatgggacattttggttctctgggctactacatttcagcgtggatcgccaccaaaaccggcaacccggcgaactcgttcgccgataccgaaatctcagagaaatggggctttctgcgcgataccacggtcaccaccgggatcgtcatgttcgtcatctactttgtatgcagcgccgtcgccggtagcgagtatctcagcaccattacggatcaaaatatgctgatcttctctgtcctgaccggcctgcagtttgcggttggcgtcgctatcgtctacaacggcgtgcggctgatcctcggcgatctggtaccggcgttccagggaattagccagaagctgatccccaactccatccccgccgttgactgcgcggtattcttcacctttagcccaaccgcggtcgtcgtcggctttatcagctcgttcattggtggactggtcggcatgctttttcttggcggattgggtatggcgctgattattccgggcatggtgccgcacttcttctgcggcggcacctccggtgttttcgccgataagctgggcggtaaacgcggctgcatcatcgcctcatttatcggcggtatcttccttgctttccttccggcgatgctgctgccggcgctgggtaatctgggctttgaaaatagcaccttcgccgacttcgacttcgcggtttggggcatcatcatcggcaacgctttcacccagtttggccagattactatctatttgatttgtctggcactgatcgtcgcactgctggtgccattctgctttcgttcagtacgcgtggtcggtgacacgctcagctatgaggagctcactgcggataagaaaaatgaataa

SEQ ID NO: 172985 - DNA, 288 bp, Klebsiella oxytoca
atgttagttatcagaacagtttgtggtaacggtattggcagttcattaatggctgcgaataatgtcaaaaagatctgtgatgaattgggtattaaagccgacgtcgcctccgttgattttgccaacgctgttggagaaaaagctgacctttacgtcacaattaaagagctggcaaaccaatttcctgcgcattgtaatgtcgccattattcgcagctacgtgcataaagcgaaaatcgccgaggatattaccgaagcactcaccaaaattgctgcgactcactcttaa

SEQ ID NO: 172986 - DNA, 444 bp, Klebsiella oxytoca
atggatattatttttaacgctgaactggttgcgcttaagcaggatatttccaacgccgtacagggtatcgaattcgccggaaagctgctgactcaacaaaatatatgtcatccgaaatatgtgaatgaaatggtcgaggtctatcaggattttggtcccgccattgttatcgactacggcctggcgatgcctcatgcccggccagaaaaaggcgccttgcgcacgggcttctctttagtcaccagcaggcagccaatcgtctttggccatgaggagtttgatccggttaacgtcatcatcgccatcgccggcgcggatgccgatagccacataaaaatgattcagctaatagcctcgctgattgagtccgacattgtgaccttccttcagcaggccaatgatatcgattcagtattacatttcatccaacaacaaatggagtag

SEQ ID NO: 172987 - DNA, 603 bp, Klebsiella oxytoca
atggttctggttactcgtcaggctccggacttcaccgcggcggcagttttaggtaacggcgaaatcgttgagaaattcaacttcaaacagcataccagcggtaaagcgaccgttctgttcttctggccgatggacttcaccttcgtttgcccgtccgaactgatcgcttttgacaaacgctacgaagaattccagaaacgcggcgtcgaagtggttggcgtttcttttgactccgagttcgtccataacgcatggcgtaacactccagtggaccagggcggcatcggcccggtgaaatacgcgatggttgcggacatcaaacgcgaaatccagaaagcgtacggtatcgagcacccggacgaaggcgttgccctgcgcggttccttcctgatcgatgccaacggcgttgttcgccaccaggtcgttaacgacctgccgctgggccgtaacatcgacgaaatgctgcgcatggttgacgcgctgcagttccacgaagagcacggcgaagtttgcccggcgcagtgggaaaaaggaaaagaagggatggccgcttctccggaaggcgtggctaaatacctgaccgagaacgtttccagcctgtaa

SEQ ID NO: 172988 - DNA, 582 bp, Klebsiella oxytoca
atgaattttctcgcgcacctgcatcttgctcatctcgccgatagctccctttccggcaatttgctggccgatttcgttcgcggcaaccccgctgatgagtggccggctgacgtcgtggagggcatctttatgcaccgccggatcgatgtgctgaccgataacctgccggaagtcaccgaagccaaagcgtggttccgcgccgaaacgcgccgggttgcccccattacgctggatgtgatgtgggaccattttttgtcacgccactgggcgcagctgtcgccggaactgccgctgccggagtttgtccgctacgctcacgcccaggtcacgccgatcctcccagcctccccgccgcgctttatcaatctcaatgactatctgtggtcggagcgctggcttgaacgttaccgggatatggattttattcagcgcgtgctgaacgggatggccagccgccgcccgcgactcgatgccctgcgcgactcctggcaggatctggatacccactacgatcgccttgagcggcagttctggcgcttttatccgcagatgatgacgcaggcggaaaaacgcgaactataa

SEQ ID NO: 172989 - DNA, 1065 bp, Klebsiella oxytoca
atgcgcgttgccgatttttcctttgaattacctgaatccctgattgcccactatccgatgcctgagcgcagcagctgccgcttgctgtcattagacgggccgacaggcgcgctgacgcacggtactttcactgatttactcgataagctcaaccctggcgatctgctggtatttaataatacccgcgtgatcccggcccgtctgtttggccgtaaagccagcggcggcaagattgaagtgctggttgagcggatgctcgatgataagcgtattctggcacatattcgcgcttcgaaagcgccgaaaccgggcgcagaactgctgctcggcgacgatgaaagtattaaagcgaccatggttgcacgtcacgacgcgctgtttgaagttgagttcgatgacgcgcgcagcgtgctggatattctcaacgctatcggccatatgccgctgccgccgtatatcgatcgtcctgacgaagacgccgaccgcgagctgtatcagaccgtctatagcgaaaaaccgggggccgttgccgcgccaaccgccggcctgcactttgatgagcccctgctggcgaagcttcgtgaaaaaggcgtggagatggccttcgtcacgctgcacgttggggccggaaccttccagccggtgcgcgtagacagcattgaagatcacatcatgcactctgaatatgccgaagtgccgcaggaggtggtcgatgcggtgctggcggcaaaagcgcgcggcaaccgggtgattgccgtcgggacgacgtcggtgcgttcgctggaaagcgcggcgcaggcggcaaaaaacgacctgattgagcctttcttcaacgatacgcagattttcatctacccgggctatcagtacaaagtcatcgatgcgctggtgaccaacttccatctgcctgaatcgacgctgattatgctggtctctgcttttgccggctatcagcatacgatgaacgcctataaggctgcggtagaacaaaaatatcgcttttttagctacggggacgcgatgtttatcacgtacaatccgcaggctatttttgagcgtccttaa

SEQ ID NO: 172990 - DNA, 1128 bp, Klebsiella oxytoca
atgaaatttgagttagatactaccgatggtcgcgcgcgtcgcggccgtcttgtgtttgagcgcggcgtcgttgaaacgccagcctttatgccggttggcacctacggcaccgtaaaagggatgacgccggaggaagtcgaagcgaccggcgcgcaaatcatcctcggtaatactttccatctgtggctgcgtcctggtcaggagatcatgaagctgcacggcgatctgcacgactttatgcagtggaaagggccgatcctcaccgactccggcggcttccaggtcttcagccttggcgatattcgcaaaatcaccgagcagggcgtgcacttccgtaacccgatcaacggcgatccgattttcctcgatccggaaaaatcaatggagattcagtacgatctcggctccgacatcgtgatgatcttcgacgaatgtacgccatatccggcggactgggactacgctaagcgctcaatggaaatgtccttgcgctgggcgaagcgcagccgcgaccgttttgacggcctcggcaacaaaaacgcgctgtttggtatcattcagggcagcgtttacgaagatttacgtgatatctctgttaaaggtctggtagagataggctttgatggctacgctgtcggcggtttggctgtcggtgagccgaaggcagatatgcatcgtattctggagcacgtctgcccgcaaatcccggccgacaaaccgcgatacctgatgggcgtcggtaagccggaagatttggtcgaaggggtgcgccgcgggatcgatatgttcgactgcgtcatgccgacgcgcaacgcgcgcaacggccacctgttcgtcaccgacggcgtggtgaaaatccgcaacgcgaagcataagagcgatacttcgccgctggatgcggagtgcgattgctacacgtgtcgcaactattcacgcgcttacttgcaccatctcgaccgttgcaacgaaatattgggcgcgcgtctcaataccattcataacctgcgatactatcagcgcttaatggctggtttacgcaaggctatcgaagagggtaaattagagagcttcgtgaccgatttttaccaacgtcagggtcgaaccgttccacctttgaacgttgactaa

SEQ ID NO: 172991 - DNA, 333 bp, Klebsiella oxytoca
atgagcttttttatttctgatgcggtagcagcaaccggtggcgcggcgcagggcagcccgatgtctctgatcctgatgctggtggtgtttggtctgattttttacttcatgatcctgcgtccacagcagaaacgcaccaaagaacataaaaacctgatgaactccatcgctaaaggcgatgaagtgctgacgaacggtggcctggttgggcgcgtcactaaagttgccgaaagcggatatatcgctatcgcactgaacgacaccactgaagtggttatcaaacgtgacttcgtagctgccgttctgccgaaaggcaccatgaaggcgctgtaa

SEQ ID NO: 172992 - DNA, 1815 bp, Klebsiella oxytoca
atgctggtcgtcgttattgtcgtcggcttagtgtatgcgcttcccaacctgtatggtgaggatccggccgttcaaatcactggcgcgcgcggcgtcgccgccagtgagcaaacgctgatccaggtccagaaaacactacaagaagaaaaaattaccgcgaagtctgtggcactggaagagggcgcaattcttgcgcgcttcgacaccactgatatccagctgcgcgcgcgcgaagcgctgatgggcgtgctgggtgacaaatacgtcgtggcgcttaaccttgctccggcaaccccgcgctggcttgcggccctgtatgccgagccaatgaagctgggtcttgacctgcgcggcggcgtgcacttcctgatggaagtcgacatggataccgcgctgagcaagctgcaggaacaaaacatcgacagcctgcgcagcgaactgcgtgataaaggcattccttacgcgaccgtgcgtaaagaagacaactacggcctgagcatcgccttccgcgatagcgccgcgcgcgaccaggctatctcctaccttagccctcgtcatcgcgatctggttatttccgctcagggcagcactggcctgaaagccgtgatgaccgacgaccgtctgaaagaagcccgcgaatacgccgtacagcagaacatcaatatcctgcgtaaccgtgtaaaccagctgggcgttgccgaacctctggttcagcgtcagggtgccgaccgtattgtggttgaactgccgggtatccaggacacggcgcgagccaaagagattcttggcgcgaccgcgacgctggagttccgtctggttaacactaacgttgatagcgccgcagcggcttccggtcgcgttccgggcgactctgaagtgaaatatacccgcgaaggccagccggttgtgctgtacaagcgcgtgatcctcaccggtgaccacatcaccgactcgacgtcgagcatggatgagtacaaccaggcgcaggttaacatctccctggatagcgctggcggcaacatcatgtctaacttcaccaaggacaacatcggtaaaccgatggcgaccctgttcgtggagtacaaagacagcggtaagaaagatgccaacggtcgtgcgattctggcgaaagaggaagaggtgattaacatcgccaatatccagtctcgtctgggtaacagcttccgtattaccggcatcagcaatgcgaccgaagcgcgtcagctctctctgctgctgcgtgcaggtgcgctgattgcgccgattcagattgttgaagaacggactatcggcccaaccctggggatgcagaacatcaaacagggcctggaagcctgtctggccggtctggtggtctctatcctgttcatgatcttcttctacaagaagttcggcctgattgcgacctcggcgctgattgccaacctcgtgctgattgtcggcattatgtccctgattccgggggcgacgctgactatgccggggattgcggggattgtgttaacccttgcggtagcggtcgatgcgaacgttctgattaacgaacgtattaaagaagagctgagcaacgggcgttccgtgcagcaggcgattgacgaaggttatcgcggcgcgtttagctccatctttgatgccaacattacgacgcttatcaaagtcattatcctgtacgcggtcggtaccggtgccattaaagggtttgcgattaccaccggtatcggtattgcgacctcaatgtttaccgctatcgtcggcacccgtgccatcgtgaacctgctgtacggcggcaagcgcgttaaaaagctgtctatctga

SEQ ID NO: 172993 - DNA, 972 bp, Klebsiella oxytoca
gtggcacaggaatatactgttgaacaattgaaccacggccgtaaagtctgggactttatgcgctgggactactgggccttcggcatttcaggttttttgctgattctgtccattattatcattggcgtgcgcgggtttaactggggtctggatttcaccggcggtacggtgattgagatcaccctcgaaaagcctgttgatatggatcaggtgcgccagtcgctgcagaaggcgggcttcgaagagccgcagctgcaaaactttggcagcagccgcgacatcatggtgcgtatgccgccggtacatgacgccaacggcagccaggagctgggcagcaaggtcgttaacgtgattaacgaatcgaccagccagaatgcgacggtcaagcgtattgagtttgtggggccgagcgtcggcgcagacctggcgcagaccggcgcgctggcgctgatagccgcgctggtgtgtatcctgatctacgtagggttccgctttgagtggcgcctggcggcaggggttgttatcgcgctggcgcacgacgtggtgatcaccatgggtgtgctgtcgctactgcatatagagatcgacctgaccattgtggcctcgttgatgtcggttatcggctactcgctgaacgacagtatcgtggtatctgaccgtattcgtgaaaacttccgcaagattcgccgcggtacgccgtacgaaatctttaacgtgtcgttgacgcagaccctgcaccgtactttgatcacctccgggacgaccttgatggttatcctgatgctgtatctcttcggtggcccgattctggaaggcttctcgctgaccatgctgatcggtgtctccatcggtacggcttcttctatctacgttgcgtccgcgctggcgctcaagctgggcatgaagcgcgagcacatgctgcagcagaaagtcgagaaagaaggggcggatcagccgtcaattctgccgtaa

SEQ ID NO: 172994 - DNA, 1392 bp, Klebsiella oxytoca
atggctgtcgtaactctttccaccgttcctcaacccccgctctggtacgatgtgccttccgtcacgcttaacgacgacacgctgcgccagcgcaaagcgaaggtgctggcgaatatgcggcagcaagggctggatacgcttatcatctatgccgataaagagcacggcggcaactttgagtatctcaccggttttattccccgtttcgaagaggcgctactggtagtgcatcgggacggtgaggcggtgctggtactgggtaacgagaacctgaagctggcaagctacgcgcggctggaaaatcgtgtgattcacgccccgtggttttcgctgcccaatcaaccgatggaaccccgcaaaacgttggctcagctgtttcaggaggcgggcgttgcggggggaaaaagagttggcctcgcgggctggaagctctttaccggcgcggttgatgaccgcgcgcggatgttcgatctgcccgcctttatcgttgacgctattcgcgaggcagccgggccgcaggcaagtataaccaacgccaccggcatttttatcgacccggcaagcggagcgcgaatcaccaataatgccaacgagctggcgcactatgagtacggtgctaatctcgcctcaaccgcgattctgaccgcgcttaacgccattgcgccgggaaaaacggaaaagcaaatcggcgcgctgctggcggcggaagggcaagcgaatagcgtggtgatgattgccgccaccggcgatcgctttgccggagcgaatctctaccccagcgataaagctatccagcgcggagataaattctcgctcaccaccagttttaaaggcggcctgagcagccgcgccgcctacgtggtggctgatgagagtgaactggcgcctgaggtggctgattatctggacgtagtggcgaagccctatttcaacgcggtggtgaactggctggaaaatctgcgcatcggcatgcgcggcggcgatatgtatgccctgatcgagcgagtattgccgaaggcggaatatcactggcacctgaatccggggcatctggtcgcggatgaagagtggctctgctcgcccattggcccccattcagccgcctgtctgcaaagcggaatgatattgcagatcgacattattccttcccgagcgggctacggcggcgcaagcattgaagataccgtggcgcttgccgacagcgcgctgcgtcgggagctggcgcaaagttaccccgagctctggcagcgcattgtcgccagacgatcgtatatcggcaatcggcttggcattgcgcttcctgaagaggtgctgcctttctccagtaccgtcggctacctgcgtccgtggctgcttagcccggagcgcgcgctggtctgcgcaccatgctga

SEQ ID NO: 172995 - DNA, 366 bp, Klebsiella oxytoca
atgaacaacgtcattaactggtttgagatcccggttgccgatatggatcgtgccgtggcgttttacgagccggtgatgcaggtcacgctgaaacgggaaaatatggagtgtgccgaaatggccgtatttccttatcaggacccggctcccggcggcgcgctggcaaagtttgatagcgtaaagccctccgatcagggatgcattatctatctgcataccgataatctgacggccacgctagaacgcgtcaactctgcgggcggaagctgcgtttttggcccctttgagctggcggacgatatcggcacgattgccctgtttatcgatagtgaggggaatcggattggtttgcatcaacccgcataa

SEQ ID NO: 172996 - DNA, 690 bp, Klebsiella oxytoca
atgagccgacgcgccgaccgtctttttcaaatcgtgcagatcctgcgggggaggagattaaccaccgccggattgttggccgagcggcttggcgtgtcagagcgcactatttaccgcgacattcgcgatctctcgctttccggggttccggttgagggagaggccggaagcggctatcggctgctggcgggctatgatctaccgccgttaatgctgacaacccaggaatcggaagcgctgatagccgctattcggctactgcaaacctggggcggcgcgtcgctgtcccgggcgctggaatcggcgcaggaaaaggtgctggcgatattgcccgcggagagccgacgtaaggccgagcagtcgcggctgttcgcaccggactttggttcccagggctatagcaaagatcagtttgatttggtgcatcgggcggtctccgctcagcaggcgctcgcgctgcgctatcgtgatgaagcgggaaatcagtcgcagcgagaagtgctgccgctggggctttttttctggggcgagcgctggctgctggtgacctggtgcgagctgcgtgaggattatcgctgtttccgtctcgaccgctgtctggagatttccgccaccgggcgtcatttcagcgaacgagccgatcgttcattgagtgatttcttgcgtaaggtgaggtgcgaagagcgttag

SEQ ID NO: 172997 - DNA, 885 bp, Klebsiella oxytoca
atgaaaaaaacattactggcagctggcgcagctctggcgctctccgcatctttctctgccagcgcggcagaaaacgacaaaccgcaatatctgtctgattggtggcaccagagtgtgaacgtggtgggcagctaccacactcgttttgggccgcagattcgtaacgatacttatctggaatatgaagcgttcgctaagaaagactggtttgatttctatggctatatggatgcgccggtattcttcggcggcaacaccgacgcgaaaggtatctggaaccacggttctccgctgtttatggaaattgagccgcgcttctctatcgataaactgaccggtaccgacctcagcttcggcccgttcaaagagtggtatttcgccaacaactatatctacgacatgggccgcaacaaatccggtcgtcagagcacctggtatatgggtctgggtaccgatatcgataccggcctgccgatgagcctctccctgaacgtctatgcaaaatatcagtggcaaaactatggcgcatctaacgagaacgaatgggacggttaccgtttcaaagtgaaatactttgtgcccctgaccgatctgtggggcggttcactgagctatatcggcttcaccaactttgactggggctccgatctgggcgatgacaactcttatgatttgaacggtaagcattcacgcaccagcaactccatcgcttccagccatatcctggcgctgaactacgatcactggcactactccgtcgtggcgcgttatttccacaacggcggccagtgggcggatgacgcgaaactgaacttcggcgacggcgactttaacgtccgctctaccggctggggtggttatttcgtggtcggttacaacttctaa

SEQ ID NO: 172998 - DNA, 543 bp, Klebsiella oxytoca
atgacaagacgttatttaaagctggccattgtgggtagcattttcacccttagcgcctgcgcgcagcaaagcgaaattcgccagatgaaccagagcgtgagcactctgagcaaagagatgacccagctcaatcagcaaacggtaaaaattactcagcaaaacgttctgaacgcgaaatcaaacagcggcgtatacctgctgccggaggcgaaaacgccagctcgcctgaaaagccagattggtaccctgcgcatgtcgctgctcaatatcgccccggatggcgacggtacccgcctcaccctgcgcattcagggggaatcaaacgatccgctgccggcctttagcgcgacggtcgcctccgggcagatcagcggcacaaccgatagctaccaggaggttaatgtacaaaatcagctcattagcgctccggcaagcgtcctggcgccgagcgatgtcgacattccgctgcgcctgaatggcgtgacgccagagcaggttggcttcgttcgcatccacgatattcagcccgccagtatgcagtaa

SEQ ID NO: 172999 - DNA, 450 bp, Klebsiella oxytoca
atgcattgccctttctgtttcgccgtagataccaaggttatcgactcacgtctggtgggcgaaggctcttccgtgcgtcgtcgccgccagtgtctggtctgcaacgaacgctttacgacgtttgaagtggcggagctggtgatgccgcgagtcgtaaaaagcaacgacgtgcgcgagccttttaatgaggacaaactgcgcagcggcatgcttaaagcactggaaaagcgtccggtcagctcagatgacgtcgaaatggcgcttaaccacattaaaacccacctgcgcggaaccggcgaacgtgaagtgccgagcaaaatgatcggcaatctggtgatggaacagctgaaaaagctcgataaagtggcctatatccgcttcgcttccgtctatcgcagtttcgaagatatcaaagagtttggcgaagagatcgcccgcttacaggactga

SEQ ID NO: 173000 - DNA, 1104 bp, Klebsiella oxytoca
atgcaggacgaaatatacatggcgcgagcgctgaagctggctgcgcgcggacgcttcacgactcacccaaatccgaatgtcggctgcgtgattgtcaaagatggcgagatcgtcggcgaaggttttcactatcgcgccggtgaaccgcacgcggaggtgcatgcgctgcgcatggcgggcgaaaaagcccagggcgcgacggcgtacgtgacgctggaaccctgcagccatcacgggcgtacgccgccgtgctgcgaagcgctaattgccgcaggggtaacccgcgtcgttgccgcaatgcaggaccccaatccccaggtcgcggggcgcggtctgtaccgcttgcagcaggagggcgttgacgtcagccacgggctgatgatgaatgaagccgaagcgctgaataaaggttttctcaagcgcatgcgcaccggcttcccgtggatccagctaaaaatgggcgcatcgctggacggccgcacggcgatggccagcggagagagccagtggatcacctcaccgcaggcgcggcgtgatgtccagcgcctgcgcgcgcaaagccacgctattctgaccagcagcgcgacggtgctggcggacgatccggcgctgaccgtacgctgggacgagctcaacgctgaaacccaggcgctgtacccgcaggaaaatctgcgccagcctttacgcatcgttattgatagccacaatcgcgtcacgccgcagcaccgtatcgtgcagcaggcgggcgaaacgctgtttgcccgcacccgtgaagatgaacggcagtggccggagagcgtacgtactctgctggtgccggagcataatggtcggctggatctggttttattgatgatgcagctgggcaaacagcaaattaactcgatctgggtggaggccgggccaacgcttgccggcgcgctgttgcaagccgggctggtggatgagcttatcgtctatattgcgcctaaactgttaggcagcgatgcgcgcggattatgcgcgctgccggggcttgagaaactagcgcaagcaccccatttcaaattcaacgagatacgtcatgtaggcccggatatttgcctgcatttagtgaacgcttga

SEQ ID NO: 173001 - DNA, 471 bp, Klebsiella oxytoca
atgaacattattgaagctaacgttgctaccccggacgctcgcgtcgccatcaccattgcgcgtttcaacaactttatcaacgacagcctgctggaaggtgcgattgacgccctgaagcgtattggccaggttaaagatgaaaacattaccgttgtttgggttccaggcgcgtacgaactgccgctggcggctgacgcactggcgaaaaccggtaagtatgacgcggtgattgcgctgggtaccgttatccgtggcggcactgcgcattttgaatatgtggctggcggtgcaagcaatggcctggcgcacgtcgctcaggacagcggaatcccggtagccttcggtgttctgaccacagaaagtattgaacaagccatcgaacgcgctggcaccaaagccggtaacaaaggcgctgaagcagcgctgaccgcgctggaaatgattaacgtattgaaagccatcaaggcctga

SEQ ID NO: 173002 - DNA, 420 bp, Klebsiella oxytoca
gtgaaacctgctgctcgtcgccgcgcccgtgagtgtgctgtccaggcgctctactcctggcagttgtccaaaaacgacattgctgatgtcgaataccagttcctggcggaacaggatgtaaaagatgtcgacgttctgtatttccgcgagctgctgtccggagtggcgactaacagcgcgtatctcgacggcctgatgaagccgtacctttctcgtctgctggatgagctgggtcaggtggaaaaggcggtcctgcgtatcgcgctgtttgagctgtcaaagcgtagcgatgtaccgtacaaagttgcgattaacgaagccattgaactggcgaaaacctttggcgctgaagatagccacaagtttgtcaacggcgtgctggacaaagctgccccggtaattcgtcccaacaaaaagtaa

SEQ ID NO: 173003 - DNA, 975 bp, Klebsiella oxytoca
atggcatgcggcgaattttccctgattgcccgttattttgatcgcgtaaaaagcgcacgtcttgatgttgaaaccggcattggcgacgactgcgcgctcctgaatatccccgagaaaaaaacgctggcaatcagcaccgacaccctggtggcgggaaaccattttttacccgacatcgaccctgccgacctcgcctataaagcgctggcggtaaatttaagcgatctggcggcgatgggcgccgaaccggcatggttaacgctggctctgaccctgccggaagcggacgaagcctggcttgaagcctttagcgacagcctgttcgtacagcttaactattacgatatgcagctcattggcggcgatactactcgcggaccgctggcgatgacgctgggtattcacggctatgtgccaacgggacgcgcgctgaagcgttccggggcaaagcatggcgactggatttacgtcaccggcacgccgggagacagcgctgctggcctggcgattttgcaggatcggctgcaggtggaagatgccaccgacgcggattacctcctggcgcgtcatctgcgcccactgccgcgggttctgcagggtcaggcgctgcgcgatctggcgaattcggccatcgatctttccgacggcctgatttccgacctggggcatattctcaacgccagcggctgcggcgcgcgcatcgaccttgatgcaatgccgttctcggatgcgatgctgcgccaggtggataaggagcaggcgctgcgctgggcgctcgccggcggtgaagattatgaactgtgctttaccgtacctgaactcaaccgcggggcgctggacgtggcgcttgccaatctcggcgcgcgttttacctgtattggacagatcgttcctgaatcagaaggcctgcaattcacccgtgagggcaagccggtaacgctggacgttaaggggtatgaccattttggcgcgtag

SEQ ID NO: 173004 - DNA, 516 bp, Klebsiella oxytoca
atgaccattttggcgcgtagtagagatgtggcgaaaagccggctgaagatgagcaacccctggcatctgctggcaacgggatttggcagcggtcttagccccgtggtccccggcacgatggggtcgctggcgtcgattcccttctggtacttgctgacctttattccctggcagctctattcgctggtggtgatgatgagtatctgcatcggcgtctatatttgtcaccgtacggcgaaagatatgggtacccacgatcacggcagtatcgtctgggacgagtttgtcgggatgtggattacgctgatggctttgccgacgatggactggcagtgggttgccgccgggttcgtgatttttcgcatctttgatatgtggaagccgtggcctatccgctggttcgaccgcaatatccacggcgggatggggatcatggtggatgatatcgtcgccggggtgatttctgccggggtgctgtatgtcattggccaccactggccaattgggcttttctaa

SEQ ID NO: 173005 - DNA, 975 bp, Klebsiella oxytoca
atgcactatatccctcttggcgataccgatctccgcgtttcccggctctgccttggctgtatgaccttcggcgaaccggaccgcggcaaccatgcatggaccttaccggaagagagcagccgcccgctcattaaatatgccctcgaaggcgggattaactttttcgacacctctaataattactctgacggcagcagcgaagagatcctcggccgcgcgctgcgcgaatatgcccgacgcgattccgtgattgtcgcgaccaaggtttatcatcaggtgggcgatctgccgcagggactgtcgcgggcgcagatcctgcgatctattgacgacagcctgcgccgtctcggcatggagtatgtcgacctgctgcagatccatcgctgggattacaccacgcccattgaagaaaccctcgaggcgctcaacgacgtcgtcaaggcgggtaaagcccgctatatcggcgcatcgtcgatgcatgcgcgccagttcgcgcaggcgctggcattgcaggagcaaaataactgggctcgcttcgtcaccatgcaggatcattacaatttgatttaccgtgaagaagagaatgagatgttaccgctgtgcagccgcgcaggggtcgcggtaatgccctggagcccgcttgcgcgcggtcgtctgacgcgtccctggggagaaaccaccgcccgcctggtatcggatgaattcggtaagtcgctctataatgccatggatgagaatgacgagcagattgccgcaaacctcgcggaggtcgcagaagagcttgatgccgagcgcgctcaggtcgcgctggcctggctattgagcaagcccggcgtggccgcgccgattatcggcgcgtcaaggcaggaacagctggatgaactgctgcatgcggtcgatttaacgctgacgccagagcagattgagaagctggaagcaccgtataaaccgcacccgatcgtggggttcaagtaa

SEQ ID NO: 173006 - DNA, 1863 bp, Klebsiella oxytoca
atgagttttgatattgccaaatacccgaccctggcgctggtggactccacccaggagttgcgtttgttgccgaaagatagcctgccgaaactgtgcgacgaactgcggcgctacctgctggacagcgtcagccgctccagcgggcactttgcctccggcctcggcacggtagagctaaccgtggcgctgcactacgtctataacacgcctttcgatcgccttatctgggacgtcggccaccaggcttacccgcataaaattctgaccggacgccgcgatcaaatcgggactatccgtcagaaaggcggactgcacccatttccctggcgcggggagagcgagtatgacgttcttagcgtcggccactcgtccacttctatctccgccggcatcggcatagccatcgccgcggccaaagaagataagcagcgtcgcgcggtctgcgtgatcggcgacggggcgatcaccgccgggatggcgtttgaagcgatgaaccacgctggtgatatcaaacccgacctgctggtagtgctcaacgataacgaaatgtcgatctctgagaacgtcggcgcactaaacaatcatctggcgcagctgctttccggaaaactctactccacgctgcgcgaaggcggcaaaaaggtcttctctggcgtaccgccgattaaagagctgctcaaacgcaccgaggaacatatcaaagggatggtggttccggggacgctgtttgaagagctgggctttaactacattgggccggtggacggccacgatgttatcggtctggttaacacgttgaagaacatgcgcgacctgaaaggtccgcagttcctgcatatcatgaccaaaaaaggccgcggctatgagcccgccgaaaaagacccgattaccttccacgcggtgccgaagttcgatcacaccagcggcgtgctacctaaaagcagcggcggcctgccaacttactcgaaaatcttcggcgactggctgtgcgaaaccgccgcaaaggatgacaagctgatggccgttacccccgcgatgcgcgagggttcaggaatggtcgagttttcgaaaaagtatcccagccagtatttcgacgtggctatcgccgaacagcatgcggtcacctttgccgctggcctggcgattggcggctataagccggtggtggcgatttattcaaccttcctgcagcgcgcctacgaccaggtgatccacgatgtcgctatccagaagctgccggtgctgttcgctatcgaccgtgcaggaatcgttggcgctgacggtcagacccatcagggcgcattcgatatctccttcctgcgctgcatcccggatatggttatcatgacgccaagcgacgagaacgaatgtcgccagatgctctataccggctatcactacaacgacggcccgagcgcagtgcgctatccgcgtggctccggtaccggtgctgcctttgaaccgctggcatcgctgcctatcggtaaaggcgtggtgaaacgcaaaggcgagaagatcgccatccttaacttcggcacgctgctgccgcaggccgctaaagtcgcggagaagcttaacgccactctggtggatatgcgctttgccaaaccgctggatgaagcgctggtgctacagctggccgcagaacacgaggtgctggttacgctggaagagaatgccattatgggcggcgcgggcagcggcgtgaatgagctgctgatgtctcgccgtcgcgcggtgccggtgctgaatctcggcctgcctgatttcttcatcccgcagggaacccaggaagaagcgtatgccgatctcggcctcgacgccgcaggaattgaagccaaaatccacgcctggctagcataa

SEQ ID NO: 173007 - DNA, 900 bp, Klebsiella oxytoca
atggattttccgcaacagctacagtcgtgcgttgagcaggctaacgaagcgctgcgtcgttttatcgctccgcagccctttcagaacactccgctggtcgaagccatgcagtacggcgcactattgggcggcaagcgcctgcgcccgtttctggtttacgcgaccggcgacatgtttggcgttagccgcgctacgctggacgctcccgccgccgccgtcgaatgcatccatgcctattcgctaatgcacgacgatcttccggcaatggacgatgatgatttgcgccgtggtcagcccacctgccatataaaattcggtgaagcgaacgcaattctcgctggagacgccctacaaacgctggcgttttctatactgagtgatgcgccgatgccagaagtaccggatcgcgatcgtctggcgatgatttctgaactggcgcaggccagcggcatcgccgggatgtgcggcggtcaggcgctggatctggaagcggaaggtcatcaggttgacctgccgtcgctggagcgtattcatcgccataagaccggtgcattgattcgcgcagcggtacgaatgggcgcactgagcgcaggtgaagccggacgcagagcgttgcccgctctcgatcgatacgcagaaaatatcggtctcgccttccaggtccaggatgacattctcgacgtggtaggggatactgccacccttggcaaacgtcagggagccgaccagcagttgggcaaaagtacctaccccgcccttctgggacttgagcaagcccggaaaaaggcccatgacctgattaccgacgcccgccggtcgttaaacgagctggccgcgcaatctctggataccacggcactggaagcgctcgcgaattacataattcagcgtgataaataa

SEQ ID NO: 173008 - DNA, 243 bp, Klebsiella oxytoca
atgccaaagaaaaatgaggccccggccagctttgagaccgccctgggcgagctggagcagattgttaatcgtctggaaagcggctcgctgccgttagaagaagcgctcggcgaattcgagcgcggcatacagctggcgcgccaggggcaggcaaagctgcagcaggccgagcagcgcgtgcaaattttgctggcggatagcgaagatgcgccgctgacgccttttacgccggacgctgaataa

SEQ ID NO: 173009 - DNA, 1569 bp, Klebsiella oxytoca
atgccaggtgaaaagcgtccaatagtggtatactccgcgccctggatgcagacgccgatcgcgcctgtacaactttttatgcttaaagccccgtcgggcttgccaacgaatattgtcgccatgaagtttatcattaaattgttcccggaaatcaccatcaaaagccaatctgtgcgattgcgcttcattaaaattttaaccgggaacattcgtaacgttctcaaaaactatgatgagacgcttgccgtcgttcgtcattgggatcatatcgaggttcgggcaaaggatgaaaaccagcgcctggctattcgcgatgccctgacccgtatccccggtattcaccatattcttgaagtcgaggacgttccttatacttccctgcacgatattttcgagcagacgctgccgctgtggcgtgaagcgctggaaggtaaaaccttctgcgtgcgcgttaagcgccgcggtaagcatgagtttacctcaatcgaagtcgagcgctacgttggcggcggtttgaaccaacatattgaaacggcgcgcgtgaagttaaccgaccccgatgtgacggtgaacctcgagattgaaaacgatcgcctgctgctggttaaagggcgctatgaaggtattggcggtttcccgatcggcactcaggaagacgtgttgtcgcttatttccggtggtttcgactccggcgtctccagctatatgctgatgcgtcgcggctgtcgcgtgcactactgcttctttaatctcggcggcgctgcgcatgaaatcggcgtacgtcaggtggcgcactacctgtggaaccgtttcggcagttcccaccgggtacgtttcgtggcgattaacttcgaacccgtggttggcgagattctggaaaaagtcgatgatggccagatgggcgtggtgctcaagcgtatgatggttcgcgcggcgtcaaaagtcgccgagcgctacggcgtgcaggcgctggttaccggcgaagcgctgggacaggtctccagccagacgctgaccaacctgcgtctgatcgacaacgtctcggataccctgattctgcgtccgctgatttcacacgataaagagcacattattaatctggcgcgtgaaatcggtaccgaagattttgcccgtaccatgccggaatactgcggcgttatctcgaagagcccgaccattaaagcggtaaaggcgaagatcgaggcggaagaagagcacttcgatttcgacatcctggatagagtggtagcggaagcgacgaatatcgatatccgcgatattgctcagcagacagaacaggacgtggtggaagtggaaaccgtcagcggctttggcccgaacgacgtaatcctcgacattcgttctgtcgacgaacaggacgacaggccgttaaaggtggaaggcgtggatgtggtctctctgccgttctataagctcagcaccaaatttggcgatctcgaccagaataaaacctggctgctgtggtgtgaacgcggcgtgatgagccgcctgcaggcgctgtatctgcgcgagcagggcttccagaacgtgaaggtgtatcgcccataa

SEQ ID NO: 173010 - DNA, 633 bp, Klebsiella oxytoca
atgattcctgaacaacccgcacgccaggatggcttgccgttgacgttttatattccgggacagtgtttgtcgttttcccaatacctgtggggagcgaggctggcccggctcgcattgccagaacgtcgccgccgtttagctcctgtacccgcatttcttattagcacacttattatgtggctgatttttgccttttttgcgtcattgagcgatggtcattatcagttcagattaagcgcctggtccattagcgatggggcgggcgagtatcttttcaggttacgcaattcaaaggtgatagccgtttttctgggatgctacattgtcggcgtgttgaccatccggcttctttatcgccgatttcagagatgttggtcccgtcgcttttatgacgccaatgaagctattcgcagcggatattgccttcagctgtgggaggagggcgtaagctggatggatcactctaatcaaaattaccgggcttttctggcgtggagacacgttaaggggatcgtaagtcacggaaaaatggattatttagatttagggaccttaggatttttgtggatccccgttgatttagatgcgtatccgcgagcgcaggtattcaggtttattgaacgtcatatgtga

SEQ ID NO: 173011 - DNA, 594 bp, Klebsiella oxytoca
atgagcgcgtcggcactgatttgcctcgcccctggtagcgaagagaccgaagcggtcaccaccatagatttactcgttcgcggcggcataaaggtcacaaccgccagcgtcgccagcgatggcgatctgacgattgtctgctcgcgcggcgtcaagctgctggccgatgcgccactggtggaagtggccgatagcgacttcgatatcatcattcttcctggcggcattaagggcgccgagtgcttccgcgacagccctctgctggttgagaccgtgcgtcagtttcacctttccgggcgtatcgtcgcagcgatctgcgccgcggcggccaccgtactggtgccgcataatctgttccccatcggcaatatgaccggatttcccgggttgaaagatcgcattcctgccgggcagtggcaggacaggcgcgtcgtctgggatgctcgcgttaagctacttaccagccaggcgcccgggacgtccattgatttcgctttaaagataattgatctgctggttgggcgtgaaaaagcccatgaagtcgcatcacagctggtcatggcggcgggaatttataactactacgaagcgtga

SEQ ID NO: 173012 - DNA, 912 bp, Klebsiella oxytoca
atgaaagtaaccgtactcggatgcggtgcactgggacagttatggctaactgcgctgtacaaacacgggcatgaagtccagggctggttacgcgtcccccagccattctgtagcgtcaatgtcattgataccgacggtagcgtgtttaatgaatcatttatcgctaacgatcctgattttctcgccagtagcgacctgttgctggtcacactgaaagcctggcaggtctccaacgcggtgaaaaacctgagcgcaattttgccctcatcatcgcctgttttgctcatgcataacggtatgggaaccgtggatgagcttaaaagcatcagacagccgctgctgatggcttcgacaacccaggctgctcgccgcgacggcaacgtcattgtccacgttgccaatggcaccagccacattggtccggcgaaaaattatccgcaggactacagttatcttgccgatgtgctccagggcgtgctacctgacgttgcctggcataataatatctaccccgcaatctggagtaagctggcggttaactgcgtgatcaacccgctgacggcgttgaagaactgccagaacggcgccttacgcgaatatcctcaggaggtcgctgacatctgctatgaagttgcggcggttatggagcgcgaggggatgcatacctcgccggaaaacctgttattctatgttcatcaggttattgaaagtacggcagaaaatacttcttcaatgctgcaggatattctcgcccagcgccatacggaaatcgactatattaccggttttctgctaaagcgtgctcgagcccacggtatagccgtacctgaaaatacccgtctgtttgaactggttaagcgtaaggagaatgaatatgagcgcgtcggcactgatttgcctcgcccctggtag

SEQ ID NO: 173013 - DNA, 492 bp, Klebsiella oxytoca
atgccatctttcgatattgtctctgaagttgatcttcaggaagttcgaaacgccgtagagaacgcgacccgtgaagttgaatcgcgttttgattttcgtaacgtcgaagcgagctttgaactgaacgaaaagaacgagtccatcaaggtcctcagtgagtctgatttccagattaatcaactgctggatattctgcgcgccaagctgcttaaacgcggaattgaaggcagttctattgaagttccggatgagttcgtgcatagcggtaagacctggtttgtcgatgcaaagctgaagcagggaattgagagcgcgacgcagaagaaaatcgttaagcttatcaaggacagtaagctgaaggtgcaggcgcagatccagggtgaagaaattcgcgttactggaaaatctcgtgacgatctgcaggcggttatggctctggtacgcggcggtgatttaggtcagccgttccagttcaaaaatttccgcgattag

SEQ ID NO: 173014 - DNA, 2658 bp, Klebsiella oxytoca
atgaaacattacgcgaataaaaaaagaatgctaaaattaaatcctgttgctgcttcaatattactgcttttaccggtaatggcccaggctgatatctcaatcattaatgggaacgtcacgtcagcaaacggtgttcctgttgtgaatattaaagaagcaaatagcaaaggactctcacataacgtttacgaaacactaaacgtgggcaaagaaggggtgattttcaataactccgccagcgccgtgcaaacgactctggccgggcagattgaaggtaatgctaatctcgcgggtggaaccgcgaaagttattttgaatgaagtaacttcaaaaaatgcaagtaccatcaacgggatgatggaagtggccggcgactctgctcatctgatcattgctaacccaaatgggattaccacccaagggggtggtttcatcaatgcggaaaaagggacgctgacgaccggtacgccaaatgtaaaagatggtgcattaactggttataccgtgaagggcggcaatattactgttggtaacttccaaagtgaatcacccacagaaattttagcccgcagcgtcaaagtgaacggaagtctaagagttgatgagctatcagtcaccgcaggcaacaacgttatcgatgtcgatggttctatcaccggcacagtggaggccatcgataaagctgcttcctatggcgtggatgtctctaaactcggcggtatgtatgccaaccgcattaatttgattagcactgaaggcggcgttggggtacgtaacgaagggactattgccggcggtgccagtggccttaatatcactagcaacggtaagctaataaataacagcgctatgatccaatctagtggcgacatagctgtaaatacccatggtgctctggataatataaacggtaaaattaacagcggtagaagtattacaattgatactgccaaaagcagcatcaataataccactgggggaaacatttctgctgcatcagatattaacattctgagcggtgcactggataatgccaatggtaagattgcatctggaggaatgttaacggttaataccaacaataataagctgaacaactccggaagaagcaaaaacgctggtatcgaagcggcaatagtacttatcgagagcggagaactcagcaatagtaatggtcaaatacatggcaattatattaatctaaagaatagctctatggctaataactctggcgttattgatgccgatggaaacgtagagattaatagtgctggtaatatagaaaatataactggcttgattcgctccagtgcagctaatgtaaaaataacaactactaaagctattaaaaataacaataataaatcactcgatccggccggtgctgaggccaaaggtataatttctggaagcggcacagacatctcggcagattatgtctttaataatgctggaacaatcgcctcagctggtgatattaaattaaagaccactagagatatcgataactaccaggggaaaattgaaagtagtcagaatatttcaatcgaaggtcgtgagctgcggaccagccaggcaggaatcaatggtataaaaggtgttaatatcgagcttagcgacaaatttgatagccgtcttgctatggtaacgtctaccgagggtgacgtatcgattaaagctaacaaaattattaacgacagctcattgattctcgccaaaaatatcaacgttgaatcaggctcatatctggacagcaagtattcaatgatggtctccgatgaaaacctgacgttaaaggcggaaggcgacattaatgttagttctagtaacatgtttggagcttatgctggacaatatttcggttatatcaaccaggaaggcggtgtaatcgccggtaaagatctgaatattactgcaaaaagtgtcaacaatacttctggacgtattatctctcagtcgggagatgctaacattaacctttctggtaacctggcaaacaacaaagggcaggtggttgctaattctggcaacatgaacatcgctgccaaacatgttgctgcagattattcaaccgtttacagtgcaggcaacatgaatattaatgttgactcgctgtctttagaaggtaacggttctatcgctaaaaataccgcaactggtattatttcctcagatagagatattttcataaatgttaatggtgattatttcaataatggctggattagtggcaagggggatgtgactgtaaaaagcaccggctatttaagaaattctcataccattaatgctgacgggaatcttaacgttagtggatacactatagctaacaataaagatatcgtttctggcaaggcattgacaattactaccaatactgacttgaccaacaatgctaatggtaatatcactgggtatacgaccagggtcgatgctaataatgtctctaatatgggtaacctggttgcttcatcccaactcaatttgaatgtggcaaataatatctataactatttgaatatctataccgaaggaaaagcagtaatcaatgccaaaaaagttatcaatactggcttttgggctgtctttggtggggctcaaggacttcatacagctgcaaatataacaaatatatttggtactgtggttggtaaatag

SEQ ID NO: 173015 - DNA, 1647 bp, Klebsiella oxytoca
atggatattcgatatattttcagcgcggccttgatattaatgagtttcagctcgaagacgtttgcagacatgccactcgggcgtatgataaaagaacagcagagtaatgataatacatcaatcaaagaacggaagattgaaaaaaaagatgttttttcgcaagccgtacaggaaatagcggtggatagcgattttccgcaagaaacgccatgctatgatattgacgagcttattctcgaaaatgacttcctgaacgatcgctggatccaaaaaattaaaaaaagaatcaccggtaagtgtttaggggtcaaaggattacaaaaagcagctgtcgttttgcaggatcactttataaattccgggtacataacaacccgagtcgagataccttctcaggatcttttgactaaaaaactaaagctgcgagttattcctgggcgaatatcacaacttattatatctgataatgatataagtacatgggggttgccctttaaggaaggggatattctgaatgtcagggatattgagcaggggctggaaaatatacagaggacgccttgggttgatgttaagataaatatcatacctggcgttaacaacggtaccagtgaagttgagattaaacctcagcgtactaaaagatggaatttaagaacaacatataacaattttggtgataaaagtactggcaaccaactcttagggacaaccggttatctttataatttaacgaaatctagcgatcttttttatttggccggtactagtagtcagacaggcgggtataaaaatgttagcacctactatagtatcccttttggatactctgaattaagccttttttatagtagtagtaaatcaaaacagagtattgatgttggcccctatgattttgactatgtgggtaagacgcagtacttcagccttaagggatcacgaatgctgcatcgtgatgcgagttcaaagctttccgccaatgcagaacttatcagacgcaagtatgattatacattagggggggaagaattagttttacaaaaacgcgatatgagtaatttgaagttcggggtaaattacaagaaaaatttccccggggccgtattagattccagtttaagctggcaacgttttatcaaggccttaggaagtacagaaacgccggatatgcgtaacggagatgtaagtcgccagagtcagatcatgaatctgaatgtgaattatatgaaatggctaacttcattacctgttgatgcttattatgaacttaatctcggtgtacagtatacgccggataatcttactctacaggatcagcttactataggcgaccgttggagtgttcgtggctttgatgatagtggaggaatttatggtaataagggattttatatacagaacacgctcaatcttattacaggttataaaaacataactccctattttggtctggattatggccaaatcatcggtaaggtcccggtgcaggagattgagagtaaaaaaataatgggcggcataaccggtttaaaaggagttgtttatggtttggagtacgatttatccttatcgagcccttttgtctaccccgataatttaaatgtagataagtataaagttaagtttaactttaattaccaattataa

SEQ ID NO: 173016 - DNA, 369 bp, Klebsiella oxytoca
atgcgtgttggtacggatattgttgaagtggaaagaattattcaggccttgacgaacagcaattcttgctttttacagagagtgtttactcatgctgagattaataaaattaacccgcacgacccaaattatgagcgcgcttctgggttctgggcggcaaaagaatcaattgtaaaagcagtaggttatgggtttaacaataaaatccgctttcatgatattgaggtcacgcatgatgaatatggaaagccagcgtttttgataaccggaagactgaaggaaattctcgatgagcaaggagttgctaatatctccttaagtatctctcattgccgtactcatgcaatcgcagtgactattctttgttaa

SEQ ID NO: 173017 - DNA, 756 bp, Klebsiella oxytoca
atgtataattataatgacctcgttgataaaaccgtattagtcacaggcgccagcggtgatatcggtcacgccatttgcggcaaatttcttgagcaaggatgcgtcgtttatgcactttactgcaccaataaagcgcagttgaaggagcttcaatcacatcatcctgctggaaaaaaacttcatctcctgcagggggatctatcgaatcaggaagatgttgcggccatatgtgcacaattatccagtgataaaggaaaactggatgttttagtgaacaatgcaggaatagtgaaagataacctctttgctgctatgacttttgatgattttagctctgttattaatactaatcttctggggctttttcgcttgactaaagaggtcttacttttgttacgttcggcccagaaccctacaatcattaatgttgcatctattgctgctattgttccgagtattggtcaggttaattatagcgcttccaaaggtgccattttaagtttcacacgaacgctggccgctgagcttgcgccgcggggcgtacgagtaaatgccgttgcgccgggaatgatcgaatcaaaaatggttaaaaaagtgtctcgtacggtagtgcgtgaagtcactaattcaattccgcttaagcgccttgggaaatgtgaagaagttgcaaatactattgtttatttgagctcttctgcttcaagttatattgtcgggcaaaccatcgtcattgatggtggtatggttatgcggtga

SEQ ID NO: 173018 - DNA, 510 bp, Klebsiella oxytoca
atgggtgggtggcgccagccattgttaatggtagatagaatcgatgattttaagtatggcgagaatgggtatgttaaagtgataaagcatgtcacttataatgaaccgtatcttcttggccattttcctgaagatcctatcatgccaggggctattatttcggagatatttggccaggctagtgaatatttctcttttttgtgtgacatttgcgatatttatcaactacgcacagggcgagaatttctgtctctgcgtgatatccacacatatatagatcaacctgaaatgcttgaagttatacataagcgtcgggcacaggttcgtggagtactggctgcgcaaaatttgaagtttaaagcctcagcttatccgggggatactattgaagtggtaagtaaactcgcgttttctgataataatggctttaaacattactcggttattgccaatgtaggtaagaaaattataagccagggcaccattatcaattttcgggaagttttataa

SEQ ID NO: 173019 - DNA, 282 bp, Klebsiella oxytoca
atgactgatattaatgagaagatcgatcaaagaaaatcaatacttgtgactataaaagcggagcttattcatcggcttaatattcaacgtgaagagcatcaaattgatgacgatactcctttgtttggcaatggactgaagctggactctgttgatgcgacggagattatcgtcatgcttgataaggcttttaacattcaagtgcaagaaggggatgatccatcatatatgagaagtattaatagccttgcttcatttattattcagaaaaaacattcctga

SEQ ID NO: 173020 - DNA, 1161 bp, Klebsiella oxytoca
atgagctcgcttttcgatttacatttaaaagataatgctgtgatgggcaattataacaaccggagcataccttcatcctatcatgatattttagatgaatataaagcggtgagagagaatgctttgctggtcgactactctcatatggccattgttagcgtaacaggtgaagatgcatggattcttgtaaatcacattgcctctgctgacatttcaattgtacgagatgaacaaggaatttattcactcgtcttgaatgacgacgggactatccttggtgatatgtatgtgctgtgtgccatggatggttattatatattgtctgaaaatatttctgttgccaggattatagaagtccttaagttcgcagcggaaaaatatgatgatttaggtattcaggagaacccggaaataaaatccatggaagacgataactggggggctatcatgcttgaagggccatattcctgggagttgatgtccgagatctatggatatgatatcatcggtcttccttattgcgaatacatgaatactgaagatgacttaattgtcttccgctgcggtaagcatggggagtttgcctatcaagtaattggccctcaaagtttactcgttgaactatgggttaaattacaaaagataggagttaagtacttacttaaaactggcggtttggattaccagcgtatagttcgcgtagaaaatcctggctgggatcaaagcatttacgcagaatattcaacaaaccctgtcgaattacaattgcagtgggctatccagtatgacaaggaagatttcatcggcaaagctgctgttgagctgatgtctgcccagagtgctgctcgcaaagttgttggcattgttccgtgcgttaattgcgcgtcgcttagcaaggatgataaaatccttgttaatgggcagaccgttgggtttattattaatgctgtatattctccagctgcgcaaagttggatagcgttggcgtttattaataccccttatgcactatcagacatcgacggttacataataaaaacagcgcacggtgatattgcggcaaaaactaaaactttaccatttatatataatttcagtttgctggttaacccgacaacgcatagctatattgatccatcgaaagcgaaaagtgttttataa

SEQ ID NO: 173021 - DNA, 2526 bp, Klebsiella oxytoca
atgggcatcctgtcatctcttgcggataatattaaggatttcaggctagccctgctacagaaggaaaatggtattactgatagcgcacgtttttcagaatggtttgaaaatgcacgggcggccgaagtactacatgaaatcgattgtcctgaattatctgaggagattattgcctcgctcgataacgctgcgctgtgggcatataaggttggcagggacgcgttgatacaggccggcctggttaactgccctcgttgccttgatgagatgggcttaatagttggcgtttcctctgcgggtacagaagccttcctgccgctttttgagcagcgaattcaggatttttccttacgtaaggcgatgtattccggtggcttctcttcctgctgttccagcgtttcgacattgttagggctgaaaggtggagtcgaacttgttgccacggcctgtacagcaagccctaatgccgtaggtatggcattcgattatattcagaatggcaagagtagcgctatgctggcagttgggacggagccgatctatttaccgacctttgctggcttttatgctctcaatgtcatgcatcccgtatcctgttcacctttctctggccaatccggtatgtcaattggcgagggggcgggggctattgtactggaagagtatgaacacgccattgcacgcggcgctaccatctatggcgagattctttcttatgccacatcctgcgacgcttaccacgaaacagggcccgatccgcgagccagcggagcagtacaagttatgttaaaggccatggctaatgcggggattacacccgatcaggttgattatattaatgcgcacggaacaggtactgaagctaacgatcaaatcgaaacgttggcgatgaaaaaagtgtttcgcgacattgaaaatattccgatcagttctacgaaatcctactttggccataatattggcgctgccggaatcgttgaacttatagcttgcctggtcactttgcctgaccaacaggtactacctacccttaatttcactgaggcacggcctaactgcgatctggattacgtcccgaatgagttcgtaaaaaaagatattaatatctttatgaagaataactatgcattcgggggtaacaactgctgcatgattgtaagcaccaggccgggctcggttccggtgactacatatgaggccaaaagggtagcgataactggcataggagctgtatccgctattgggcatcgtatcaatgaaatacttacgaatattagtcaaattgaaagcagcgccgtcgagcttgaggagatcattttccctcaagatgtattaaatgaagctgaagagctgctgcatgttttaataaagagcaggcagtttgaggagctttttggggcaaattatggcattgccagctgtgaagcatcgcatgaaccatccacctttaaaactttccaggtcaaagggcttgagccgcgtaaacacctgcgtcgcttcgattcgcgtaaggctactcgcggcggtaccttcgcgctaattgcgcttacggaagcgctaaatatggctaagcgacgtattaagcgcgatggagaagaactcggtctggttatgggcatggcacgcgggccacaagagacgacttataaatatttgcagagtctgaagccagaccctggaaaggtacgtacgtcggagtttcctggttcactgatgaatgcgattgcaactttttgcggtatttctgaaggggtaaaagggtacaccactactcttgcaaccggtgaaaatgcggctcttggcgcattaacttatggttatgagatcattcgccagcagcttcagccgcaagttattgtcgggggcgctgatgagtatttcccatccatgtctctgtacatggatggggtgacgcagaagattcacgcggcatctgatgtcagggactatcaggtctatgctaaagaagcgaagggctacgtacctggcgaaggcgcctgtatgttaatgctcgaagatccgcttgcggccgctgcgcgcggcgctgaggttttagcggaagttgtcgggtatggtaaatcatgcaacaacagctattttgatgttactcaaattgatgaaaaatccagcgcaatggccttagccatcgaacgcgcgcttaatgatgcaggaatttgtgccagagatatcgatttggtgtgtggcaccagcaacggaagcattgagaattcaacaattgagttgaatgctatatatgaatcatttcgtcaggttaatccaatagtcccggtagtcaactacaacgccttttttggcttcgtggcttcgtgtgcaggcttgttgaatctgatcatacttcttgattgtattaaaaagcaggcggttcctgctataccgtataccagcgagtttgttgatcagcgtataaattttgtgcgtcagcctctgaatatcaaaattaaatatgtactgctggtaggggcgacggaaggcggcaactattacgcaattattatcaaaggataa

SEQ ID NO: 173022 - DNA, 1221 bp, Klebsiella oxytoca
atggacaggaagtctattatttctggttatagcgttcatttaccatttgccgatgatggttcactgctcattgcaaatctgaaacagggaaagcgtgtcaaaaccgcgccttggttcaagtcgaatgatgaagctattaaatgtgggcttcgtggtaatgtcaatgttgcaaagatgaaatatagtaatgatagcattcctgaattactctatcgcctaattgatgaggccttaaggcagtcaatgctggatgagaattgtcttcgagaagataatatcagagtctatattactggtatagggcctcgagttgatgctatagattatcgttctttcgctacttataatgatattgaagatctcgcgctgactccttcaataaccaatttatgcgccaaaaatatgtctcaggatataatcgcagagcttttggctaaaaaatatcgtttgcggtatctaccaccgaatattaattgcaccagtaactccgggcttacagccgttcatctggcaagccatgcaattgagcgcggtggtatagagcttgctctcattattaatatatcccaggtaaaatctcaggatatttggtttctctcaactcaatcaatgttggatacggatcttgttcaaccgtttggtgtaaatagcaaaggggtgatctttgctgaaggttatagcgttctggtacttgaaagtgaccatcatcgcctggctcgacaacttgttgatggagtgagtatcaagacggcttataaacagattaatgccagtagaagtaacgatgtttactggcagagtacctgtatattaaaactagtcaaccaactcttgaatgatacgagagttaaaattgaggacgtgtgcgcttttatccctcatggtaatggtacagcgttcagtgacagcattgaagccaaagctattgctattctggcaggggagaatatgctaccagtcctcgcttacaaagggcaaataggttataccgctactggttctggattggtagatttaataattggtcatcattcagtaagttgtcatgagttaataaaatcggtaattaatgaacccattgttaatggtatagctcaccactttcttaccgggccgggagtaataaaacatcacaagagccatttgcttaaaaccggcttaggggtagatggttctattatcgcagctttgctgtccaataccgccagggaagctagctaa

SEQ ID NO: 173023 - DNA, 963 bp, Klebsiella oxytoca
atggatgatgctatgcatttattatcgttgtctcttatggagcccgaggcacctttatttttatacagtcccagttggctaaatgtttgggaagcacattcctatgatatagctttgaaaaataccgatacaaatagctgggcttttaaacgatttggtactcgcgcagatgcctatgacaaagaagtagtgaacagaactaattacatggcgtatatctctgcgttagaaaaagtatccgatgtcgcaatgcaggcgttgcctcagaaggaacgtatgctattgatgaaatcacgaactgcttttatctatgttgactcatggggagaagcggctggctttgaatatgatataagtacgctgcatttatctaccattgatacactaccaaaaaatttagtaaaaaagttttctgtagataatgtcacatgcaaaatccgcggtgaaaaaaatgcgctgattcaggcaatgcgcctggcgcaagactatttaagctgggatatctttgattttgtcattgtttgtggtggttatcgtgccataccattgttagcgtttaccgcaacaaatattaatcctcgtagtaaaatgaaagaatctcgaaaaattcttgggatgaatttatcaatcgaacgcgtaggatgttttattttcagtcagacaactggtgatctaaaagtaaactgcgggccctattttagcgcagactcatcacagtatcaaaaaaattatgcatcagatattgatctggttgcattttccggcagggccagttcgataacgccattttttaaccatcctgtaaaattactcgatcttgaaaagaaatatggttctagtggctgcataacgcctgctttgagctggcatcatatttttcagcacgcttttaagggtggtcgcatgagaacaatcttgcccgatcataatggcggcttaacttattttgatacctggtattaa

SEQ ID NO: 173024 - DNA, 708 bp, Klebsiella oxytoca
gtgagaactaatattaaagaattgccagctatttctttgcatggtatttataaaaattatggaatgggcgagaacgaggttgttgcgcttaaaaatatcaatgttgatatcgctgctggcgagtttatggctttatgtgggccttctgggagtggtaaaagcacattgttaaatatattatccggaattgataaaccctccgcagggcatgttttctttctcaataaaaatatgaatgcattgtcagagagaaatctggcagcaatacgtagtaagcatctggggtttattttccagttctttaatttaatcccggtacttaacgtgtttgataatgttttttatccattgatacttaatggccatttcgatgccagaactgcaaaggagcgaaccctccattttctgaatagcgtgggtttatccggcctggaagaccggaaaccggggcagctatctggcgggcaacaacagcgtgtcgccatagcaagagcactcgcacatgaacctcagattgtcgttgcagatgaacctacgggaaatctcgacctggcgacgggagacgcaattctggatcttttactagatatcaatcatcaaacgggcaccacttttattatatcgacccactccacccagctaacggaacgtgcgcgccgagtggtggaaatccgtgatggagaattagcttatgattcatatgaataa

SEQ ID NO: 173025 - DNA, 645 bp, Klebsiella oxytoca
atgattcatatgaataatttcttcaggttactatgcctgagcctgtctctggttattgtagccgccacggcggctcccacttatacgcctgtagttgaaagcatactccataatgggtttccaactcagcctgacgtgttagcaaaaacgactcaatctctatccgatgagttcaaaaagaccggaaatattgcttcgctggttttttatgcctatgggatgttgaggcaagcaaactattttttgaccactaatgatattattagggcttcagagtatgctaaaacaggcttcttttatctcgatgaagctgtggatttaaatcaaaacataccactcatcagatatctgcgtgccaaggtcgatgcgtacctacccgccgagttgggacgctgcgttattaccctcgaggacacagacatactgctaaaacaagaattaagtagcagaattcgagataacgtcaatgatatgcgctacagagcattttataactgtaaactttatcaacaggctggccaattattatcaatattacaggtggataatccaaataaaaaaattgatatggcttataacggttcatctacctggggacttgatgaagttacgcaaattattataccccttatgagggccaaataa

SEQ ID NO: 173026 - DNA, 1311 bp, Klebsiella oxytoca
atgtcagtgaatatgatcttcgtaaatggttttgtacttataattgttttatttatcatctattgtgtcgttttccgcttccgtgatgctaagttttcttttttgaatttattaaggcatcgcagaagaactttgtcaacaatttgtgcgataattcttggcggtgttgctatatttttatatggcggctttattaattattctttctggattctccagcagcaaacaatccgcacaaacattggtcatgtacaagtttataacaaggagtactttgatactgcaaacaagagtaaacatctcatcaataattatgctgctctaaaaaatgatattatgcataattcttcgctagctaatgatatatccaccctttcagggcagcttgagtttacaggagttatttctcaatatgaaaatgaaacctcaagctatttttctgctcagggggtcgagcctttacctgccctgaaactgggtgcctttgataaaatcattttaggcagtgatttatcgcgcgtaaaacgtaatgaaattacaataggcagcgggctggcaaaaactcttgccgcgggttatggcgactggcttgatgtgatggtagttaatacatcaggtggccagggagctttatcgttaaaattgcgtggaatatttgcatccggtattaaagattatgatgatgtagcattgaaggttccgctagatacagcacaaaggattatgggcacagatggcgtgagtaaagtacttatattgctgaataataataatgttgatgaatttatagttaagttgaataaatatattgttgacaataagttgccgctggttgtgaaggactggaaagaaacatctattttttatcaacaggtcgagggaatgctctcaggcatatatttctttatcaaacttattgtcgcgcttattgtcgtgtttatgattggtaattcaataacgatgaatattgctgagagaacgcgtgaaatagccaccctgagagccattggtcttgaggccacccatgtgacattattattttggctggaaggtgtttttattggcgtgtttggtgccatggggagtgttttggtggggtattgcttagctgcgatgatcaatgtttatgggattgctatgccgccatccccgggtcaatcgataggatatactgcgtttattaagattgataatgtcgagcttttctggactacgctggttttaccgattttaacgtcagctcttgcgtctgttcttccttcgtatcgcgcatcacggctcaatatttctgcggcgtttaaatattcctga

SEQ ID NO: 173027 - DNA, 789 bp, Klebsiella oxytoca
atgaaacacctgaaactgcgcttacttattcttattacttttttttcttcatcctgggtaatagccgagactccggcacctcaggctatagatattatacgtttggctgatgatatacgttcgcctaatgtacctttccgctatacggtaactgttcttgaatataaagagggtggcgagcagccggagagtaaacaaattctcgatgtgtcaatgcgttttatgaaacctgaaaatggctcgcgggcagatgcgcgttctttagtccggtttatttatcctccacgggataaagggaagattatgctttctgattggtacgatctctggttttatacacctgaactacgaaaaccgataactatttcaccggcacaaaggctgagtgggcaaatctcaaatgcagacgttatcgtcactaattttgagtacgcctacgattctacaatcgaaggtactgaaccttgcggacagaaagtctgttatagactatcactgatacgcaaatcggataaggtaacttatccaaaggtgatataccttgtagaacaaggagatgatttcaggccttaccaggcatcttattactcccttgataaccaattgctcaaaaaagtctcctataaaaattaccagaaaattttaggtaaatatcggccatctgaaattgtcgtacagagtgctcgatatgcaaaaggctattcagtgatgaaatatagtaacgtaagactggaaaaattacctgagtatttttttacaaaagaggcgatgttaaggggggggcaatga

SEQ ID NO: 173028 - DNA, 1389 bp, Klebsiella oxytoca
atgaaaatatctctctacgtccttattcccttttttactttagtctctaccctggttcagggacactgtctgtccgcaagtgtgttgcaagataatatggatgttactttggcagcgcagatttcatatgtaaataaagaaccgtcaatctggaaaattgatggtcgcaatccgtacgtggccgacaatgtttataatgatattgcgttaggcataaaaggtcagtgcgatctagtggataataatctcaatatggatttttcattttattctttaggttattatccgattcgcagtcccggagtctttgaaaaagataaaaatcgagcaaggataatgatagatcgactgcgttttacctatgctttatctgatacaacacgcctggaaggagggaagctgagaccttcaaaaggggcctttttcttaagatcccccgctacattgctgacaaattattattccggttttaaaacaaaccgaatatatgggccagcaatggaatcagcttatagcgaatcattttgggggggcacattatctaaagagtatcaggattataattttttacttacgctagctcccagattgagcagtatcgataagtactatgaatcatcaggcaactggtctgcagcacaacgctcaaatagcgaagagcgttacctattaacttataatgattaccgactagctagtcatcgcctgtccgctaatttactattaggcgataatccggcgttttcattatcagaactatataattatacatcacagtttttaattaatgctgagttttcctggcataaaggccagcagtggcgtcacttctcaaatgataaaaaagaggccgtactggctggcgcatttccatcctcactatattctgtggaggataaacaaggcgttgagtttgcgcttggcgggcagtatacaactgatagctttagcgtattcggcttagaatactatttccagagtgagggatattcgaaaaaggcctggcaggagcagattgatttcattcgcttgatgggatacaggactggctacgattttttagaccgggcctttgataattataagtatcttatggcctcagagattggtaacacttcaaataaaggcatgctgttatccaaacattattttaatacctattttagcctgcgtaataatgaccagtccaccctgcaaccctatgcaatgataaatatagcggatggcagcgtattatttggggcccattttattaaacccttgcaaggtaagtgggcgccgtttgagttatatgccggcgcatacagctccctgggaggttctgaatcagagtttgcgctatttggtgaaacactaagcatttatgtcggttttaaatactatttataa

SEQ ID NO: 173029 - DNA, 933 bp, Klebsiella oxytoca
atggtatcacagctatcaacaccttctgtcgctcttatctttgcaggacaaggtaaccctgttattggaatggggtctgatttgtgggatctgaatgcagtcacaaaaaatatttgggactgcgcgagcgatattacccaaattgatattcgccgtttatgcgagcgcgggccgatgagtcgcctggtccagacaacggctcagcaagttgccgttacggctattaacgtgacgctctattgcctctgtctggaaaaaatgcctgatttgccaatcgtgggttcttgcgggcatagcgttggcgagtacagcgcgcttttcgctgcgggtgcatttaacctggaggcgctttttaggatgatacatacccgttcaaagattatgaatgatttaagtaaaattcataaaggagctatgctcgcggttaagggcactgattttgaaaccttaactaacatgatttccgcatctggtatacctgtcgaggtgagttgtgataacagctgtcgtcagcaggttatcggtggcacgactgctgatctgggccgtatctcacagatccttaatggtgccggtttagaggtagttaaactgggggttagcggcccatggcatacgcgtctgatggccgatggtgttcagttgatgcgcgattttttgcaaaaaatcgatatttgttcgcctaaatatagcgtgctgatgaatgttaccgggcatgcagaattccttcctgagcagatcaaagaaaatctggctctacatctgacgcatacggtgcaatggacaaaatctcttacggctcatttacagaattctcagccggtaacttttctggagttcagcaataaagcttatttaggacaactcctttatgacttccggcgtttcgcgccagaaaatgtcgtgcattgtagaaagctgattggcttgtaa

SEQ ID NO: 173030 - DNA, 987 bp, Klebsiella oxytoca
atgatccctgactatttaacatttactcgttatcaggataaacgagtgattatttatctttatcttttaactatgtttttacttttccttttctggaaaaacaatggttataacttactgccgagtaatgtattgagcctgagcattatcctggcattaattgtcttttcttttatttacgagctgaaaaactattggggttataaatgtgtcatgaagcatattgatttttcctgttttcaggggaaagctatatcctcgtatgaggcgtttttgtggcatccggcagtcgttaccttctcatactttgcgatgttttatcttctcattacgaactgcctgtcgtttatgtcatcgggtcctgcactactttgtattgctattatttcgccaatggctatttatctggcgtttaaatatgcacgttatagctacgtgaagcgaatgaaggattttactgctcaaaaggtagtctggcgcaatttacatcattacgtcggttttaatctttttatcacctttttaatgaatagcttgatagtcagcccgttagcaaatgaggatgatttttctttggccgatggttttttttcagccagattaatgatagcgatgtttattctttgcattattgttttgtttttagatatgatgttcatccgcccatcgaaacgctacatttttctcgggcgattgttcctgagggaatttgacttccatctatcaaagtcaatcccctggctatggctctataataaagcgatgtggcttagattattcatggttttaattattcagtttatttggatagttttgctcaatgtttttttggcattttcgggattgagtgtttattttgaattttattttttatcctgctctctgccttcatttttttatttctatctacatgcttactggcattggcataatgattatatcgtcgcatgtgatatgtattttcgttgcgatcgaattgaacgttaa

SEQ ID NO: 173031 - DNA, 327 bp, Klebsiella oxytoca
atgaaagaattaacacaatatgaaatggaaaatatctcgggtgctggcctctttgacctgccttgtgccctggttgatttcactattcaatccgcacttggactgatgaaagttggctttgatggctcccttaccattgccaaaacggcgctggaaacctctctggatatgcttagcaacttgctgagtggctccccatccagtattggtagcattctggcagatcacctgaattcaatgatgtatgaaaaatcaggtatctggtcaaacttcgtctatgatgcagcgacgaactggggcgacgtgatctcttctttacagaaataa

SEQ ID NO: 173032 - DNA, 1386 bp, Klebsiella oxytoca
atgaacgataacaaaatgacgccaggcgaactgcgcgcaacctggggtctggggaccgttttctctctgcgcatgctcggcatgtttatggtcctgccggttctgaccacttatggcatggcgctccagggcgcaagtgaagcccttattggcctggctataggcatctatggactggcgcaggcaatattccaggttccttttggcctcctctccgatcgcattggccgtaaaccgcttatcgtcggcggcttgttaatcttcgttctcggcagcattatcgccgcgctttccgaatcgatctggggcattattcttggccgcgcgctgcaaggctccggagcgattgccgcagcggtaatggcgctgctttccgacttaacccgcgaacagaatcgcactaaagccatggcgtttatcggcgtcagctttggtattaccttcgccatcgccatggtcctcggacctattatcacccaccagttaggcctgcacgccttattctggatgattgccgctctggcgatgctcgggattctgcttacgctgtgggttgtgccaaatagccataatcacgtgcttaaccgtgaatccggtatggtgaaaggctgctttagcaaagtgcttgccgagccaaaactactgaagctcaatttcggcattatgtgcctgcatattatgctgatgtccacctttgttgccctgccgggtcagttggaagctgccggttttcccgcagctgagcactggaaaatctatctggtcaccatgctggtctcttttgttgccgtggtgccgtttattatttacgccgaagtaaagcgcaaaatgaagcgcgtttttctgctctgcgttgccattttactgatcgccgagatcgtactttggggagcgggaggctatttctgggaactggttgccggcgttcagctatttttcctcgcgtttaaccttctcgaagcgttactgccttcgttaatcagtaaagaatcacctgccggctacaaaggaacagcgatggggatttattctaccagccagtttcttggagtagcgattggcggatcgctaggcggctgggtagacggcttttttgattcacaaaccgttttcctgcttggcgccctgctggcaatgctgtggttactggtggccagcaccatgagcgaaccgccttacgttagtagcctgcgggttgagatccctgccgacgtggtggcggatgagatgctacagcaacggctacaggctcaagcaggagttaaagaggtactggtagttagcaacgaacattcggtgtatatcaaaatcgacagtaaggtgactaaccgctttgagattgagcaggtgattaaacagggggcagttcagaccgtttccgcgtaa

SEQ ID NO: 173033 - DNA, 1179 bp, Klebsiella oxytoca
atgttaaacggcatgaaacccttatctcgctccctgcgctggggaatggtcggcggcggcggcaccagccagattggctacagccaccgctgtgcagcgctgcgcgacaatgtctttaccctgctggccggcgcgctcgatatcgatgccgaacgcggccgtcaatttggcgagcagctcggaatcgcccccgagcgctgctacgccgactatcaaacgctatttgcagaggaagccaaacgccctgacggcattgaagccgtttcggtcactacgccgaacaatacccatttcgcgatcaccaaagcagcgctggaagcggggctgcacgttatctgcgaaaaaccgctgtgctttaccgccgccgaggcccgcgagctgctggcgctgagcaaaaagcagaacaaaataatcggcgttacctacggctacgccgggcaccagatgattcagcaggcgcggcagatgatcgcggagggtatgctcggggagatccgcattatcaatatgcagtttgcccacggttttcataatgaagccgttgaactgcaggctgaatctacccgctggcgggtaacgcccaaatatgccggccctagctacgtgctgggggatctggcgactcacccgctatttattgcggaaaccatggtgccaaatctgaatatcacccggctgatgtgcgcacgtcagagcttcgtcaaatcgcgcgcgccgctggaagataacgccttcgtgctgatggaatataataatggcgccgtcggttcactgtggaccagcgcagtcaacagcggcgctatgcactcacaaaaagtccgcgtcattggcgaaaaagccagccttgagtggtgggatgagcgcccaaatcagctcagctatgaggtgcagggcgaacccgcgcgcgttcttgaacgtggaatgccctatttaagtccgcaggcgctggcagacgaccgcatcggcggcggccacccggaagggctgtttgaggcatgggctaacctttaccgccgttacgccatcgctatcgatgcaatggatcgccgtgaccaggcgtttctggataacttctggtatccggacgtcgaagccgggctccacggggtctactgggttgagcaatgcgtcaaatccgccgatgcaggcggccaatgggttgattttaactgccaataa

SEQ ID NO: 173034 - DNA, 1401 bp, Klebsiella oxytoca
atgagtgaacagcagatccttatttctcccgtagcatcacgcggcgataagttaacctggacaacccgaatagcctatggtggaggcgataccgcctgtaacgtcgttttcggcatgatcggcacagttttaacgcttttctatacggattatgtcggcattagtatcgccacggtcggtctggtaatgctgatctcacgtctgtttgacggtgtttccgatgtcattatgggtctgatggttgagcgcacaaactctcgctggggaaaatcacgcccctggctgctgtggatgagcgtcccctacgccgtatcggcgattctgctgtttaccgtgccccaaaccaccggaacgctgcagtttctctacctgctggtagcctataacttctgtaccaccgtgtgctacaccgcgatcaatctcccctatggcagcctctccgcgatgatgacccggacctcctgggaaagggatatgcttagcatcacccgcatgtcgatgtcgccatttggccgcatcctcgccgtagcttgtacgttgccgctggtgaaatatttcggcgacgatcaggcagcatggattaaaaccatggccatctgggcttttctggcgctgttgttactgctgttttgcttctacaaatgtgaagaaaaagtggttatcaaagcgcgtgaaaagcagggaaacgtagcggtaaaaacgcagctttacgccctcttccgtaaccagtacttctgggccagtgcgatcctctggacagcccagagcgtttattacaccgtggttggtatcgcgctaccttactactgccgctacgtgctaggcgacgatactttctacagctccattttcgtggccgaaaccgcctgcatcattattttcaccttcctgagttccgtccccattcgaaaatacggtaaacgcaatgtggccctttgcggcattgtgctggcgaccataggccaggtgctgtttatgtttaattctgacgactaccactgggcgctggccaacgccattattcgcggtatcggcttcgcgccgctgaatgccgtgctattcggcttctgcggcgacgccgtcgaatacggccagtggaaaacgcgcgtccgccaggagggaatgatcttctctgcggggtctgtcggtacgaagctcggcgcaggcattgccgccgcggttatctccggcctgttaagcctctcgggctacgtcagttccagcagcggatccggcgttcaaccgcaaagcgctatcgacatgattaataacgtttatctctacggctcgttcttcctgtggattgtggtcatcatcaccctgctgttttatcggctggataaacagtacccacagattatgcaagagctgaaagagcgcgaggcgcgtggagaaatgtaa

SEQ ID NO: 173035 - DNA, 1365 bp, Klebsiella oxytoca
atgacacagactcaacgcctggacgtcagggagttaatcaacgccaatccgctcagccgctttcaaaaactggtggtgtttttaggcttctgcgtgattgcgctggacggctttgatatcgccatcatgggatttatcgccccgacgctgaagcaggaatggggagtaagcaaccatgaactcggttttgtcatcagcgccgcgctgataggccttgcgctgggcgctatattctccgggccgctcgccgactggctggggcggaaaaaaatcatcatcaatagcgtcttcttcttcggcttctggaccattgccaccgccctttcgcaaaacatcgaacagatggtgctttttcgttttctgaccgggctcggattaggcgccgccatgccgaatatcggcactctggtgtcggagtatgcgcctgagcgtcagcgctcgtttctgattacgattattttttgcggcttcacctttggcgccgcggcgggaggattctccgcctcatggctaatcccgaagtttggctggcactcgctgatgctgctcggcggcatcctcccgctgctgttcgcgccgctcctgatctggctgttaccggaatcggtgcgttttctggtggttaagcgcgcgccagcccgacgtattcggctgattttgcagcgcctctatccgggccaaatcgccgatgatgccgagttcactctcccagcccagcccgtgcaggcaaatgcgatgcgcatcgttctctcccgccagtatcgcttcggttcgatgatgctctggctggtctattttatggggctctttctggtctatcttctcggtagctggttaccgacgctggtgaaagaggtgggattaacggttggccaggcggcggtgatgaccgcaatgtaccaggcgggaggaaccattggctcgctgtttgcgggctggttgatggaccggattaatccgcatcgggcgctcggaatgatttacgccgttggcggcctgtttacgatggcaatgggatatgcagcggcaagctttgcgctcatctgcctgctggcgtttatcagcggagcctgtttaaacggcgccaataccggtatgaatgcgctttccgcccgctactatcctaccgaagcgcgggctacaggttccagctggatgcacggcgtgggccgcatgggcgccatcctcagcgcttttgccggagctgagatgctggcgctgaatattagcttcgaaagcgtttttctgatccttggcatccccgccgcgatcaccgtcgccgggctcgcggccaaaggaattttcgcggctgattcggcgccaaaatccacctcctccaccgccgcgttcggcaataccggttaa

SEQ ID NO: 173036 - DNA, 819 bp, Klebsiella oxytoca
atgaacatgcgaaccctgtcactcgccgcgcttaccctactcgacgtcccgccaccgcaacaggtgcggatcgcggcccaaaccggatttactcacgtcggcctgcgcctgcttcccgccacggcgaccgaccctgactatggcatgctgggcgatactgccgctgtccgcgataccctggcagcgctgatagaaaccggtattcgcgtctcggacgttgagatagtccgcctgacgccagatttttcgctggacgctcgtttgcagctctttctccataccgccgcgcgtctgggcgccagacaggttttagtcgccggaaatgatgacaaccgcgctcgcagcgcggaaaatctggcccggcttgccgaagctggccaggagtatggtttaaccatgaacctggagcccatgccctggacacagctgcgcaccatcgccgaagcccaggcgcttatcgccgccagcggccgccaggatatcggtattttgatcgacgcgattcatttctggcgctcaggcgagtcgctgtctacgctcgccgcgctgccgaaaaactgcctcaactatatgcagctttgcgatgcctcgccgcagatcccagcagatgaacaggagctgatttaccaggcccgcgccgcgcgtaaggtgcccggcgaaggcgggctcgatctgcatggactgatggcggcgcttccggcgacgctgccggtttctatcgaggttccgctaagcggcgaacgcggcgcgctgccggcactcactcgcgctcagttgctgtttaacgccgcgcagtcctacctgcgcccttgcgcataa

SEQ ID NO: 173037 - DNA, 1704 bp, Klebsiella oxytoca
atgagcgggcagatgaacgtggatgttctggtggtcggctccggcgcggcggggctctccgccgccgtcactgccgccattggcggcgccagcgtgctggttgcggagaaagagtcggtgattggcggcaccagcgcctggtccggcggctggctgtggatcccgcataatccgctggcgcgtgaagaggggattaaggaagagcccaacgcaccgctggtttatttgcagcatgaaatgaacggtgaaccggccgatgcgcgcctgcttgcctacttacggcacggaccggagatgattgactttttccgccgccatactgccgtgcagtttctttccggcagcaaaatgcccgattttcatcattcgccgggatcggccgccggagggcgctcggtcacggcgcagcctttcgatgggcggctgctcggcgactggctgcatcgcctgcgcccgcctctggagactatcagcctcgcggggatgggcattgccggcggcacggatatggcacactttttcaacgccactcgctcgccgcgatcggcgctgtatgccagccgtcgcctgctgcgccacggctggcagcgactgcgcgccggacgcggacagcatctggttaacggcaacgctttggttgcccggctgctgcgctcggcgctggatgcaggagtgacttttcagcttaatgcgccggttgaacggctgctcgcatccggaaacggagtaaagggcgcgatattacgcagcgacgacggccggatagaggttcgggccggtgcggtgatcctcgcctgcggcggctttcctcacgacagacagcgcctggccgaaaacgtgccgcacgccgccagcggctatggccacttctccgccgcgcctccgggtaatcagggggagggcatccgccttggcgaaacggtcggcggccagtttgataccacgctcaggcatgcgatggcctgggcgcccgtttcgcgcgtgacgcaggccagcggtctgcagctggtcttcccacatctggttgaacgcgccaagcccggctttattgccgtactgcccaacggtaaacgctttaccaatgaggctgattcctaccacgattttatcgccgcgctgctggaggccacgccgcctggcgaagcgccacaggcgtggctgattggcgatagccgtgcgcttcggcgctatgggttaggccatgcccgcccttttccttttgccccggagtcctggcgacgcaccggctatctgtacgtcggcgagacgctggaagcgctggcgaaagcatgcgctatcgattcgcagcagctggcggaaacgatcgcccgttttaacggttttgtagaccagggagaggataaggattatcagcgcggcgcgtcggcatacaaccgcgcgcagggggacgccagccgttcccctcaccctacgcttgggaaactcagccgcgcgcctttttatgcggtacgcattctgcccggttcgctgggctccttcagcggtttaattaccgatgagaatgcgcgggttctcaacgcgcagcagcagccgattcagggcctttacgccatcggcaacgatatgtcgagcgtgatgcggggattctatcccagcggcggtatcacgcttggtccggccatgacctttggctacatggtcggtaaaaaactggcagaaaacattaataaagcaacgcagtaa

SEQ ID NO: 173038 - DNA, 321 bp, Klebsiella oxytoca
atgatctatgaaaaacgtacctacaccattaatccgctgaaaatggccgactggctggcgttatataaaagcgatgcttacgccgtacaaaccgaacatctcggcaaactcatcggctttttctttactgaaattggggtggttaatcaagtggtgcatatctgggcctatgaaagcctggacgatcgcctggtgcgtcgggcgcgcatggcgcaggacgaacgctggctgacgttttcacgcaagaaccgcgaactggccgccgttgagcgcctggagtcggttcttctgcgccctactgatttttcaccgctgcaataa

SEQ ID NO: 173039 - DNA, 1701 bp, Klebsiella oxytoca
atgaaaagctgggatgtcatcgttatcggcagcggcgcagcaggctttgccgcggcggtgaccgcctgctgtaaaggactgtcggtgctgatgctggaaaaagcaccgcagtttggcggcacctccgccatttccggcggcgcggtatggatccacgatagcgatcaggcgcgaacaatgactacagacgatagtcagcaggcaatcaaaacctatctgcggaccatcatcggcgagcccaactatcgtcaggatctgatcgaagcttttatctcttcgggacgcgaggcgctggcgtttcttgaaaaagagggggcggtgaaatatagcctgcgtccgctttctccggattattacccggatgaacccggtgccgtcgacgtcggccgggcgctggaggtggtggagtttgacgggcgcaagctaggcgaatatttccgcgatctccgttctcctccgccggggatgctgctatttggcggaatgatggttaatcgggtcgatatccagcactttctcgatctgcgccgctccctgcgctctatcacccactgcggcaagctgctgctgcgctacggccgcgatcggctcaaataccctcgaggaacacggctggcgatgggtaacgcgctgatagcgcgcatggcgacgctcgcctttcgcaaaggaatgcagctcaggctcaacgtgaatgtgctttcgctaagcgaacgcaatggcgaaataaccggcgtggaaatcgagaacgatgggcagccacagctcctcaaagcccgctgcggcgtggtgctggcggcgggaggttttgccgcaggcaaactggctgaacgctatcgccctgctactcgcgagcactacaccatgtcgcccgccgccaacgacggcgccgcgctgcgccttgccgccgcggtcaatgcccgcgaaggcgccgatctgccgtctaactttttctgggcgccggtctcggttttacggcgtcccgacggcacgcaagagcgcttccctcacctggtcaccgaccgcgcgaaacccggcgtcattgccgttaaccagcgagcggttcgcttcgtgaatgaatcaaattcttatcaccatttcgccagcgccatgcaaagccgggcagaaaacgccccctgcttcctgatttgtgatgctctggccatgaagcgctatggcctgggccttgcgcgccctgctccggtgaataacgacgcgctggtgaaggcgggctatctgcaccaggccgaaacgctggcggaactggcgcaacagctcgggctggacccgcagacgttggcaaaaacggtggcacgctataaccgcgatgccgcccaaggccacgacccggagttcgccaaaggcggcaacagctataaccgcgcgatgggcgatcccggccatcggccaaacgcctgtaacgctccgctgaccagcccgccgttttacgccattaccctctataccggcgatctcggcacctcgcgcggcctggtcactaccgccaatgctcaggtcattaaccagcaggggcgccccattaaagggctctatgccgtcggtaacgatatggattcgattatggcaggcacctatcccggtccaggcattactctcggcccggcgctcaccttcggctatctctcagccagccatatggcgcaacaacacgcactctcaacaggagaaaattatgatctatga

SEQ ID NO: 173040 - DNA, 822 bp, Klebsiella oxytoca
atggtcagtggattcactcaggtcgtcgccgttatcggccacccgattacccaggttaaatcgccggagaacttcaaccgctactttgccgaacgacagatggatagtgtcatgatcccggtggatatcgctccgcatgccgttgctgattatctcaatacgctacgcggctggcacaacatgagcggcgtgctggttaccgttccgcataaacagcgtgccgctgccctggttgatgagttaacgccgcgagcccgacacctgaatgccgtcaatgtcatccgtaagctggccgatggccgtttgcaaggcgatatgctggatggcgtcggcttccagcttgccgcagaggcgcatggatttaatgccgcgggtaaaaaggcgctgctctccggctgcggcggcgtcggcagcgcaattgcctggggattatgcgaagcgggcatccttcagctggccctgcatgaccagaatcccgctacccttcagcaactgcataaccgactggcagcccattttccccacgttcagctcagcgacctgcccgctacccttactggtctggatttagtggtgaatggctctccagcgggaatgaccggtttcgcttctttaccgctgccgcaggcgctgctggaaacccttcccgcagcaacgcatgtcgctgacgtggtaaccgcgccgatcgtcaccccgcttctggccttcgcccgcgatcgcggctgcactatccagaccgggccggagatggcgctggcgcagatgaaactcatggggcagttcattggcgccattccgcaggaacaaggagcggcagcatga

SEQ ID NO: 173041 - DNA, 759 bp, Klebsiella oxytoca
atgcaaaaccagattcattcccgcgatctaatcgtcggcctgcaaaaggggctggcgctgatccagctattttcgaaagagtttccgcgtctcacggtgccgcaggcggcgaaaatgagcggtctgacgcctagcgccgcacgccgttttttcctcacgctgctgcatgagcgctatctgcagaccgacggacgtcactactggctgacgcccaaagcgttaaggctggggcaggcgtatgtggattcggcgcagtttccgcggatggtgcgaccgatcgtggagtacatcgccagccgaacggaagagcatgcttcggtaggtgtgattgatgacgatgagctggtttatattgcccgcagcaagcatacgccgtttaactcgacttcagtgcgtctgggagaaagggtgccgatttactgtaccgccggggggcggctctggctggcttcgttagcggaagatgaatgtgaaaccgttttgcagcggatccgtcgcgaacagcgcacgccctatacggtaacggacgtagcggctttaatggaaaagatcgctcaggtgcgtcggcagggctatgccgcgattgagcaggagtttgaaattggcatgctggtgctggcggtgccgctatccgacagggaagggctctactggggggcgctgagcttaaccagccatcagtcgagaacctcgctggaggcgctgtgtcgcgatcatctggatttactctatagcgcccaggcgatgctggtgggctaa

SEQ ID NO: 173042 - DNA, 333 bp, Klebsiella oxytoca
atgaaagaattaaatatttgcgaaatggaatgcgtttccggtggtttcaacctcgtcgatgctgccacgagctttaccaatttcgtggtcaactcgggagttggtttcagctcttttgtcgcgacctccggcgcagccttcgctaacttcgtgatcgatagcacggtacagtttggcaaattcctcagcggtcaagtggactggaacgcttttgtctcagcaggtctggataactggaatggcttcgttaatacggcctctaacagctggtcaaccttcgttaacaacgcaggttccgactggaacagctttatcgacgtcgcgaaagcgtaa

SEQ ID NO: 173043 - DNA, 888 bp, Klebsiella oxytoca
atgtttaagcaatacctgcaagtaacgaaaccaggcatcatttttggcaacctgatctccgtgattggcggtttcctgctggcctccaaaggccacatcgactatccgctatttctctggacgctcctcggagtatccctggtggtcgcctcgggttgtgttttcaacaactatatcgaccgtgatatcgatcgtaagatggaacggacgaaaaaccgggtgctggtcaaagggctgatctcgccagaagcttcgctggtatacgccaccgtgctgggtattgctggcttcatgctcctgtggtttggcgctaatcccctggcctgctggctgggggtgatggggttcgtggtttatgtcggcgtttacagcctgtacatgaagcgccactccgtctacggcacgttgattggttctctctccggcgctgcgccgccggtgattggctactgtgcggttaccggtgattttgacagcggtgccgcgattctgctggcgattttcagcctgtggcagatgccccactcctacgctatcgcgatcttccgctttaaggattatcaggcagcgaatattccggttctgccggtggtgaaaggcatttcagtcgccaaaaatcatattaccgtttacatcatcgccttcaccgtggctacgctgatgctctctctgggcggctacgccggatataaatatctggttgtcgctgcggccgtgagcgtctggtggctcggtatggcgctgcgcggctataaagtggcggatgataaagtctgggcgcgtaagctgttcgtcttttcgattgtcgccattaccgcgctgtcggtgatgatgtccgttgactttatggtgccggattcacatagcctgctggcaatggcgagataa

SEQ ID NO: 173044 - DNA, 330 bp, Klebsiella oxytoca
atgagtcattctaccgatcatagcggcgcttctcacggcagcgtgaagagctacatgacaggatttattctgtcgatcattctgacggttatcccgtttgcaatggtgatgagtggctccgcatcgcatgcggcaattctgggaaccatcctggttactgcagttgtgcagattgtggtacacctcgtgtacttcctgcatatgaacagtaaatcggacgaaggttggaacctgaccgcatttatcttcaccgtaatcatcattgctatcgtagtcgttggctccatctggattatgtggaacctgaactacaacatgatgatgcactaa

SEQ ID NO: 173045 - DNA, 612 bp, Klebsiella oxytoca
atggcaactgatactcttgcgcataacgcccacgcgcacgaacacgggcaccatgatacaggaccgatgaaggtattcggtttctggatctacctgatgagcgactgcattatcttcgccactctgttcgctacctatgccgttctggtgaacggcacggcgggcggtccgaccggtaaagatatttttgaactgccgttcgttctggttgaaaccgcgctgctgctgttcagctccatcacctacggcatggcggctatcgccatgtacaaaaacaacaagagccaggtcgtttcctggctcgcgctgaccttcctcttcggggcaggattcatcgcgatggagctctatgaattccatcatctgattgttgaaggtatgggtccggatcgcagtggcttcctgtcagcgttcttcgcgctggtcggcacccacggtctgcacgtgacttcaggtctgatctggatggcggtgctgatggttcaggtttcccgtcgtgggctgaccagcactaaccgcacccgtattatgtgcctgagcctgttctggcacttcctggacgtcgtgtggatctgcgtgttctctgttgtttatctgatgggggcgatgtaa

SEQ ID NO: 173046 - DNA, 1992 bp, Klebsiella oxytoca
atgttcggaaaacttacactggatgcagtgccctaccatgaacccattattgtggttacggtggctgcaattatcattggggggctggcgcttctggctgccatcacttacttcggtaagtggtcctacctttggaacgagtggctgacttcggttgaccacaaacgtctcggtatcatgtacgttatcgtagcaatcgtcatgttgctgcgtggctttgctgacgccgttatgatgcgtagccagcaggtgctggcctcagccggggaagcaggcttcctgccgcctcatcactacgatcagatctttaccgcccacggcgttatcatgatcttcttcgtagcgatgccgtttgttatcggtctgatgaacctggtggttccgcttcagctcggtgcgcgcgacgttgccttcccattccttaacaacctgagcttctggttcaccgttgtgggcgtgattctggttaacctttctctgggcgtcggtgaattcgcgcagaccggttggctggcctatccgccgctatcgggaattgagtacagtccgggcgtcggggtcgattactggatctgggctctccagctatccggtattggtacaacgttaactggtattaacttctttgttacgattatcaagatgcgtgcccctggcatgaccatgttcaagatgccggtatttagctgggcatctctgtgcgccaacatcctgattatcgcctctttcccaattctgaccgtcaccgtcgcgctgctgaccctggaccgctacctgggcacccatttctttaccaacgatatgggtggcaacatgatgatgtacatcaacctgatttgggcctggggtcacccggaagtgtacattctggttctgccggtattcggggtcttctccgaaatcgccgcaaccttctcgcgtaagcgtctgtttggctacacctcgctggtatgggcaacagtatgtattaccgttctgtcgttcatcgtttggctgcaccacttctttactatgggtgcgggcgcgaacgtaaacgccttcttcggtattacgaccatgatcatcgctatcccgaccggggttaagatcttcaactggctgttcaccatgtaccagggccgcatcgtcttcaactcagcaatgctgtggacgattggctttatcgtgaccttctccgtaggcggtatgaccggcgttctgctggcggtaccgggcgcagacttcgtgctgcacaacagcctgttcctgatcgcgcacttccataacgtcatcatcggtggcgtggtgttcggttgcttcgcaggtctgacctactggtggccgaaagcctttggcttcacgctgaacgaaacctggggcaaacgcgctttctggttctggatcatcggtttcttcgtggcgtttatgccgctgtacgtgctgggcttcatgggtatgacccgtcgcctgagccagcagattgacccgcagttccatccgatgctggttgttgcagcctgcggtgcggcgctgatcgcctgcggtatcctctgccagctgattcagttctacgtgtctatccgcgatcgcgagcagaaccgcgacctcaccggtgacccatggggcggccgtacgctggagtgggcaacctcttctcctccgccgttctacaacttcgctatcgttcctgtcgttcacgagcgtgacgcgttctgggaaatgaaagaaaaaggcgaagcgtataagaaaccggctggctatgaagagattcatatgccgaaaaacagcggcgcgggcattgtcattgcagctttcgcaacgttgtttggtttcgcaatgatctggcatatctggtggctggcgattgcaagcttcgtcggcatcctggcgacctggatcattaagagctttgacgaggacgtggattactacgtgccggttgcagtagtcgaaaaactggaaaatcagcatttcgatgagattaacaaagcagggctgaaaaatggcaactga

SEQ ID NO: 173047 - DNA, 948 bp, Klebsiella oxytoca
atgagacttaggaaatacaataaaagtttgggatggatgtcattaatcgcaggcactgtattactcagtggttgtgattctgcactcctcgacccaaaaggacagattggactggagcaacgctctctgattctgacggcctttggcctgatgatgatcgtcgttattccagccgtcttgatggcagtaggatttgcctggaagtatcgtgcgagcaataaagatgcgaagtatagcccgaactggtcacactccaacaaagttgaagctgtggtctggacggttcctattctgatcatcctgttcctggccgttctgacctggaaaacaactcacgcattagagccgagcaaaccgcttgctcacgatgaaaaacctatcaccatcgaagtcgtttcgatggactggaaatggttcttcatctatccggaacaaggcattgctaccgtcaacgaaatcgccttcccggcgaacgtaccggtacacttcaaagtgacctccaactccgtgatgaactcgttctttatcccacgtttaggtagccagatttacgcaatggccgggatgcagactcagctgcacctcatcgcgaacgaacctggtacttacgacggtatctccgccagctatagcggcccgggcttctcaggaatgaagttcaaagctatcgccacgccggatcgtgcaaccttcgatcagtgggtagcgaaagccaaacagtctgcgaacgctatggactccatggaaacgttcgacaaactggctgcgcctagcgaatacaacaaagtggaatacttctctaacgtgaaacctgatttgtttaaagatgtggtgaacaaatttatgtctcacggtaagagcatggatatgacccaacccgagggcgagcatgcagcgcacgaaggaatggaaggcatggacatgagccacgcggaaaccgctcactaa

SEQ ID NO: 173048 - DNA, 1476 bp, Klebsiella oxytoca
atgtccaatcattatttacgcattttcacgcagccaaaatcagctatcctgctgattctcggtttcgcctctggattaccgctagccctgacctccggcacgctacaggcgtggatgaccgttgaaaacatcgatctcaaaaccatcggttttttctcgctcgtcgggcaggcctacgtctttaaattcctctggtcgccggtaatggaccgctatacgccgccgtttcttggtcgtcgacgcggctggctgctggcgacccagatcctgctacttattgccattgcggcgatgggattccttgaaccttccacgcaactacgctggatggcggcgctggcggtcgttatcgccttttgctccgcctcgcaggatatcgtgtttgacgcgtggaagaccgacgtgctggccgctgaagagcgaggcaccggggcggcaatcagcgtgctgggctatcgtctggggatgctggtttccggcgggctggcgctatggctggccgatcgctggctgggatggcagggaatgtactggctgatggccgcactgctaatcccctgcattattgctactctgctggccccggaacccagcgacgtcattccggtgccgaagacgctggagcaggccgtcgccgcaccgctgcgcgacttcttcggccgcaataatgcctggcttattctcttgcttatcgtcctttataagcttggcgacgcgtttgccatgagtctgaccaccaccttcctgattcgcggcgtcggttttgatgcgggcgaagtgggcatggtcaataaaacgctcggcctgttcgccacgattgtcggtgcgctttatggcggcgtgcttatgcagcgcctgacgcttttccgcgcgctgctgattttcggcctgctgcagggggtatccaacgccgggtattggctgctctcaattaccgataaacaccttttctccatggcgacggcggtgtttttcgaaaacctgtgcggcggaatgggcacggcggcattcgttgcgctgctgatgacgctgtgcaataagtcattttcagccacccagttcgctttgctctcagcgctctccgccgttgggcgcgtatatgtggggcctatcgccggctggtttgtcgaagctcacggatggcctgctttctatctcttttccgttgttgctgcggttccggggattttgctgctgttaatttgtcgccgtacgcttgaacatactcaacgttcggagagctttatgccgcgcacgctttttcctcaggcctacgggctggcattagttattctggcgattggctgcctgatactggcgatatggctactgctgctggtcctcaacgcgctggattacaccaccttttccttcctcgcgggcctgcttgaggttgccgttcttaccgccgttgcgggtattttgctcggcgcgttccttgactacctcgcattgcgcaaaaccgagttgatttaa

SEQ ID NO: 173049 - DNA, 579 bp, Klebsiella oxytoca
atgtttaagaaaattctctttcctttggtcgcgctgtttatgctggccggatgcgccactccgccgaccactattgaggtatcgccgaaaatcacgctgccgcagcaggatccgagcctgatgggcgtgaccgtcagcattaacggcgccgatcagcgtccggatcaggcgctggcgaaagtcacccgtgataatcagcaggttacgctaaccgcctcccgcgatctgcgtttcttgctgcaggaagtgcttgagaagcagatgacctcgcgtggctacatgattggtccaaacggcgcggttgacctgcaaatcatcgtcaacaaactgtacgccgacgtttctcaaggcaacgtacgctacaacattgcgaccaaagcggatattgcgattatcgcgaccgccgccaacggcaataagatgacgaaaaactaccgtgccagctactctgttgaaggcgccttccaggcctcgaacaaaaatatcgccgatgcggtaaacagcgtcatgaccgataccatcgccgacatggcgcaggacaccagcattcacgatttcatcaagcaaaacgcgcgttaa

SEQ ID NO: 173050 - DNA, 315 bp, Klebsiella oxytoca
atgatacgtgaacagatcgaagcaaaacttagggcagcgttcgacccggtgtatcttgaagtcgtggatgaaagctatcgccacaacgttcctgcgggctctgaaagtcattttaaagtggtgttggtaagcgatcgcttccttggcgagcgttttcttaatcgtcaccgtatgatttacggaacgttgactgaggaactatcaagcaccgtgcacgctctggcgttgcatacctacacaatcaaagagtgggaagggctacaggataccgtgtttgcttctcctccttgtcgcggagctggaagtatcgcgtag

SEQ ID NO: 173051 - DNA, 1299 bp, Klebsiella oxytoca
atgcaagtttcagttgaaaccactcagggccttgggcgccgtgtaacgattactatcgccgctgacagcatcgagaatgctgtcaaaagcgagctggtcaacgtagcgaaaaaagttcgcattgacggcttccgtaaaggcaaagtgccgatgaatgttgttgctcagcgttatggcgcatctgttcgccaggatgtgctgggtgatctgatgagccgcaacttcgttgacgcgatcatcaaagaaaaaattaatccggccggcgcgccgaactatgttccgggcgaatacaagctgggtgaagatttcacctacgcggtagagttcgaagtttatccggaagttgagctgcagggtctggaagcgatcgaagttgaaaaaccggttgttgaagtgaccgacgccgatgttgataccatgctggatactctgcgcaagcagcaggctaactggaaagaaaaagacggcgcagttgatgctgaagaccgcgttaccgttgacttcactggttccgttgacggcgaagagttcgaaggcggcaaagcctctgacttcgtcctggcgatgggccagggccgcatgatcccgggttttgaagagggtatcaaaggccacaaagctggcgaagagttcaccatcgacgtgaccttcccggaagagtaccacgctgaaaacctgaaaggtaaagcggcgaagttcgttatcaacctgaaaaaagttgaagaacgtgaactgccagaactgactgaagagttcatcaaacgtttcggcgttgaagatggttctgtagccggtctgcgcgctgaagtgcgtaaaaacatggagcgcgagctgaaaggcgccgtgcgtaaccgcgttaagtctcaggctatcgaaggcctggtaaaagctaacgatatcgacgtaccggctgcgctgatcgacagcgaaatcgacgttctgcgtcgtcaggctgctcagcgttttggcggtaacgagaaacaggctctggaactgccgcgtgagctgttcgaagagcaggctaaacgccgcgttgttgttggtctgctgctgggcgaagtgattcgtaccaacgagctgaaagctgacgaagatcgcgtaaaaggtctgatcgaagagatggcttccgcttacgaagatccgaaagaagtggtcgagttctacagcaagaacaaagagctgatggacaacatgcgcaacgttgcgctggaagagcaggccgttgaagccgtgctggcgaaagctaaagtgtctgaaaaagccacttccttcagcgaactgatgaaccagcaggcgtaa

SEQ ID NO: 173052 - DNA, 624 bp, Klebsiella oxytoca
atgtcatacagtggcgaacgagacaactttgcaccccatatggccctggtgccgatggtcattgaacagacctcacgcggcgaacgttcatttgatatttactcccgtctgctcaaggagcgcgtcatttttctgaccggccaggtagaagatcacatggctaacctgatcgtggcgcagatgctgtttctggaagcggaaaacccggaaaaagatatctatctgtacattaactctccgggcggcgtgattaccgccgggatgtctatctatgacaccatgcagttcattaaaccagacgtgagcaccatttgtatgggccaggcggcctctatgggcgcattcctgctcaccgccggggcgaaaggcaagcgtttctgcctgccgaactcacgcgtgatgattcaccagccgctgggcggctaccagggccaggcgacggatatcgaaatccacgcccgcgaaatcctgaaggtgaaaggtcgcatgaatgaactgatggcacatcatacgggtcaatctcttgagcagatcgagcgtgacaccgagcgcgatcgcttcctgtctgcctcagaagcagtggaatacggcctcgtcgactccattttgactcatcgtaattga

SEQ ID NO: 173053 - DNA, 1275 bp, Klebsiella oxytoca
atgacagataaacgcaaagatggttcgggcaaactgttgtactgctctttttgcggcaaaagccagcatgaagtgcgtaagctaatcgccgggccatccgtgtatatctgcgacgaatgcgttgatttatgtaacgacatcattcgcgaagaaattaaagaagtcgcgccgcatcgcgagcgcagcgcgctgccgactccgcacgaaattcgccaccatctggacgattacgttatcggccaggagccggcgaaaaaagtgctggcggtggcggtatacaatcactacaaacgtctgcgcaatggcgacaccagcaacggcgtagagttgggtaaaagcaacattctgctgatcggaccgaccggttccggtaaaacgctgctggcggaaacgctggcgcgcctgctggatgtgcctttcaccatggcggatgccaccactctgaccgaagccggttacgtgggtgaagacgttgaaaacatcatccagaagctgctgcagaagtgcgactacgacgtacagaaagcccagcgcggtatcgtctacattgatgaaatcgacaaaatttcccgtaaatcggataacccgtcgatcacccgcgatgtctccggcgaaggcgtgcagcaagcgctgttgaagcttattgaaggcaccgttgccgcggttccgccgcagggcgggcgtaagcatccgcagcaggagttcctgcaggttgatacctctaagatcctgttcatctgcggcggcgcctttgcaggactggataaggtcatttctcaccgtgttgaaaccggttctggtatcggtttcggcgcgacggttaaggctaaatccgacaaggccagcgaaggcgagctgttgtctcaggttgaaccggaagatctgattaagtttggtctgattcctgagttcatcgggcgtctgccggtggtggcgaccctgagcgagctgagcgaagaagcgctgattcagatcctcaaagagccgaaaaacgccctgaccaagcagtatcaggcgctgttcagcctcgaaggcgctgagctggagttccgcgacgaagcgctggatgctatcgctaagaaagcgatggcgcgtaaaaccggcgctcgcggcctgcgttctatcgttgaagctgcgctgctcgataccatgtacgatcttccgtcaatggaagatgtggaaaaagtggtcatcgacgcctcggttatcgatggtcagagcaagccgctgctgatttacggcaaaccggaagcgcagcaggcatctggtgaataa

SEQ ID NO: 173054 - DNA, 2355 bp, Klebsiella oxytoca
atgaatcctgagcgttctgaacgcattgaaatccccgtattgccgttgcgcgatgtggtggtttatccgcacatggtcatacccctgtttgtagggcgggaaaaatctatccgttgtctcgaagcagccatggatcatgataaaaaaatcatgctggttgcgcagaaagaagcctcgacggatgagccgggtgtaaacgatcttttcaccgtcgggaccgtggcgtctattttgcaaatgctgaagctaccggacggtactgtcaaagtgctggtcgaaggtttgcagcgcgcgcgcatctctgcgctatctgataacggcgagcatttttcggcgaaagctgaatatctcgaatcgccggcgattgacgaacgcgagcaggaagtgctggttcgtaccgctatcagccagtttgaaggctacatcaagctgaacaagaaaatcccaccggaagtgctgacgtcgctgaatagcatcgacgatccggcgcgccttgcggataccatcgcagcccatatgccgctgaagctggcggacaaacagtccgtgctggagatgtccgacgttaacgaacgtctggaatatctgatggcgatgatggagtcagaaatcgatctgctgcaggttgagaagcgcattcgcaaccgcgtgaaaaagcagatggagaaatctcagcgcgagtactacctgaatgagcaaatgaaagccattcaaaaagagctcggcgagatggacgacgcccctgacgagaacgaagcgctgaagcgtaagatcgacgcggcgaaaatgccgaaagaggcaaaagagaaaaccgaagcggaactgcaaaaactgaaaatgatgtccccgatgtcggcggaagcaaccgtcgttcgcggctacattgactggatggtgcaggtaccatggaacgcccgcagcaaggttaaaaaagacctgcgtcaggctcaggagatcctcgacaccgatcactacggtctggagcgcgtgaaggatcgcatccttgagtacctcgcggtgcagagccgtgttaacaagctcaaagggccaatcctgtgcctggttgggcctccgggggttggtaaaacctcgctgggtcaatctatcgccaaagcaaccggacgtaagtacgtgcgtatggcgctgggcggcgtgcgtgacgaagcggaaatccgcggtcaccgccgtacctacattggctcaatgccgggcaaactgatccagaaaatggccaaagtgggcgttaaaaacccgctgttcttactggatgagatcgacaaaatgtcttcggacatgcggggcgatccggcatcggcgctgctggaggtgttggatccggaacagaacgtggctttcaacgaccactatctggaagtggattacgatctcagcgacgtgatgttcgtcgcgacctctaactccatgaatattccggcgccgctgctggatcgtatggaagtgattcgcctctccggctacaccgaagatgagaagctgaacatcgccaaacgccatttgctgtcaaaacagatagagcgtaatgcgctcaaaaaaggcgagctgacggttgatgacagcgcgattatcggcattatccgttactacactcgtgaagcgggcgtgcgtggtctggagcgcgaaatctcgaaactgtgtcgtaaagcggtcaaacagctgttgctggataagtcgctgaagcatattgagattaacggcgacaacctgcatgacttcctgggcgtgcagcgctacgactatggccgtgcggatagtgaaaatcgcgtgggtcaggtgactggcctggcgtggacggaagtgggcggcgatctgctgaccattgaaaccgcctgcgttccgggtaaaggcaagctgacctataccggttcactgggtgaggttatgcaggaatctatccaggctgcgctgaccgtggtgcgttcgcgtgcggataagctgggtattaactcagacttttatgaaaaacgcgatatccacgtgcacgtaccggaaggcgcaacgccgaaagatggcccaagcgccggtattgcgatgtgtaccgcactggtttcctgcctgacgggtaatccggtgcgcgccgatgtggcgatgaccggggaaatcaccctccgcggtcaggtgttgccaatcggtggtctgaaggaaaaactgttggctgcacaccgtggcggcattaagactgttctgattcctgatgaaaataaacgtgaccttgaagaaattccagataacgttatcgccgatttagatatccatccggtgaaacgaatcgaggaagttctggcacttgcactgcagaacgagccgtttggtatggaagtcgtcacggcaaaatag

SEQ ID NO: 173055 - DNA, 273 bp, Klebsiella oxytoca
gtgaataaatctcaactgattgacaaaattgctgccggtgcggacatttctaaagccgcagctggacgtgcgttagatgctttaatcgcttctgttactgaatctctgcaggctggggatgacgttgcgctggtagggtttggtacttttgctgttaaagagcgcgctgcccgtaccggtcgcaatccgcaaacaggcaaagaaatcaccatcgctgctgctaaagtaccgggtttccgtgcaggtaaagcgctgaaagacgcggtaaactga

SEQ ID NO: 173056 - DNA, 1875 bp, Klebsiella oxytoca
atgatggacaacctacgcacggccgccaacagcgtcgtgctcaagattattttcggtatcattatcgtctcgttcattttgaccggggtgagtggttacctgattggcggtggaaacaactatgccgcaaaagttaatgaccaggagattggtcgcgcacagtttgaaaatgccgttgccagcgagcgtaaccgcatgcagcagcagcttggcgatcagttttctgaactggcggccaatgaaaattacatgaagaccatgcgtcagcaggtgttgaaccgtctgattgacgaggcgctgctcgatcagtacgcccgtgaactgggccttaatatcagcgacgaccaggtcaagcaggctatcttcaagacccaggctttccaggcggatggcaaatttgataacgagcgcttcagccgtatcgttaatcaaatggggatgacgacggaccagtacgctcaggcattacgtaatcagctgacgactcagcaactgattaacgccgttgccggtaccgattttatgctgccgggcgaatccgaccagctggcggcgctggtgtcgcaacagcgcgtcgtccgtgaagcgacgattgacgtaaacgcgctggcggcgaagcaaaccgccaccgacgatgaaatcaacgcgttttaccagcagaaccaggcgcgttttatggcgcctgagcagttccgcgtcagctacatcaagatggatgctgcgagcatgcaggaaaacgtctctgaccaggaaattcagtcatggtacgaccagcatcaggatcagttcactcagccgcagcgtaatcgctacagcatcatccagaccaaaaccgaagcggatgctcaggcggtgcttgatgaactgaaaaaaggcgctgatttcgctgcgctggccaaagaaaaatcaaccgatatcatctctgcccgcaacggtggtgatatgggctggctggaagatgcggctactgtgccggaactgaaagaggccggtctgaaagaaaaaggccagctttcaggcgtaattaaatcttccgtcggtttcctggtggcgcgtctggatgacgttcagcccgctcaggtaaaaccgctggctgacgttcgcaatgatatcgcggcgaaagtgaagcaggagaaagctctggatgcttactatgcgctgcagcaaaaagtcagcgacgcggcgagcaacgataacgaatccctggctggcgcggctcaggttgccggtctgaaagtggttgaaaccggctggtttggtcgcgataacctgccgcaggagctgaatttcaaaccggtttctgacgctatcttcaacggcggtctggttggcgaaaacggtacgccgggcagcaactccgatatcatcaccgtcgacggcgatcgcgcatttgttctgcgcatcagcgagcataaaccggaagcggtcaaaccgctggcggaagtgaaagcgcaggtgagcgatattgttaagcacaacaaagcggagcagcaggcgaagctggatgccgataagctgctgactgccctgaaagagggtaaaggcgacgaagcgatgaaagccgccggactaagctttggtgcgccgcagacgctgtcgcgtaccggtcaggaagcgttgatccagtctgtctttgcgctaccgctgccgcaggcgggtaagcccagctacggcgtgggcacggacatgcagggcaatgtggtactgctggcgctggatgaagtgaaagcgggtacgatgccggaagagcagaaaaaggcgatgattcagggcatcacccagaataacgcacagatcgccttcgaagcgctgatgagtaacctgcgtaaagcggcgaaaattaagctcggcgacattatcgatcagcaacaataa

SEQ ID NO: 173057 - DNA, 369 bp, Klebsiella oxytoca
atgaaacgaggatttaaaacgcttcttaccgtcgccgtactggtttgcgcagcgggaagtcagggcgcttttgccgcgccttccagcgggaagacgtcgccggcaacaaaggagagcgtgcagacgccgcaggcaaaggcacctgatgtgttgaacgcgcccgatagcgaaggcaccagggtgagtatcaataacgccagcgccgaagaactggcgaaggggctgaacggcgttggcctgaagaaggcgcaggctattgtcagctatcgtgaagaatatgggccatttaaaaccgttgacgatcttaagcaggtgccggggatgggcaattcgctggtagagagaaatctgtcacatttgaagctgtaa

SEQ ID NO: 173058 - DNA, 402 bp, Klebsiella oxytoca
atgcagacacaaatcaaagttcgcggctatcatctcgacgtctatcagcatgtcaataacgcgcggtatctggagtttctcgaagaggcgcgctgggatggcctggaaagcagcccggcctttcactggatgaccgctcgcaacatcgcctttgtggtggtcaatatcaatatcaactatcgccgaccggcggtactgggcgatgtattaaccgtcaccagcaagctcgaacagctgaacggaaaaagcgggacgctaagccaggtggttacccttaaccctaacggcgaggtggtcgccgatgcgcttatcacttttgtctgcattgatctaaaaacgcagaaagcgctgccgcttgagggcgaactgcgcgaaaagctggagcagctggagcctcgctaa

SEQ ID NO: 173059 - DNA, 696 bp, Klebsiella oxytoca
atgaaacgcgccgtagttgtcttcagtggaggacaagattcgacgacctgcctggtgcaggctctgcaacagtatgatgaagtgcattgcgtcacttttgattatggccaacgtcatcgcgcggagattgacgttgctcgcgaactggcgctaaagctgggcgccgttgcccacaaagtccttgatgtcacgctgcttaacgaactggcggtcagcagcctgacccgcgatagcattccggttccggattatgaaccggacgccagcggcatccccaacactttcgtgcccggtcgcaacattctgttcttaaccctgacggccatttacgcgtatcaggttaaagcggaagctatcatcaccggcgtttgcgagaccgacttttcgggctacccggactgccgcgatgagttcgtcaaagcgctgcaccaggccgtcagtctgggaatggcgaaagatattcgctttgagacgccgctgatgtggctgaataaagccgagacgtgggccctggccgattattggggccagctggacctggtacgccatgaaaccctgacttgctataacggcattaaaggcgacggctgcgggcagtgcgcctcctgtaacctccgcgccaacgggctgcgccagtatctgggcgataaggttggggtgatgactgacatgaagcagaaaacaggactgcagtag

SEQ ID NO: 173060 - DNA, 1701 bp, Klebsiella oxytoca
atgaggctattaaaccgtctgcatcagtatcagcgactctggctaccctcttccggcgagccgcagcaggtgaccgtcggcgagctggccgagcgctgcttttgcagcgaacgacatatccgaaccctgctgcgccaggcgcaagaatccggctggctaagctggaaggccagctccggtcgcggaaagcgcgggctactccagttttacaaagcgccggaaacgctgcgcaatgaaatgatggagcaggctctaaataaaggacagcagcagaatgccctcgaactggcgcagctggcgcctgtagagcttaaagcgctgctttccccctttctcggcggccaatggcagaacgatacgcctaccctgcgtattccttattaccgtccgctggagccgctgcgctcgggttttatgccgggacgcgcggagcagcacctggcaggggagatattttccggcctgacccgtttcgatgcgcaaagtacctgcccgataggcgatttagcccatcactgggaggtgtcgcctgacggtctgcgctggcacttttatattcgttccaccctgttctggcataacggcgatccgataaaaacctcacagctgcagcagcgccttctgatgctgttgcagctccccgcgatgcgtacgctgttcgccagtatcagcgagattagcgtcacccactctcagtgcctgactatcaccctgcaccgcgccgattactggctaccgttccgccttgccagctactgcagcgtgctggcgcatccggacgatccggcgatcggcagcgggccatttcgcctgaaactatttactcaggaactggtgcggctggaaaaccatcagcgttatcatctcacccatccgctgctgcaggccgttgaattctggatcacgccgcagctgttcgaacaggatctgggcaccagctgtcgtcatccggtacagataaccattggcgaccctgatgagctgaccagactgcgccaggtcagcaatagcatcagtcttggattttgctatctgacgctacgccagagcccccgcctgaataaagcgcaggcccaaagactggtttcgctgattcatcgctccggtctgttagaaacgctgccgctggatgaagacctgatcgcgccgagcaacgaagtattgccgggatggactattccgcagtggccagaaaatggtgatacaccgctgcccgaacggctaactctgctctatcaccttcccgtagagctacacgccatggcggagcgccttcggcaacggctggcagaactcggctgcgagctgacgataatttttcatgacgcgaaaaactgggatggttgccagcagtttgcgaaggcggacctgatgatgggcgatcgcctgattggcgaagcgccggtttatgcgctggagcagtggctacgctgcgatgccctgtggcctaatttgttgaccggggcgcaatatgcgcatcttcaggcaacgctggatgccgttcaggtattaccggacgaacgcagccgcagcgaagctttgcgcaacgtctttaacacactgatggacgatgccatcatgacgccgctgtttaattataattatcgcatcagcgcaccgcctggcgtcaacgggctgcgcctgaacgcgcgaggctggtttgatttcgccagcgcctggctaccggcttcgacgccgtga

SEQ ID NO: 173061 - DNA, 819 bp, Klebsiella oxytoca
atggccagactggctgcattcgatatggacggtacgctactgatgcctgaccatcgtctgggagaaaaaacgctttcgacgctaaaacgcctgcgcgatcgcgacatcaccctgacatttgctaccggccgtcatgctctggagatgcgccacgttatcggcgagttctctttggatgcgtttttaattaccggcaacgggacgcgcattcactccctggaaggtgaagagctgtatcgtcgcgatctggcccctgatgtggcggaagaggtgctgcatagcgcctgggataccgcggcgagtatgcattttttcaacgacggcggctggtataccgggcaggagattccagaaattctgcaagcgcacgtctttagcggctttcgctatcagctatacgatccaaagcgaatgccggcgcatcaggtcaccaaaatctgcttctgcggcgatcatgacgatctccggcggctaaggctgcaactaagtgaagcgctcggcggccgagcggatctctgtttttcagcgatggattgtctggaagttttgcccgggggctgtaacaaaggcgcggcgctggcggtattaagccagcatctgggcctgacgttgcaggattgcatggcgttcggcgacgccatgaacgatcgggaaatgcttggcagcgtcgggcacggcgtgatcatgggcaacgcgatggatcagctgaaatttgaacttccgcatctaccggttattggcgactgccgtcatcaggccgtttcccattttttgactcattggctggattatcctgatcttccttattcccccgaataa

SEQ ID NO: 173062 - DNA, 1053 bp, Klebsiella oxytoca
atgaacagcgcctgggtaaaacacgcgattagtgaaattaatgccgattatcagcgttccgccgacacgcaccttatacgtctggcgctgccggcgttccctgggatccaactctatctgaaggatgaaagcacccatccaaccggtagcctgaagcatcgcctggcccgctcgctgtttctgtatggcttgtgcaacggctggattaaagaaggaacgacgattatcgaatcctcttccggttcgaccgccgtctctgaagcttacttcgctcgtctcttaggcctgctgtttatcgccgtgatgccttcctgtacggcaaagcgtaaaattgaacaaattgagttttacggcggtcgctgccatttcgtcgacagcgcctgtgaaatctatgccgcctccgaaacgctggcgcgcgagctgaacggtcattatatggatcagtttacctttgccgaacgggctaccgactggcgagggaataataatatcgccgacagtatcttccgtcagatgagccatgagccgcatccgcagccgtcgtatattgtgatgagcgcgggcaccggcggtacctctgcgactatcggacgctacattcgcagtcagggttacgatacgcagctgctggtggttgatccgcaaaactccgtgtttttggactactggcaaagccgcgacgccagcctgcgcagcccggtcggcagtaaaattgagggcattggccggccgcgcgtcgaaccatcgtttattcccgacgtggtcgatgagatgctgcgggtaccggatgccgccagcgtcgccaccgcgctatggctggaaacgctgcttgggcgcaaggtcggcgcctcaaccggcaccaatatgtggggcgtactgcagctggccgtacggatgcgcgaagagggacgcaccggctctatcgtcacgctgctgtgcgacagcggcgaacgttatctggaaagctactacaacccgcagtgggtggcggccaatatcggcgacgtctctccctggcaggcgcaaattgcgcaaatgctgcaggcaaaataa

SEQ ID NO: 173063 - DNA, 459 bp, Klebsiella oxytoca
atgttagataaaattgatcgtaagctgctttctttactgcaaaccgactgcaccctctctttgcaggcattggccgatgccgttaatctgaccaccacgccctgctggaagcggctgaagcggctggaagacgaaggtattcttcgcgggcgcgtcgcgctgctggatgcggaaaaggtcgggcttgggctgacggcgtttgtactgattaagactcagcaccacagtagcgactggtattgccgctttgtcagcgaagtctcgcagatggcggaagtccttggcttctggcgtatggccggcgagtatgactatctgctgcgggtccaggtagcggatatgaagaactatgatgatttttataaacgtctggttaacagcgtgccgggactctcggatgtcacttcgagttttgccatggaacagataaaatacaccacagccttgcctattgattaa

SEQ ID NO: 173064 - DNA, 1773 bp, Klebsiella oxytoca
ttgcgattatttgcccaacttagctggtatttccgccgggagtggcgccgttacctcggcgctattgctctgctgattattattgccattctgcaactggtgccgccgaaagtggtgggcatcgtggttgacggcgtaacaaaacaacattacaccgcggaaaaggtgtggatgtggattggcctgctggtcgttattgcggtgatggtctatctgctgcgctacgtctggcgcgtgctgttgttcggcgcatcgtatcagctggccgtcgagctacgtgaggatttctatcgccagctcagccgccagcatccggccttttacctgcgccaccgtaccggcgatctcatcgctcgcgcaaccaacgacgttgatcgggtggtgttcgccgccggtgagggggtgctgacgctggtggattcactggtgatgggctgcgcggtgctgattgtgatgtcgacgcaaatcagctggcagctcactctgctggcgctgctgccgatgccgctgatggcgctggcgattaagcgtaacggcgatgcattacacgagcgttttcgcgtcgctcaggcggccttctccagcctcaatgaccgcacccaggagagcctgaccagcattcgcatgatcaaagcttttggtcttgaagaccgacagtcggcgcagtttgctgccgacgctgcggataccggggcgaaaaatatgcgcgtggcgcgcattgatgctcgcttcgatccgacgatttatatcgctatcgggaccgctaacctgctggctatcggcggcggcagctggatggtgatccagggcagcctgaccctgggtcagctcaccagctttgtgatgtacctcggcctgatgatctggccaatgttggctctggcatggatgtttaacatcgtggagcgcggcagcgcggcctacgcgcgcattcgcaccatgctggaggaggcgccggtagtgaacgacggcagcgagccgacgccggaagggcgcggtacgcttagcgtcgccgtgcgcgagtttatctatccgcaggcgaacaaggcctcgctggaaaaagttaactttacgctccagcccgggcaaatgctgggaatttgcggcccaaccggctccggtaagagtacgattctggcactgattcagcgtcattttgacgttaccgatggcgatatccgctttcatgacgttcccctgacccgactgcagctggatagctggcgcgccaggctggcggtagtcaatcagacgccgttcctgttctccgataccgtcgccagcaatattgctctcggtaaaccggacgccacgcaggagcaaatcgaacgcgttgcccggctcgccagcgtgcatgaggatatcctgcgcctgccgcaggggtataacaccgaagtcggcgagcgcggcgttatgctttccggggggcaaaaacagcgtatttccatcgcccgcgcgctgctgctggaggcggagatcctgatcctggatgatgcgctgtcggcggtggatggtcgaacggagcatcagatattgcacaacctgcgccagtggggtgaggggcggacggtaattatcagcgctcatcgcctgtcggcgttgaccgaggccagcgaaattctggtaatgcagcatgggcatgttgcccagcgcggtcgtcatgaggcgctggcgacgcagccgggctggtatcgcgatatgtaccgttatcagcagctggaagcggcgctggatgatgttccgctggaagatgaggaggtcgccggtgcgtag

SEQ ID NO: 173065 - DNA, 1779 bp, Klebsiella oxytoca
gtgcgtagttttactgaactctggccgacattaaagcgcctgctggcctacggctctccgtggcgtaaaccgttaacgatagcggttgctatcatgtgggtcgcggcggtggcggaggtgagcggcccgctgctgatcagctactttatcgacaatatggtagcgaagaactcgctgccgttgaagctggtctgcggcctggccgcagcctacatcggcctgcaactcctcgccgcgggtctgcattactgccaggcgctgctgtttaaccgcgcggcggtgggcgtggtgcaacagcttcgcagcgacgtcatggacgccgccctgcgtcagccgctcagcgagtttgatacccagccggtcgggcagctcatctcgcgggtgaccaacgataccgaagtgattcgcgatctctatgtgaccgtcgtggctaccgtcctgcgtagcgcggctttgattggcgcgatgctggtggcgatgttcagccttgactggcgaatggcgctggtggctatcgctattttcccggcagtactgatcgtgatgatgatttatcaacgctacagtacgcccatcgtcaggcgggttcgcgcgtggctggcggatatcaacgacggttttaatgaagtgattaacggaatgggcgttattcagcagttccgtcagcaggcgcggttcggcgaacggatgcgcgaggccagctacgcgcactatctggcgcgtatgcaaactctgcgccttgatggtttcctgctgcgcccgctgctgagcctgttctcttcattaatactctgtggtctgttgatgctgtttggtttcagcagcagcggaacgattgaggttggggttctgtacgcttttattagctatcttggacggctaaacgagccgctgatcgaactgacgacccagcaatcaatgctgcagcaggcggccgtcgcgggcgagcgcgttttcgaactgatggacaaaccgcgtcaggcgtggggcgacgatagcgaaccgttgcgcagcggctcgattactatcgagcatctctcttttgcctaccgtgacgatagcctggtgttgcaggatatcaatctcgacataccgtcgcgcagctttgtggcgctggtcggccataccgggagcggtaaaagcaccctggccagcctgatgatgggctactacccgttaactcagggagagattcgcatcgatggtcgtccgctgtcgtccttaagccacagcgcgctgcgtcaggggattgcgatggtgcagcaggatccggtggtgctggctgacaccttctatgccaacgttaccctcggtcgagacatcagcgaagagcaggtctgggaggcgctggaggcggtacagctggcggagctggcccgtgaaatggaaaacggtatttatactcagttgggcgagcaggggaacaatctctccgttgggcagaaacagctgcttgcgctggcgcgggtgcttgtcgatacgccgcaggtgctgatacttgatgaggcgacggctaatattgattctggcaccgaacaggcgattcagcaggcgcttgtacgggtgcgcgagcatacgacgctggtggtcattgcgcaccgcttatcgactatcgttgaggctgacacgatcctggtgctgcatcgggggcaggccgtcgagcgcggcaaccatcagcagctgctggcggccaaaggccgctactggcagatgtatcagctgcagctggcgggtgaagaactggccgccagctcgcaggaagagtcgcttatcgcctga

SEQ ID NO: 173066 - DNA, 234 bp, Klebsiella oxytoca
atgaaaaagggccgccaggcggccctttttgaggaggaaaaagaagaatcaggcggaaacgaagcggaaaaaagccgctttagccttaaaatgcaccatttcagtgcgcattctgtgacgtttttgcaccaccggaaaccgcaaagcagaagctgcctgtttatggtgcatcaggcgataagcgactcttcctgcgagctggcggccagttcttcacccgccagctgcagctga

SEQ ID NO: 173067 - DNA, 339 bp, Klebsiella oxytoca
atgaagctggttaccgtggtaatcaaaccattcaaactggaagacgtgcgtgaagcattatcttcaatggggattcagggcctgacggtcactgaggttaaagggttcggccgtcagaaaggccacgcggagctctatcgcggcgccgaatatagcgtcaattttctgccgaaagtgaagattgacgtcgcgattgccgacgatcagctggatgaagtcgtcgatgtcatcagtaaagcggcttacaccggaaagattggcgacggcaaaatttttgtcgccgagctgcagcgcgtcattcgcatccgtaccggcgaatctgacgaagcggcactgtaa

SEQ ID NO: 173068 - DNA, 1287 bp, Klebsiella oxytoca
atgaagatagcaacaatgaagacaggtctgggagcgctggctcttcttccggggctggcgatggccgcaccggcggtagcggataaagccgacaacgcctttatgatgatttgcaccgcgctggtgctgtttatgaccattccgggcatcgcgctgttctacggcgggctaatccgcggtaaaaacgttctttccatgctgacgcaggttatcgtcacctttgcactggtctgcgtgctgtgggtggtttatggctacacgctggctttcggtaccggcggcagcttcttcggcaacttcgactgggtgctgctgaagaatattgagctgaaagcgctgatgggcagcttctatcaatacatccacgttgccttccagggctcgtttgcctgtatcaccgtcggcctgatcgtcggcgcgctggcggaacgtattcgtttctctgcggtactgatttttgttgtggtgtggatgacgctttcttatatcccgatcgcccatatggtatggggcggtggtctgctggctacccacggcgcgcttgatttcgccggcggaacggttgtacacattaacgccgcggttgccgggctggtgggcgcttatatgatgggtaaacgcgtgggctttggtaaagaagcgttcaaaccgcataatctgccgatggtattcaccggcaccgctatcctctacgttggctggtttggctttaacgcgggttcagccagcgcggcgaacgaaattgccggtctggctttcgttaacaccgtggttgccacagcggcggctatcctggcgtggaccttcggcgagtgggcaacccgcggcaagccgtctctgttgggcgcctgttcaggggcgattgccggtctggtcggcatcactccggcctgtggttacatcggcgtcggcgggtctctgatcgtggggattgccgcgggtctggcgggtctgtggggtgtcaccgtactgaagcgctggctgcgcgttgatgacccgtgcgatgtgtttggcgtccacggtgtctgcggtatcgtcggatgcatcctgaccggtatcttcgccgcgacttctctgggcggcgtcggttatgcggaaggcgtgaccatgggccaccaggttctggtacagctggaaagtatcggtatcaccatcgtctggtccggcgtggtcgcctttattggttacaaagtcgccgatatgaccgttggcctgcgcgtaccggaagatcaagagcgtgaaggtctggacgtcaacagccacggcgaaaacgcctacaacgcctga

SEQ ID NO: 173069 - DNA, 741 bp, Klebsiella oxytoca
atgattgggccaatcattaactctacttcaacgcttagcggcgggatcgtcggcggcttaattggggatcgattaagtgataaattccgtaccgcgctgcctctgacttttggcgcagcctccatgggaatggggattacggttattatcaaattacatgcactacccgttgttgtcgcctcgttactcttcggcgcaattatcggtgaaatattttctatcgagagaaacattggccgtggcgcatcaaaactacgttttatcattgataaaattgccccacagaaaagcggcagcacgttatcgcaagaggagtatctcgacaaattcgttggaattctggtgctcttcgtggcttcgggaacgggcatctttggcgctatgcaggaaggaataaccggcgacatatcgatactgttaactaaatcatttctcgatatcctgactgccggtatttttgccaccctgcttggtctttcggtcgccactatcgcgatcccgcaatttatcgtccaaatgattctgctcttaatcgggcaatcaataatgccaatgctaacgcctgatatggttgctgatttctccgggttaggcggatttattatgtttgtgacgggtttgagaatttgcggtattaaatcattcccggtcgccaatttactgccaggtctgatcatcgtcatgcccctctcctggctttgggtctcaacgctattgccctggatccaatcgattagctaa

SEQ ID NO: 173070 - DNA, 1485 bp, Klebsiella oxytoca
atggttaaggaacagcaaaaagtgaccgatctgcgttccgcattggctgtattaagccactacgatgatgaactgatctataccgatgaacccgttgatccaatcgcagaattatctggcgtatatcgctacgtcggcgcacatggcaccgttcagcgccccacacgagttggcccggccatgatttttaacaaagtcaaaggatacgatgatgtcaaagtcttgatcggcttgctttgctcgcgcaagcgcgtcgcccgcctttttggcaccacgcctgaaaacctggcttttatgcttaaagattccgtcgccaatcctattgcgccgattgttattccacgcgaccaggccgtatgtcaggaagttatccacctggcgaccgatcctgactttgatatcctgaaaatcttgcccgcgccaactaataccccggaagatgctggcccgtactttacgctgggcatgtgctacgccgccgatccagaaactggcgagcatgacgtcacgatccatcgcttgtgcgtccagagcaaagatgaaatctcaatgtatttcgttccgggacgccaccttgatacttttcgccagaaagcggaagccgccggaaaagccctgcctatctccattagtattggcgtcgatccggcaattgaaatcggtgcctgcttcgagcccccgacaacgcctttaggttttgacgagctatcaattgccggtagcttgcgcaaccaggcagtagaactcaccgattgtgtcagcgtgaatgcactggctatcgctaatgccgaagtcgtcatcgaaggcgagctcttgcctgacgtaagggtccgtgaagatcagaacactgatacaggtaaagccatgccagagtttcctggctataccggcagcgcccaggcgcaggtgccggtcatcaaagtcaaagccattactcatcgccgtcatccaatcctgcaaacctgcatcgggccaagcgatgagcacaccaatctggccggtatcccaacggaagccagtattttacaaatggttgaaaaggcactgcccggcttcgtgcagaacgttcattgcccctcgccgggcacgggcaagtatctcgccgttttacaggtaaaaaaacgcggaccagcagatgagggcaggcagcgtcaagccgcacttctcgcattttcagctttctcagaattgaagcatgtcatgttggttgatgaggatgtggatgtatttgatattaacgatgtgatgtgggcaatgacaacgcgttaccagggggatgtcagtactatttttattcccggagtacgctgtcacccgctcgatccttcatccgacccagcattcagcccgtcaatactcggccacggaatcgcctgtaaaacaatttttgactgtaccgttccctggaacctgaaagagaattttcagcgcagcaaattccttgaagtggatgtcaatcgctttattcccggcttcaaaaaatag

SEQ ID NO: 173071 - DNA, 927 bp, Klebsiella oxytoca
atggattatcggcaactacatgcctttgtggttctggctgaagagctgcattttgggcaggcggcgttgaggctgaacgtgacgcagcctgcgctcacgcagcagattaaaaactttgagaacgcgctcggcataatgctgtttgttcgcgatcggcgtcatgtttcactgaccgcggagggactatttttgcttgacgaagcgcggattattctgggccactgcgacaggtttcttgaaagtgtaaacagtttgcgtcgcgggcatcaagggcagttaaaagtgggttatgttggctcatctattctcgatccggcattaactttgttaataaaaaattaccgatataagaaacccgagaccgatctgataattgaagaacataacgcacatgatttattaacattattattggataaacggttggatattgcttttgttcgctcaccgataccgcaatatgaacagctggaatatatgaatatcgctactcgttcacttattgccgtcttgccgcgtaatcatgaactgggcaatcgccgaaaaatttctctggcatcgctgcgcgaagagcaattttttgtgcaaaaggatccctacggcgtagggctaggctggtcggcggttagcgcctgccgggaggccgggttcactcctcagaaaattcagtatacgcgtgatgtttcggtagctatcggtttagtgtcaatgggcatgggcgttgcgctggtgcctgaaacgcagagctctgtactcatgccggacgtgagctactgtctgctggaagaagcgtatgcaacaaccaccttaaccttgtgctggcggcggcatactcaaaataaccttttacgcggatttataaactatacccgggaccttaccggccgccagcagtaccagtcagcgcaatgtacggcggaccagtaa

SEQ ID NO: 173072 - DNA, 876 bp, Klebsiella oxytoca
atgagtcaggcattaaccaatctgctggcattgttaaatctggaaaaaatcgaagagggattgttccgcgggcagagcgaggatctgggattacgtcaggtctttggcggccaggtggtcggtcaggcactatatgcggcaaaggagaccgcccccgcagaacgcctgatccattcgtttcacagctacttcctgcgtcccggcgacagccagaaacccatcatctatgatgttgaagtcctgcgtgacggcaatagcttcagcgcccgccgggtggcggcgattcagaacgggaagccgattttctacatgaccgcctcatttcaggcgccagaacccggctacgaacatcagaaaaccatgccagcagcccccgcgccggatgcgctgccctctgaaacggacatcgcccgcaagctggcccatctgctgccgccgcaggtcaaagagaaatttctttgcgataagccgctggagattcgcccggttgaattccacaacccgctgaaaggtcacgttgcagaaccgacgcgtcaggtctggatccgcgccaacggcgctgtaccggaagatctgcgcatccatcagtctctactgggctacgcttctgacttcaatttccttcccgttgcgctgcagccgcacggcgtcggttttctggaaccgggaatgcaggtggccaccatcgatcactcaatgtggttccatcgcccgttcaacatcaacgactggttgctttacagcgtagaaagcacctccgcctccagcgcgcgcggttttgtccgcggcgagttctatacgcaggacggtacgctggtggcgtcgacagtacaggaaggtgtcatgcgtaaccgaagccttttcccagcaaaatag

SEQ ID NO: 173073 - DNA, 510 bp, Klebsiella oxytoca
atgaaatttgcctatatgttaagtgctatagccgtagcggctacgttgtctgcctgtgcgaataatcacaacagcaatgcagcgaaccaggcggcgcccgatccttatggcattgcttcactaagctcctcgcagcagcagcctaacgtatccgggactatcaatattcgccagcgcgtggcgttaccgccggacgcagtattgaccgtaactctgtcggatgcgtcgctggccgatgcgcctgcgcacgtgctggcgcaaaaagcagtcaggaccgaagggaagcaggcgccgtttaattttgttctgccctataaccaggcgcaaatccagcctaatgcccgcattcttctcagcgcggcgattaccgttaacggtcagctgatgttcattaccgataccgtacagacggtgattaaccagggcggcaaccgtgccgatctggtgctggtgccggtccaacaaacggcggtaccggtggcgaacaacaacgttccgcccgtgcagtaa

SEQ ID NO: 173074 - DNA, 312 bp, Klebsiella oxytoca
atggattctcacgatacttttccgcagcgcgtctggcaaattgtcgcctcaataccagaaggatgcgtggcgacctacggcgacgttgctcagctggcgggttcaccgcgcgcggcgcgtcaggttggtggggtattaaaacgtctgccggaaggttccactctcccctggcatagggtggtcaaccgtcacggcgatatctctctcaccgggccggacctgcagcgtcaacgccaggcgctattagcggagggagtccaggtgtcaggcagtgggcatattgatctacagcactaccgctggatttattga

SEQ ID NO: 173075 - DNA, 279 bp, Klebsiella oxytoca
atgccgcccattcctgaagtgtctgtgcccttccacggtttacattttttgcgtccgggactgctcattgattttgtcacgattagcgctaatcagctgctggccgtccccccggttgcgctgctctactcaacttctggcgtccttcagcacgctgaattacgtaaacttcccatcgaagccagcggtctcgtggtgtatccgatatcaccccttaagctcccggccacgcgcgccaaactgatgattaacgcccaaagtttcttgaagccttgctaa

SEQ ID NO: 173076 - DNA, 258 bp, Klebsiella oxytoca
atgactactgtggttctgaacgtcaaaattgatagtgagttaaaagaaaagctgcgtcagtatgcggaagaaaataacgaaaatttaggaacagctacggagaaactactgctgctggccttccaggtagcggaatcagcagacgaggcgggggtttcggaagaagatattgatagccagcacaccgaagaggaagcatctccattaacccctaaagaaatcaaagcattacgtaaactcctgaagaagaaaaaatga

SEQ ID NO: 173077 - DNA, 216 bp, Klebsiella oxytoca
atgaaacaacaactctctacagccagcaactatagcgaagcgtgcgccatgctgcgttccggctatgtgaagcatgtacgcctgaactggaatatcggtagtgatgagttctttcgcattgcctccgactggtgtgacacgggcgcaaaaattaaaaaagatgaagacggttttattatttcccttaaaggttttccgattccgcgacagcattaa

SEQ ID NO: 173078 - DNA, 1428 bp, Klebsiella oxytoca
atgtcatctcgtcgctttggttcacaatcgctggtgcgcctgctcggtcactggcaggaatccggttcccgcatgccgctctggcgtcagctggcggaagcgctgcgcctgctgattctcgatggccgccttgcgctggaaacccgtttgcccggcgaacgggagctggcggcggcgctgaatatcagccgtactacggttgccagcgcgcttggacagctacgggaagaaggctatctctacagccgtcagggaagcggttcgcggatcgcgttgccggagcggacggtggagatcaagaccaataaaccggactcgccgtcggtcaatctggccgtcgccgcgctcagcgccgggcctgaaattcatcaggctttcagccaggccctgaaaatcatgccgcagcacttagccaataccggttacgatcagcagggtctgccgcttctgcgtgaagcgatcgcccaccgctatagcgaacgcggcctgccaacccgaagcgatgaagtaatgattgttaacggggcacttagcggcctggcattggttttgcgcttatttaccgggcccggcgatcgggtggtggtggatgcgccgacttatcctatggcgattagcgcgattcagggagcatcatgccgcccggtcagcgtggcgttaccgcagcagggatgggactgcgacggtttagcggcgacaattgcccaaacggcgccgcggctggcatggctgatgccggactttcataaccctaccggtcgctgtatggatagccccacgcgccagcgggtagcagacatcgccgcgcaaacccgcaccacgctggtagtagatgaaacgatggtcgacctatggtacgacgccccgccgccaccacctttagcatcgtataaccctgatgctccggtgataaccatcggctctgcgggaaaaagcttctggggcggtttgcgcataggttggatccgcgcatcctcgcgcaccattgcatctctggttcaggcgcgggactccctcgatctcggctccccgctgctggagcaactggcctgctgttggctgctggagaatgagaaaatgctgttgccgtcgcggcgcgccatgctggcaacccgtcgggatatgtgcggcgcgctgatggcggagtattttccccactggcgcttcacgccgccggaaggaggactctctttttgggttgagttacccgggatgctggcaacgctgttttccgttcgcgcggaaagccggggaattcacatcggaacaggaacgcgatttggcctggcgggcgcctttgaccgctatttacgcttaccgtttacgcttgcggatgatgaactacgtcacgcttttaatatattgcagccgttatggcatagtcttacggagcagaaagagagcttccgcccacggaaaattatttaa

SEQ ID NO: 173079 - DNA, 615 bp, Klebsiella oxytoca
atggtacgtcgcttgctgcaactttatattggtctggtcctgtacggcgtgtcgaccgcgctgtttgttcatgccaatctgggggccgatccgtgggatgtttttcatctggggatcggcaaccagttcaatcttgatttcggaacggtgatgattctgacgggcgcggcggtgctgctgctgtggatcccgctacgacaaatgccggggctgggcacggtaagcaatgtgattgtgctgggcctggtggcaaacgccactctggctatcctgccgccgttagaatcgctggtggcgcgtagcctgctgttggccggggctatcgtactgaatgcgctggcgacgggaatgtatattggcgcaggtttcggccccggtccgcgcgatgggctgatgaccggactgcatgcacgtaccggatggtcgctgcgcggcattcgcacggcgattgaactttccgttctgctgattggctggatgatgggcggcaaatttggcgtgggaaccgtactctatgcgataaccattgggccgttgattcagctctgcctgccgtggtttcatcagtcggctgcacgtaaggcgctggcgaaaccgggcgaggccatctcctga

SEQ ID NO: 173080 - DNA, 354 bp, Klebsiella oxytoca
atgaagtacgttgatggttttgttgttgccgtaccggcggaaaataaggaggcataccgtgcgatggcggcaaaggcgctgccgctatttaaagagtttggcgccatacgcgtggtcgagtgctgggcggatgatgtcccggatggcaagctgaccgattttcgtctggcggtaaaagctgaagataatgaagaggtggtattcagctggattgaatacccctctaaagaggcgcgcgatgccgccaacgctaaaatgatggctgacccgcggatgaaagagtttggcgaaaatatgctatttgatggaaaacgaatgatatacggcgggttttccccgctcctcgatgagtaa

SEQ ID NO: 173081 - DNA, 837 bp, Klebsiella oxytoca
atgaacgatttcacttcactgctgcaacaggggaatgcctggctattcattcccagcgcgatcctgctcggcgcgctgcacggtctggagcccggacactcgaaaaccatgatggcggcatttattgtggcagtgcgcggaacgttgaagcaggctgtactactggggctagcggcgacggtatcgcatacggccgtggtctggctggtagcgatggcaggcctgtggtttggccgcggttgggatgcgcaaacgtcagaaccctggtttcagctgatctcagggatccttattgtgctgattgcctgctggatgctgcggcgtacctggctcgaatctcgtacacaccaacgcgatcgtgatcataaccataaccacgaccacgaccacgaccaccatcatgcacaccatcatccgcatcaacaccatcctcacgcgcatccgctagtggccaccgcagagtggcaggacgcccatcagcgcgcgcatgcggaggagatcaaccgccgctttaacggacagcgggtcaccaccggacagatcgttttgtttgggctgacgggcgggctaatcccctgcccggcgtcaattaccgtattgcttatttgcctccagttgaaaaaggtttcgctgggagccacgctggtgctgagttttagcgttgggctggcgctcaccttagtggcttcaggcgcaattgccgccctgagcctgaagcacgtcgccaaccgctggccgggactaaacgatctctcacggaaagcgccgtggatttccggtgcgctgattattgtggtgggttgctatatgctgctgcacggctggcgtaatctgtag

SEQ ID NO: 173082 - DNA, 273 bp, Klebsiella oxytoca
atgtcacatactgttcgtcacaagaagatgttattgacccgactgaagaaaattcaggggcagagcgctgcgctggaaaaaatgctcaaccgcgagcatgaatgcgcagaggttctccagcagctggccgccattcgcggtgcggtaaacggcatgatgatgcaggttattcaggggcatttaacggatcatgtcgtcaaagagccggaagaaggccagcgtgaagctgaccttgaagtggtcatgcaggtgattaaatcttatctgaaatag

SEQ ID NO: 173083 - DNA, 1587 bp, Klebsiella oxytoca
atgacgacccggcatcaggtgagcctggttacaggggtactgatactggccattattttgccggtggcgctgagtatttggttggcaatgcagcaggccaaagcgcagttttataccggactggacaacttttccgttcgggtactggctcgcgttcagcaggtagccgatcaggcaagagaggcgctgaacgaagcggatgccgataccgccgcgacctgcagtccgcagcatctgcttaatatgcggcggattgcctacacccaccgctacgtgcaggaagtgttgtggttacatggaggtattccgcaatgctcttctcttgaagatcatcgggtatcagtaacgtttcctgctcccgaccatattactgccgacggctatcgtacctggctcacctcggttagcgatctcgggctacagcataaaatgacggcaatgggcagcgaacatcatgtggtgatgatcgatccggtttcatttattgatgtgattccgtcaggccaggaagagattcacactctcttgtttggcacgaagcgcgatcaaattatcatcagcagtaaaccgctcgaggccgccgcctgggagcacatcaagcgtctggatgtcgaaaccttgacgcttgatagcaccgtttatcgcctccgccgcatccctgaactagggctggcgatcgcggcctggtcatcaacattaccgctacagcaaaaattacatcaacagctaatgctgtggttgccgattggtttatgcaccagcctgctggcctcattcctgcttcttcgcctgctgcgaaggctgcgctctccgcgttacgggatgctggacgcgctgaactccaatgctatacaggtctattatcagcctattatttcgctacagactggcaaaatcgccggcgcggaagcacttgcccgctggaggcagcctgacggtagttatttatcgccggatatttttatcccgcttgccgaacagacccggctgataacccggttaaccgaagatatcgtgcggaaaattttcgccgatctcggaacctggctgcgccagcgcccggaagtgcatatttcgatcaatttatctgtcgatgatttgcgttcgccaacgctgccgatactcctgcaggagcagctccagcactggggtatcagcgctcagcagatcatccttgaaattaccgagcgcggcttcgttgacccgcaaaccactctgcccgtcatcgccggctatcgtcaggccggacaccgtatatctattgatgacttcggcaccggctactccagcctgagctatttacaaaaactggacgttgacaccctgaaaatcgataaatcgtttgtcgatacgctggagtacaaaccgctgacgccgcatattattgaaatggcgaaagcgcttaatctggcgaccgtcgccgaaggcgtcgaaaccgaaagccagcgcgactggctgcgcgttcacggcgtgcagtacgcccagggttggctttatagcaaagcgctgccaaaggagaaatttatcctgtgggctgaaaacaacctgaaagcgtattcaacgccgcctgcgaaaaatacctactga

SEQ ID NO: 173084 - DNA, 1110 bp, Klebsiella oxytoca
atgtccaatatacgactgaggaatgtcaccaaacggttcggcagtacggtgacgctgcatcaggtaaatcttgatattgaagatggtgaatttgcggtgttcgtcggcccgtccggctgcggtaaatcgacgctactgaggatgattgccggtcttgaagaggtcagcgaaggtgaagtgctaattggcgatgaggtgatgaatgatgtcgttcctgcccatcgcggcgtcgctatggtattccagtcctatgcgctctatccgcatatgacggtggcggaaaatatgggctatggcctgaaagtgaacaaagtaccaaaagatgaaattcgccgtcaggttgaaatggtggcgaaaacgctgcagctctctcatctgctggatcgtaagcctaagcaactttccggcggtcaacgtcagcgcgttgccatcggccgcgctattgtacgtaatccacgggtgtttatgtttgatgaacccctttctaacctcgatgccgaactgcgcgttgagatgcgcctgcatatcgccaaactccatcacgagctcaaaacgaccatggtttatgttactcatgaccaggttgaagcaatgactctcgccgataaaatcgtggtgatgaactacggcaaagttgagcagatgggatcgccgatgtcgctgtattacaacccggtgaataaattcgtcgcgggatttatcggttcgccgaaaatgaacttccttcccgcgacggttaccgcatggcagccgggccagcttagcgtgaagatggcgcaagatcataatctgacgctcaatatcaccacctcaccgctgcagcccggcgctgccgtcaccctcggtattcgtcctgaacatctctctaccgatgtgaatatcggtaccgtggttgagtttcaatgtgaagtggtcgagagactgggtaataatacctatctatttggccagtgctacggccacgataacgtcaaaattctgctgccaggcgacgttcactttcgcccctggcagaaaatcagcgttgccttcgacgatcgctactgcatggtgttcgatgaaaacgacctgcggattagcaccgacatcgccgcgccggatgcccactaa

SEQ ID NO: 173085 - DNA, 1233 bp, Klebsiella oxytoca
atgaaaaagaacactcttgctgcactgatccttaccactctggctgccgggcagctaacgagcctgcaggcgcacgcggccgggcagctcaacgtttgggaagacatcaaaaaatccgccggcatcaaagccgcagtcggtgattttgaaaagcagttcaacgttaaggtgaacgtgcaggagatgccgtacgcccaacagctggaaaagctgcgtcttgatggtccggcgggcatcggcccggatgtcctggtgatccctaatgaccagctaggcggagcggttgtccagggattgctagctccactgactctggatcaggagaagcaggaggcgtttacgcctgcgtcaatcagcgctttccatatggataacgtgctttacggcgtacctaaagcggtggaaaccctggtactgatttacaacaaagatctgatcgaccagccgctggatagcctgcaggcgtggttcgactattcgaagaagcagcgcgaagaggggaaatacggtctgctggcgaagttcgaccagatttattacagctggggcgctatcggtccaatgggcggctatatctttggcaaaaacgataaagggggcttcaacccgcaggatgtcggtctcaacaaacccggcgcagtggaagcagtcactttcctgaaaaaattctataccgataaggttttcccggcagggatcctcggtgacaacgggttgaacgccatcgattccctgttcaccgagaagaaagcggcggcggtgattaacggcccgtgggctttccagccatacgaagcggcaggcattaattatggcgttgcgcctctgccgacgctgccggacggcaaaccgatgagctccttcctcggcgtgaaaggctacgtggtttcgacgtggagtaaagataaagcgctggcgcagcagtttattgagtttattaaccagcctcagtatgtgaaagcacgctatgtggcgaccggcgaaatcccgccgctgaaggcaatgattgacgatccgctgattaagaatgacgagaaggccagcgcggtggcggtgcagtcagcacgggcgacggcaatgccaggaataccggaaatgggggaggtatggggcccggcgaacgcagccctggagctgagcctgaccggtaaacaggagccgaaggcggcgctggataacgccgagaagcagatcaagatgcagatcgaagccatgcaggccagcaatcagtaa

SEQ ID NO: 173086 - DNA, 1308 bp, Klebsiella oxytoca
gtgattatcaatcccagcgaaaatattgccgaagcgcgtggcgcaggacgccacgcgtggtgcggcctgctgctggctatcgtgccgggttttggtcagttttatcaccgccagtggttgaaggggattgtcttcctggtgctgctgagcagttttatgagcattttctatgactttctcagcgaaggcctgtgggggttatacaccttaggcgaagaagtcccgcgggataactctatcttcctgctggcggaaggaataatcagcgtgctgattatcgcttttggtttgttagtctatttcctctcgctgcgcgatgcctggattaacggtaaaaagcgcgatgagggtatggcgctgaacagcgtacgcaagcaatatcagatgctgctcagcgacggttttccctatttgatgattacgccgggctttattctgctggtgtttgtggtcatcttcccgattctgtttggctttgcgatcgcctttactaactacaacctttatcacacgccgcccgcgaagctggtcgattgggtggggttcaaaaacttcatcaacatcttcacattatccatctggcgctcgaccttttttgatgtcctgcagtggacggtggtgtggacgctgctggcgacaaccctgcaatgcaccgttggtgtgctgctggcgattctggttaaccagaaggatttgcgtttcaagccaatgatccgcacgatttttattctgccgtgggcggtgccggggtttgtgacgattctggtttttgccgggatgttcaatgattcattcggggtcattaacaacgccattttgtccttcttcggcatcagtccgaaggcctggctgaccgacccgttctggactaagacggcgctgatcatgatgcaaacctggctgggcttcccgtttgttttcgccatgaccaccggcgtactgcaggcgattccggacgatctctatgaagcggccacgatggatggcgccagcgcgtttacccggctgcggaccattactctgccgctggtgctgtactcgattgcgccaattattattactcagtacaccttcaattttaataacttcaatatcatctatctgttcaacaacggcgggcctgcggtggcggggtcgaatgccggcggtacggatattctggtgtcgtggatctacaaactcaccatgtcgtcttcgcaatacgctatcgcggccactattacgatcctgctatcgattttcgtcgtcggcctggcgttgtggcagttccgcgccacaaaatcctttaaaaatgacgatatggcgtaa

SEQ ID NO: 173087 - DNA, 852 bp, Klebsiella oxytoca
atggctaaatcaccgagtattaaacgcgaaaagtggattcgcctgtcactcacctggctggtggtcatctttgtctcgacgatcattatttacccgctggtctggacggtaggggcgtcgctgaacgccgggaacagtctgctgagtacgtcgattattcctgaaaacctgtcgttccagcattacgcggatttgttcaacggcaatgtgaattatctcacctggtactggaactcgatgaaaatcagcttcatgaccatgcttctgaccctaatcagcgtgagcttcaccgcctatgcgttctcccgctttcgtttcaaagggcggcagaacggactgatgctgttcctgctgttgcagatgattccgcagttctcggcgctgattgcgatctttgtcctttctcagctgctggggctaatcaacagtcatctggcgctggtactgatctacgtgggcggcatgatcccgatgaatacctggctcatgaaggggtatctggacgcgatccccaaagatctggatgaatccgcgcggatggatggcgccagcagcttccgtatctttttcgagatcatcatgccgttgtcgaagcctattctggcggtggtggcgctgttttcatttaccggtccgctgggggatttcattctctccagcaccatattgcgtaccccggataagtacacgctgccgattggcctgtataacctggtcgcacagaagatgggcgccagctacaccacctacgcggcgggagcggtattgattgccgtcccggtggcgattctctatctggcgctacaaaagtactttgtttccggcctcacctcaggcagtacaaaaggataa

SEQ ID NO: 173088 - DNA, 1203 bp, Klebsiella oxytoca
atgaaaagattaacacccgcgtggcttgctgtttctctggcatgctgtttttccgccggtacgctggcggcagatgcgctgcaaacgcaggcgtttagcaatatgcccgctgattttattaaaggcgcggatatctctacgctgctggatgcggaaaaacacggcgcgaagttctttaatcacaacaatcagcagcaggatccgatcgcgatcctcaaggccgatggcgtgaactacgttcgtctgcgcctgtgggtggatcccaaagatgctaaaggccagcgctacggcggcggcgataacgatctggcgacgacgctggcgctggcgaagcgggcaaaagcgcaggggatgaagctgctgcttgatttccactacagcgatttctggaccgatccgggtaagcagttcaagccgaaagcctgggagaagctggactatccgcagctgaaaaccacgatccacgattatacccgcgacacgattgcccgctttaagcaggagggcgtgctgccggatatggtgcagatcggcaacgaaatcaacggcggtatgctgtggccggaaggtaaaagctgggggcagggcggcggcgagttcgatcgtcttgctgggctgctgaatgccgccatcgatggactgaaggaaaatctcaccggcggtgagcaggttaaaattatgcttcatctggccgaaggcacgaaaaacgacaccttccgctggtggtttgatgaaatcagcaagcgtaacgtcccttacgacatcattggtttgtcgatgtacacctactggaatggcccgattagcgcgctgaaagccaatatggacgatatcagccaacgctataacaaagacgtgatagtggtggaggccgcttacgcttataccctggataactgcgacaatgccgaaaatagcttccaggcgaaagaagaaaaagatggtggttaccccgccaccgtccagggacaatataattatattcacgacttaatgcaggccgttgccgatgttccgcagcatcgcggtaaaggtattttttattgggagccgacgtggattgccgtgccgggaaatacctgggcgacgcctgccggaatgaaatatatccacgatgagtggaaggagggtaatgcccgcgaaaatcaggcgctgtttgattgccagggaaaagcattgccgtcgatgaaggtatttaattaa

SEQ ID NO: 173089 - DNA, 2058 bp, Klebsiella oxytoca
atgaaaaaatttgcgcctttgagtccgaaggttaatacgctattgcatggcgccgactataacccggagcaatgggagaattatccggatattatcgacaaagatattgccatgatgcagcaggcaaaatgcaatgtgatgtcggtagggatattcagctgggcgaagcttgaacctcaggagggcgtatttgagtttggctggttggacagtattctggaaaaactgtataccgccggaattcatgtctttcttgctacgccaagcggcgcgcgcccggcgtggatgtcgcagaaataccctcaggtgctgcgcgttggtcgcgatcgggtgccagccctgcacggcggacggcataaccactgtatgtcgtcgccggtctatcgtgagaaaaccctgaagattaataccctgctggcggaacgttacgcgcagcatccggcggtgctgggctggcatatctccaacgaatacggcggggagtgtcactgtagcctgtgtcaggagcgtttccgcgactggctgaaagcgcgctatgaaacgctggataatctcaatcacgcctggtggagtaccttctggagccacacctatagcgactggtcgcagatcgaatctccggcgccgcagggagaagtctcaattcatggtctcaaccttgactggcatcgctttaataccgcccaggtgaccgacttctgccgccatgagattgctccgctgaaagcggcgaatgccgaactgccggtgaccaccaacttcatggagtatttctacgattacgactactggcagctggcgcagacgctggactttatttcgtgggacagctaccccatgtggcatcgcgataaagatgaaaccacgctggcctgctacaccgcgatgtatcacgacatgatgcgcagcctgaagggcggtaagccgtttgtattaatggaatccactcccagtgcgaccaactggcagccaaccagtaagcttaagaagccgggaatgcatattctctcctctttgcaggcggtggcgcacggcgcggattcggtgcagtattttcagtggcgtaaaagccgcggttcggtggagaagttccatggcgcgattatcgatcatgtcggtcatctggatacgcgcgtgggccgtgaagtgacgaagctcggcgagatgttaagccagttgcctggcgtcgtgggctgccggacggatgcgaaagtggcgattatcttcgatcagcaaaatcgctgggcgctggatgatgctcaggggccgcgtaatctcggcatggagtatgaaaataccgtcaacgaacattaccgtccgttctgggagcaggggattgcggttgatgttatcgatgctgacgttgacctgagtccttatcaactggtcattgcgccaatgctgtatatggttcgtgagggatttgccgaacgcgccgaagcgtttgtggctaacggcggtcatttagttacaacatactggacagggatagtgaacgagtccgacctctgccatctcggcggtttcccgggcccgctgcgtaaactgctgggcatttgggcggaagaaattgactgcctgaacgacggcgaacgcaacctggtacaggggctggcgggtaatgaagctggcttgcaggggccgtaccaggtacgccatttgtgtgaactgattcatgctgaaagcgcgcaaccgctggctacctatcgcgatgatttttatgcaggaagaccggcggtcaccgtcaatcactttggtaatggcaaggcatggcacgttgcgtcgcgcaacgatctggccttccagcgggacttcttctgctgcctgatgaaagaactctctctgccgcgcgcggttgaggctgatttcccgccgggcgtagtagcgaccgcacgcacggatggtgaaaccgcctacgttttcctgcaaaactacagcgcgcagcagcatagcgtggttttgccgcaaggctatctggactgcctcaccggtacggcgctgaatacgccgctggtcttaaatgcatgggattgccgtatcctcagtcgtcgcgcgtaa

SEQ ID NO: 173090 - DNA, 315 bp, Klebsiella oxytoca
atggtgagtttaaaatcctttctgaattacttctcgcagcctcgtgcggcggtacctttaagtcatgcggagcaacaacagattgattatttaattcaggcgtttggtggtgaagggaatattattaacgttgacgcctgcattacccgcttacgcgtcacggtcaataatctatcgttagttgattctcaggccttacagcagcagggagcgcttggggttattatcctggggcagcaggtgcatgctattttcggtaagcagtcggatgctttacggcaattacttgatgagcactttgccagccggaaataa

SEQ ID NO: 173091 - DNA, 1272 bp, Klebsiella oxytoca
atgaacactacgctgcgcacactttccgttgcgttggccgctgcgctgatttcaccatccgtgtttgctgcttccgccaccctcccgggtatcgactttcatggctatatgcgcgccggggttggggtctccggcgacggtagccaggccgaatggcaaaaaaataaaattggccgtctgggtaacgaatctgatacctacggcgagctggagctgggatcggaggtctacaagaagaatgacgttagcttctatctcgatagtatggtcagcatggtatctgacggctcaaacgataatgaaaccacgcttgatgacgatgcgcagttcggcctgcggcagctaaacctgcaaattaaaggtctgatccccggcgatccaaatgcagtcatctggggcggcaaacgctactatcagcgccacgatctgcacattatcgatacgaaatactggaatatttccggatccggcgccgggatcgaaaactatacgctcggtccgggcgccgtttcatttgcctggatccgcggggatgccaatgacgtcgactaccgcgtcgatggcgacagcaacgtcaatattaactatcttgatttgcgctatgcgggctggaagccgtgggccggatcctggaccgaatttggtatcgactacgcgatgccgaataccactaaaaagcaggatacctacggcggactctatgatgctgaaaacggcgtcatgctaaccggtgaaatcagccaggatatgctgggcggttacaacaaaacggttctgcaatacgcaaacaaaggactggcgcagaacatggtgtcccaggggggcggctggtatgacatgtggaactacgtcaatgacgccaccggctaccgcgttatcaataccggtttaattccgattactgaaaagttctctattaaccacgtcctgacctggggctccgcggataacatcaccgattacacggataaaacacgcatgctgtcgctggtggcgcgcgggcagtatcagttcaccgaatatgtacgcctgattggcgaagtgggcggcttctaccaaaaagatagctacaaaaataataccgattacaaacaagccggtgagaaatacaccattgcgctgggcctggccgatggacctgactttatgtcgcgcccggaactacgaattttcgcttcatacctgaatgattccgaaaatggtaagccgttcgaagatcggaccgccaataatacgtggaactttggtgtacaggtcgaagcctggtggtaa

SEQ ID NO: 173092 - DNA, 1074 bp, Klebsiella oxytoca
atgaagtctaaaagcgcgaccttagaagacgttgcacgccatgcgggcgtctcctatcagaccgtgtccagggtactgaacaaatctgctaatgtatccaaagccacgcgcagtaaggtggagaaatccattgaggagctgcgctatgtcccgaaccgcctggcgcaacagctggtaggtaagcaaagtcgtaccgtgggcctggtcactatttcccttgcattgcatgccccatcccaggtggctgcggcggtaaaacgttatgcgaacgtggaaggttatcaggtgctcatctccatgattgatgagagcgtcaaccaaagtatccaggactctattaatgaactgaagtctcaactggtggataaggtcatcatcaacgtgccgctggagactgaacaggcccaaaaaatagccgctgataacgatgacatcgtctgtctttttttagatgtcgatccctatagctcggtgtttaacgtttcgtttaatccggcggacggtacacgggccagcgtcaagtatctctatgagatgggccatcgggaaatcgcgttgctggccggccctgaaagttcggtatcggccaaactgcgtctgaaaagctggatagaaaccctggagggttacgggctggagccggtaacggtgattcgcggcaactgggacgcgcaaagcggctacgctggcgcgctgcaaatgctgcgggagacgccaaactttaccgccgttttggtaggtaacgatcagatggcattgggcgtactgagcgcatttcaccagcaccaggtaccgattccgggagaaaagtcggttattggttatgatgacacttatgagagttcgttcttctacccggcgctaaccacggtttcgctggatcttgatctgcaagggaaggaggccgttcggcgcattctcgacagcggcgataacgaaacatcacatacgtcttctatccttccggctcgtctggttgtacgccattctaccgggccaaaaacggagcctggcaaaaatctgcagtctattgctgagcagctccgggctctggcgcatcagctaagtccttaa

SEQ ID NO: 173093 - DNA, 264 bp, Klebsiella oxytoca
atgaaacccaatattcatccgcattatcgtacggtggtttttcacgataccagcgccaacgaatactttaaggtcggttctactatcagaaccgagcgtgagatcgaactggagggcgagacgtacccctacgtgacgcttgatgtatcgtccaaatcgcatccgtattacaccggtaagcagaaggccttcaacaacgaaggtagtaccgcgcgtttccgtcagcgctttggcggctttattgatgcgaagagggacaaataa

SEQ ID NO: 173094 - DNA, 141 bp, Klebsiella oxytoca
atgcaggtgctaaactcattgcgtagcgcgaaacaacgccacccggattgccagatcgtgaagcgcaaggggcggctatacgtgatttgcaaaagcaatccccgctttaaagccgtgcagggacgcaagaaaagacgttaa

SEQ ID NO: 173095 - DNA, 699 bp, Klebsiella oxytoca
atgagccatcttaatcaatacgatcagcccgttggcaccgccctgcccgactggcagccctgtccacatcctgaaagggtgaacctgcagggccgcttttgtcggctagagcctttgcgctccacgcatgccggcgcgctgtttgacgcccaccgcttagccccggatacccgaagctggacatggctgctgcgtgaaccggacagcagcgtagaggagtaccgcgcatggattgagagcgtttccgggcagaacgaccccattcacttcgcggtgatcgataagcaaacagaccagcccgtgggctcactggcgctgatgagaattgacgctaacaacggcgttgttgaagtcggccacgttcacttctcgcctttactgagccggaccgcaatggccaccgaggcccactggctgctgatggattacgtctttgatacgctcggctatcggcgctacgagtggaaatgtaacagtctcaacgaaccgtcacgccgggcggcgctgcggttgggatttcagtatgaggggcaatttcgtcaggcgctggtgataaagggccacaaccgcgataccgactggttttccattattgattccgagtggccacagatagacagggcaatgcagcaatggctggccgccgacaacttcagcgccgacggccagcagttacgtacgctggggagctttcgttaa

SEQ ID NO: 173096 - DNA, 1455 bp, Klebsiella oxytoca
atgaatattcctgatgatgctttttttactctgttggagcaggcgctgtgcgacagagggcgtgaaaccctgcagcgcacgctctatctccgtctgcgagcggccattttgcaaggtacgctggcgggcggtagccgcctgccaggttcacgggctatggcgcagcgtctgaagctatcgcgcaataccgtcaacggcgcgctggagcagctggcgatggaggggtacctgttgcgtagccgccaggggacatacgccgcgcttttgaagtcgcagggagaagaggaaattgcggcgcgcgtgattgtgctccccgagtatcttcagggattacccgccgccacgcgccgagattcgcccacgctgctctttacaccgggaatgcctgcggttaactactttcctcttgctatctggcgtcgactccttgaccgggtattgcgcgaggagggaagcgcattgctgggctacggcgatgcgcagggggaacttgtattgcgcaaagcgattgcccgtcatctggcgctctcccggggcatccgctgcaaagccgggcaaattgtgattacggaaggagcgctggaagccgttgatttatgtacgcatctgctgagcgttgccggggagacggcatgggtggaagaacccggctatttaggggcaaaaagcatgtttcttaaagccgggcttcacatcaagggtatacccgtcgatcgagagggtatgcggttcgataccgatgatgatagcgcagcaccgcgattaatctttacttcaccgtcccatcaatacccctgcggttcggtgatgagcgccgggcggcgactggctttactggaatacgcccgccgtcatgacgcctggcttatcgaggatgattacgatagtgaatttcgttatagcggcgaaccgattcccgccatgctgggaatggtcaggcaggcgccggtagtttatctggggacattcagcaaaacgctttttcccgcgctgcgtattggctttatggtgatgccggaggggctggcggatgccgcaagaggcgcgattggttcactgttacgcggcggtcatcgtgctgaacagcgggcgctggctctgtttatcgaagaggggcactacgcgcgtcatcttgccgctatgcgccgcttgtatcgcaaacgccagcagcagctgcgggaaacgctggcggcagagcttactcacccttatgaaatatcaggcggcgagggggggttacacctgactgtcgtcgtcgaagacgttgatgatgaagctattgtgcagcaggcccggcggtttcagctcgcgcccggcgcattaagccgtttttatctgaatgaaaaaaaggcgagaagcggctttgttctgggctacggtaatacgtccgcatcacgctttccttctgcgatacggacgctggatcgccttattgcgcagcaccgatgcgggtaa

SEQ ID NO: 173097 - DNA, 471 bp, Klebsiella oxytoca
atgacagaaatacagcggctgctgaaaagcaccattgatgagcttaatgtgcaagagaagcgcgataaccgtccgcgctttagcataagctttattcgcaaccatccatggctttttgtcgcgatgtatgcggctttcctggcaacactcatcgtgatgctgcgttctgaaacgctggtagattcggtctggctattaatcgtactatttgttctgctgaacggcttctttttctttgacgtttacccgcgctatcgctatgaagacattgatgttctggacttccgcgtttgttataacggggagtggtacaacactcgatttgttcccggtcagctcatcgaccgaatcctgcagtcgccgcgcgtcgatggcgagcagaaagctcagctgcaaaaaatgatcgccaccaaaggcgaactctcattttacgatgtcttttcccttacccgcatcggtgctgcgcaataa

SEQ ID NO: 173098 - DNA, 567 bp, Klebsiella oxytoca
atgagtgaagaaaaacaaaaaatgattgccggtgaactgtatgtgtcaggtgacgctgagctaaaggccgaccgtctactggccagacaactgttgcatcgttacaatcattcagcgcctgaagagcgtgaattaagaaaagcattactgacggaactgctaggccacgcaggcgacgcttatatcgaacccacttttcgctgcgattacggctacaatatcttcctcgggaaaaatttctacgccaactttgattgcgtgatgctggatgtgtgtccgatacatattggcgaaaactgcatgctggcgccgggtgtgcatatttataccgcaacgcatccccttgaccctgttgaacgaaatagcggtaaagagtacggaaaacccgtcactattggccacaatgtatggattggcggccgggccgtaattaatcctggcgtgactatcggcgacaatgccatcgtggcttccggttccgtagtggtgaaaaatgtgccagccaacgccgtcgtcggcggaaacccggctcaaatcataaaaatgctggagagcgaaaaacggtaa

SEQ ID NO: 173099 - DNA, 219 bp, Klebsiella oxytoca
atgtctgataaaacattaaccaaaatagactatttgatgcgcttacgacgttgtcagacaattgatacgctggagcgcgtaattgaaaaaaataaatatgaactttctgataatgaactggcggtattttactcagcagccgatcatcgtcttgctgaactgacgatgaataaactgtatgacaagatcccgccatcggtctggaaattcatccgctaa

SEQ ID NO: 173100 - DNA, 375 bp, Klebsiella oxytoca
atggacgaatactcgccaaaaagacatgatattgcgcagcttaaatttctctgcgaaaccctgtatcatgactgtcttgcaaacctggaagagagcaaccatggctgggttaatgacccaacctctgctgtcaatcttcagcttaatgaattgatcgagcacattgccgcgttcgcacttaattataaaattaagtatgctgaggataataagctggtgactcagcttgacgaatatctggatgacactttcgtgttgttcagcaactacggcattaacactgcagatctgcagaaatggcgtaaatcaggcaacaggttattccgctgctttgtgaacgccagtcgggaaaacccggccagtctttcttgttaa

SEQ ID NO: 173101 - DNA, 3147 bp, Klebsiella oxytoca
atgcctaatttctttatcgatcgccccatatttgcctgggtgatcgccatcatcattatgctggctggggggctctcgatcctcaagttgccaatagcgcaatatccgacgattgcgccgccggcaatttccatcacggccatgtaccccggtgccgacgcagaaaccgtgcagaacaccgtgactcaggttatcgaacagaacatgaacggtatcgatcacctgatgtacatgtcttcaaatggcgactccaccggtacagcaaccatcactctgacctttgaatccggtaccgatccggatattgctcaggtacaggttcaaaacaaactggcgctggcgacaccgctgctgccgcaggaagtacagcagcagggtattagcgttgaaaaggcatccagcagcttcctgatggttgtcggcgttattaatactaacggcaccatgaatcaggatgacatttctgactatgttgccgccaacatgaaagatgcgattagccgaaccagcggcgttggtgacgtgcagttgtttggttcccagtacgctatgcgtatctggatggacccaaacaaacttaataacttccagttgacgccagttgacgttatcagcgccctgaaagcgcagaacgcccaggttgcagcaggacagttaggcggtacgcccccggtgaaaggccagcagctgaatgcctccatcgtggcgcagactcgtctgaccaatactgaagagtttggcaacattctgctgaaggttaaccaggatggctcccaggttcgtctgcgcgatgtcgcgcgcattgagctgggtggtgaaaactatgacgttatcgcgaagtttaacggtcagccagcttctggtctgggtattaaactggcgaccggcgcgaacgcgctggataccgcaaacgccattcgcgccgaactgaagaaaatggagcctttcttcccttctggcctgaagattgtttatccgtatgacaccactccattcgtgcagatctccattcacgaagtggtaaaaacgctggttgaagccatcatcctggtgttcctggtaatgtatctgttcctgcagaacttccgcgccaccttgattccgacgattgccgtgccggtcgtactgctggggacgttcgccatcctcgcgctgttcggtttctcgataaacacgctcaccatgtttggtatggtgctcgccataggcttgcttgtggatgacgccatcgtggtggtggaaaacgtcgaacgtgtaatggcagaggaagggctaccgccgaaggaagccacgcgtaaatcgatgggccagattcagggcgcgctggtaggtatcgcgatggtgctttctgcggtgtttatcccgatggccttctttggtggttccaccggtgcgatttaccgccagttctcgatcaccatcgtctccgcgatggcgctgtcggtgctggtcgctctgattctcaccccggcgctttgcgccacgatgctgaagccaatccaaaaaggcagccatggcgcaaccactggcttcttcggttggtttaaccgcatgtttgataagagcacgcatcactataccgacagcgtaggcaacatcctgcgtagtaccggtcgctatctggtgctgtacctgatcatcgttgtgggaatggcctggctgttcgttcgtctgccaagttcgttcctgccagacgaagaccagggcgtattcctgagcatggcgcagctgcctgcaggcgcaactcaggagcgtacccagaaagttttggatgagatgaccaattactatctcaccaaagagaaagataacgttgaatcggtattcgccgtaaacggttttggtttcgcgggtcgtggacaaaacaccggtatcgcgttcgtctctctgaaggactggagccagcgtccaggcgaagagaacaaagttgaggcgattaccggccgcgcgatgggctatttctcgcagattaaagatgcaatggtcttcgcctttaacctgccggcaattgttgaactcggtaccgcaacgggctttgacttccagctgatcgaccaggctggcctgggccatgaaaaactgacccaggcacgtaaccagctttttggaatggttgctcagcaccctgacgtattgagcggcgttcgtccaaacggcctggaagatactccgcagttcaaagtggatatcgatcaggaaaaagcgcaggcgcttggcgtgtctatcagcgacatcaacacgacgcttggcgcggcatggggcggtagctacgtcaacgacttcattgaccgtggccgcgtgaagaaagtgtatatcatgtccgaagcgaaataccgcatgctgccggaagacattggcaactggtacgtacgcggtagcgatggacagatggtaccgttctccgccttctcaacctcgcgctgggaatacggctcgccgcgcctggagcgctacaacggtctgccatcgatggaaatcctcggccaggcgacaccgggtaagagtaccggtgaagcgatgaacctgatggaagagctggcgggtaaactgcctgccggtatcggctatgactggacgggtatgtcatatcaggaacgtttgtcaggtaaccaggcgccagcgctgtacgctatctcgctgatcgtcgtcttcctgtgtctggcggcgctgtacgagagctggtcaattccattctcggtcatgctggtcgttccgctcggtgttgtgggggcgctgctggctgccaccttccgaggattgactaacgacgtttacttccaggttggtctgttgaccactatcggcctgtcggcgaagaacgcgatactgatcgttgaattcgccaaagacctgatggataaagaaggcaaaggcctgattgaggcaacgcttgaagccgttcgtatgcgtctgcgtccgattctgatgacctccctggcgtttatcctcggtgtaatgccgctggttatcagctccggcgcaggctccggcgcgcagaatgccgtaggtactggcgtaatgggcgggatgattaccgcgacggttctggcgattttcttcgtgccggtattcttcgtggtcgtgcgtcgccgcttcagtaggaaaaatgaggatattgagcacagccatccggttgagcatcattaa

SEQ ID NO: 173102 - DNA, 1194 bp, Klebsiella oxytoca
atgaacaaaaacagagggttaacgcctccggcggtcgttctgatgctctcaggcagcttagcgctaacaggatgtgacgacaaaccggctcagcaaggagcccagcaaatgccggaagtcggtattgtgacgctcaaatccgctcctctacaaattactactgaactgccggggcgtaccagcgcctatcgcgttgcggaagttcgtcctcaggtcagtggcattattctgaaacgtaacttcaccgaaggcagcgatatccaggctggcgtgtctctttatcaaatcgatccggcaacctatcaagccacctatgaaagcgcgaaaggcgatttagccaaagcgcaggctgccgccaatatggatcagctgacggttaaacgttaccaaaaactgttaggcactaagtacattagccaacaggattacgatactgccgtagccacggcccagcagagcaacgctgccgtcgtcgccgctaaagccgcagttgaaaccgcgcgcatcaatctggcctacactaaggtgacctccccgatcagcggccgcattggtaaatccgcggtcacggaaggcgcgctggtgcagaacggccagactactgccctggcgaccgtgcaacagcttgatcctatctacgtggatgtgactcaatcgagcaacgattttctgcgtctgaaacaagagctggctaacggcaaactgcagcaggagaacggtaaagcgaaggttgaactggtcactaacgacggtttgaaatatccgcagaacggtacgctggagttctccgacgttaccgttgatcagaccaccggttctatcacgctgcgcgcgattttcccgaacccggatcacactctgctgcccggcatgttcgttcgcgcgcgcctggaagaaggcgtaaatcctgatgcgattctggttccgcagcagggcgtaacccgtaccccgcgcggcgatgccagcgcgatggttgtcggcgaaggcgataaagtcgaagttcgccagattaccgccactcaggcgattggcgataaatggctggtcaccgaagggctgaaaactggcgatcgcgtcattattagcggtctgcagaaagtcaaaccaggcgtacaggtaaaagcgcaggaagtcgtttctgatgaaaaacagcaagccgcaggcaacgctcagtcagaacaaaccaagtcttaa

SEQ ID NO: 173103 - DNA, 651 bp, Klebsiella oxytoca
atggcacgaaaaaccaaacaacaggcgcttgagacccggcaacatattctggatgttgctctgcgtttgttttcgcagcaaggcgtatcatccacctcgctggccgcaattgcaaaagctgccggtgtgacgaggggggctatctattggcatttcaaaaataaatcggacttatttaatgaaatatgggtactgtcagaagccaatattaacgatctcgaagttgagtatcgggcaaaattccccaacgatccactgtcagttgtgcgagagatcttagtgtatatccttgaagccactgtgacagaaaaacgcagacggctgatgatggaaatcatctttcataaatgtgaattcgtcggtgagatggtcacgctgcaagaagcgcagcgcattctttgccttgagagctacgaccgtatcgaacaaacattaaaggagtgcattgtcgcgaagatgctacccgccaatttattaacccgccgggcggcgatcctcatgcgcagctatctttccggcctgatggagaactggcttttggcgccgaacgcctttgatctgcaaaaagaagcgcgggattatgtcgaagtcctgctggaaatgtatcaattttgcccctctctgcgcagttctgaaggactggacgcttaa

SEQ ID NO: 173104 - DNA, 3342 bp, Klebsiella oxytoca
atgctgcatactatccgttggcgaaatgccctctctgctgtagttcttaccctgatgctttttatcggctgtattagcgttaattcggcgctggcggctgatttacctgaacgctccgaggtccagagccagctcacgaccctgaacaagcaaaaagatttgactccccaggacaagctggttcagcaggacctgattcagacgctggaaacgctcgataaaattgagcgcataaagtcggaaacgacgcagctgcgccagcaggtcgctcaggcgcctgcgaaaatgaatcaggctatcgatagcctgaacgcgctaagcggtgtccccaacgacgaggcgacgcgtaaaacgctgagcaccttgtcgctgcgccagctggaatcgcgcgtctctcagactctggacgatttgcaaaacgcgcaaaacgatctggcgacttataatagtcagcttgtttcgctacagacgcagccggaacgcgtgcagaatgcgatgtattccgcctctcagcagctgcagcagatccgtaatcgtctgaatggcacgactacgggcgaagaggcgctacgtcctacccagcagaatttgctgctggcgcagcaggccttgctgaatgcgcagatagatcaacagcgtaaaagcctggaaggcaacacggtgctgcaggataccctgcaaaagcagcgtgactacatcaccgcttacagcaatcgtctggagcaccagcttcagctgttgcaggaagcggtgaatagcaagcgcctgacgctgacggaaaagacggctcaggaagcggtttctccggacgaaacggcccgtattcaggcaaacccgctggttaagcaggagctggacattaatcaccagctgagcgaaaggctcatttcggcaacggaaacgggtaatcagctggttcagcgcaacatcaaagtgaagacctggctcgatcgtgctctgcaatccgagcgcgatattaaagagcagatttccgtgctgaaaggcagcctgctgctgtcgcgaatcctttatcagcaacagcaaacgctgccctctgcggaggagctaagcgacatgaccaaccgcatcgccgacctgcgccttgagcagttcgaggtcaaccagcagcgcgatgcgctattccagagcgatgcgtatgtcgcgaagctggaggaggggcatagcagcgaggtgaatcccgaagtgcatgatgcacttcttgagattgttgatatgcgccgggaactgctcgatcagtttaataaacagctcggcaaccagctgatgatggcgattaacctgcaaatcaatcagcagcagctaatgagcgtgtcaaccaacctgaaagccatcctgacgcagcagattttctgggtaaatagcaaccgcccgatggactgggagtggtttaaagccttcccggaggcgctgaaaggacagtttaaggcgatgaaaatcaccgtaaactgggaaaaggcctggcctgcggtatttatcgcttttctggccggcctgccgctgctgctgattgccggtctgattcgctggcgtctgaactggctgaaagcgtatcaggctaagctggcgtcgcaggtggggcaactgcgcaacgatacgcagctccacacgccgaaagcgattcttatcgatctgattcgggcgctgcctgtggtgctggtcatactcgccgtcggtctgattctgctgacgatgcagctgaatattagcgaccttctgtgggcctatagcaagaagctggcgctattctggctggtgtttggcctgtgctggaaagtgctggaaaaagacggcgtggcggtgagccactttaatatgccgtcacagctgactagccactggcggcggcagattgttcgcgtgagccttgcgctgctgccgctcaacttctggtcggtgatgtcggaactgtcgccgctgcacctgatggatgacgttctcgggcagttcgttattttcctcaacctgttgctgatcgcggtgctggtcttgccgatgtgccgcgaaagctggcgtgataaagaatctcacagcctgcgccttatcaccgttaccgtgctatcgatcgttcccattgccctgatggtgctgacggcaaccggctatttctatacgacgctgcgtctggccggccgctggattgaaaccgtttatctggtgatgctgtggaacctgttgtatcagaccgtgctgcgcggcctgagcgtggccgcgcggcgtattgcctggcgccgcgcgctggcgcgtcgtcagcatctggttaaagagggggctgaaggagccgagccgcaggaagaaccgacaattgctctggagcaggttaaccagcaaacgctgcgtattacgatgctggtgatgatcgcgctgtttgcggtcctgttctgggcgatttggtcggatctcatcaccgtcttcgcctatctcgatagtattacgctgtggcattacaagggtaccgaagccggggtcagcgccgtgaaaagcgttaccatggggagcctgctgttcgcgattgtcgcttcgatggttgcctgggcgttaattcgcaacctgccgggactgctggaagtgctggtgctgtcccgactaaatatgcgccagggtgcgtcttatgccattacgacaatccttaattacgccattattgttattggcgcgatgacggtatttggcgctctgggcgtctcatgggataaactacagtggctggcagcggcgctgtcggttggtttaggtttcggcttacaggaaatattcggtaactttgtttccggtctgattattctctttgagcgcccggtgcgcattggcgatacggtgaccattggcaccttctccggcaccgtcagcaaaatccgcattcgcgccacgaccatcaccgattttgaccgtaaagaggtgattatccccaataaggccttcgtgactgagcgtctgattaactggtcgctctccgataccgtcacccgcgttgtcatccgccttggcgtcgcgtacggttctgacctggataaggttaaagaagtactgcttaaggccgcgcacgagcatccgaaagtgatgcaggagcccgcgccgtcggttttctttaccactttcggcgccagtacgctcgatcatgaactacgactatacgtgcgcgaacttcgcgatcgcagctatgcagtggatgagcttaaccgggcgatcgatcgtttgtgtcgtgagaacaatattgatatcgcctttaaccagctggaggttcatcttcgcaatgagaagggcgatgaagtcaccgaggtgaagcgggataaaggcgacgatgccactccggcgatgagctaa

SEQ ID NO: 173105 - DNA, 789 bp, Klebsiella oxytoca
atggaaatattctcacgtacgccgcacgatgccatttttcgtcaaatgttgactcagaaagaggtcgcccgcgatttcttacagctttacctcccggcgcagtttttaagtatctgcgatcttagtacgctgcagctggattcaggcagttttatcgaagaagacctgcgctccagctactcggatatactttactctctgcaaacgcggcacggcgccggatatatctatgcgctgattgaacatcaaagctctccggacaagctcatggcttttcgcctgatgcgctatacgctcgcagccatacagcgtcaccttgatgctggccacgatacgttgccccttgtggtccccattctgttttatcacggcgccgtcagtccctggccgcatacgctcaactggcatcatctctttgaccatcctgagcttaccagcgcgctgtacggcggtgattttccactggtggacctgaccgttatgccagttaatcaattcatcctccaccagcgtatggcgatgctggaactgttgcagaagcatatccgccagcgcgatctggccgaattgcaaccgatactgattgcgctgctggcgattgccgaatggctggaagagaaaggtcgtaaaaaagggagaagagaaggcagactggagagtcgacagaaaggccgtaaagaaatctcgcacagcattgcgctgaaaatgctcgccagcgggctggatcctaagatggtgatggagctgacgggtctgagcccggaagaactctcctcgctcagccgttaa

SEQ ID NO: 173106 - DNA, 174 bp, Klebsiella oxytoca
atgtcgctggaaaatgcgcctgacgaggtcaagctggccgtcgatttaatcatgctgcttgaggaaaataatgtccctgcgcaaaccgtgctagctgcgctggagattatccgtcgcgattatgaaaacaaagtaaaaagtgcggaagaggcctcgcaaaacgcgccggagtag

SEQ ID NO: 173107 - DNA, 528 bp, Klebsiella oxytoca
ttgaaaaccacccggcttttacattcgctggaaaatcagcttgcggagctggccgtccgggtagcgccaatggcgaatcacgcgaccctcagcccgcgtttcgatcgccagctgtttcggacccgcagcacgcagatgcaggcttatctcaatgaggccagcgatcgtttaacggaattaaagctggcggtcgaacgccagcagctcccccaggttgcctggctggcggaacatcttgtggcccaaatcgccgccattagccgggaaacggccacctggtcgttacgcgcctgggatagcgcttcgccgacgcttagccgctggcagcgccggcgtattcagcatcaggaatatgagcggcgtctgctggccatgcgcaacgatcgccagagacagctggcgcaagccacctctcttgaggaacagcagcggctggcaaaagaagttgacgcctacgccgcacgccttgcccgctgtcgcgacgcgctggaaaaaattgaaaacaggctggcccgattaacacgttaa

SEQ ID NO: 173108 - DNA, 378 bp, Klebsiella oxytoca
atgccacgtattattttgatcatcattggctggctggcggtagcgctgggaacgctgggcgtatttttaccgctactgccgacgacgccttttatcctgcttgccgcctggtgctttgcgcgctcgtcgccgcgttttcaccactggcttttgtaccgctcatggtttggcggttacctgcgtcactggcagaaataccgcgccatgccgccgggagcgaagccgcgcgcgatagcgatgattttgctgacctttgctatttccctgtggctggttaatcttacctgggtgcgcatcttgctgctgatcattctggcctgtctgctgatatttatgtggcgcattccggtggttgatgcaaagcaacaaaagcactga

SEQ ID NO: 173109 - DNA, 552 bp, Klebsiella oxytoca
atgaccgcaacagcacagcagcttgaatatctgaagaacagcatccaaagcatccaggactatccgaaacctggcatccttttccgtgatgtcaccagcttgctggaagacccgaaggcctatgcgctcagcattgaactgctggccgagcgttataaagacgcgggtattaccaaagtggtgggcaccgaagcgcgtggcttcttgtttggcgcaccggttgcgctggcgctgggcgtaggctttgttccggtacgcaagccgcgtaagctgccgcgtgagaccatcgcagaaagctacgagcttgagtacggcaccgatcagctggaaatccatgtcgatgcgatcaaagaaggcgataaagtcctggtggttgacgatctgctggcaaccggcggcaccatcgacgccaccgtgaagcttatccgtcgcctgggcggtgaagtgcacgatgcggcttttattatcaatctgttcgatctgggcggcgagcagcgtctggaaaaactgggaattaactgctatagcctggtccctttcccgggtcactaa

SEQ ID NO: 173110 - DNA, 1908 bp, Klebsiella oxytoca
atgagttatcaggtcttagcccgtaaatggcgcccacaaacctttgctgacgtcgtcggccaggaacatgtgctgaccgcactggcgaacggcttgtcgttagggcgcattcatcatgcctatctcttttccggcacccgcggcgtgggtaaaacctctatcgcacgtctgctggcaaaaggattaaactgtgaaaccggtattaccgccacgccatgcggcgtctgcgataactgccgtgaaatagaacaggggcgctttgtcgatctgatagagatcgatgccgcttcgcgcaccaaagtcgaagatacccgcgatctgctggataacgttcagtacgcgccggcccgtggtcgcttcaaggtctatctgatcgatgaagtccatatgctttcgcgccacagcttcaacgcgttgttaaaaacgctggaggagccgccggcgcacgtaaaatttctgctggcgaccaccgatccgcagaagctgccggtgaccattctttcccgctgcctgcagttccatcttaaggcgctggatgtcgaacagattcgccatcagcttgagcatatcctcggcgtcgagcagatcgctttcgaaccgcgcgcgctgcagctgctgtcgcgcgcggcggatggcagcctgcgcgatgcattaagcctgaccgatcaggctatcgccagcggcgacggccgtctgacggctgaatccgttagcaccatgctcggtacgcttgacgacgatcaggcgctctcgctgattgaagcgctggtggccgccgatggcgaacgcgtcatggccggcgtcaatgaagctgccgctcgcggcgtggagtgggaggctttgctggtggaaatgcagagcctgttgcaccgcattgcaatggttcagctgtcgccgtcggcgctgggggcggatatggccgcgatagagctacgcatgcgcgagctggcgcggacggtgccgcctaccgatgttcagctgtactatcaaacgttattaattggccgtaaagagcttccatacgcgccggatcgccggatgggcgttgagatgacgcttctgcgtgcgctggcgttccatccgcgtatgccgctgcctgaaccggaggcgccgccggcacaggctattcaggccgcccctgcacagcagtccgccccggcatccgctccgccgccgccgccgcagaatttgccgcagaccaccagccaggtgctggcggcacgcagccaactgcagcgcagccagggagcgcccaccccaaaaaagagtgaaccggcagccgcttcccgcgcgcggccggtgaataacgctgcgctggaacgactgagttcgattactgaacgcgtacaggcgcgtccggctgctgctgcgctggaaaaagcgccagcgaaaaaagaagcttatcgctggaaatcgacgacggttgttgaaaccgtgaaagaagaagtggcgacgccgaaggcgctgaaaaaagcgctggagcatgaaaaaacgccggaactggcggcaaaactggctattgaagcggtcgagcgcgatagctgggcggcggaagtcagccggcttgcggtgccaaagctggtggagcaggtcgccctcaatgcctggaaagagcaggagggcaaccgcgtctgcctgcatcttcgcccgagccagcggcacctgaattcggcgggcgcgcagcaaaagctggcggaagcgctcggtattttgtacggtacgccggttgaattgaccatcgtggaagatgataatcccgcgatgcgcacgccgcttgagtggcggcaggcaatttatgaagaaaagctcgcgcaggcgcgtgaagcgattattgcggataataacattcagacgctgcgtcgatttttcgatgcggacctggatgaagagagtattcgccccatttga

SEQ ID NO: 173111 - DNA, 333 bp, Klebsiella oxytoca
atgtttggtggaaaaggcggtctgggtaacctgatgaagcaggcccagcagatgcaagaaaaaatgcagcagatgcaggaagaagtcgctcgactggaagtgaccggtgaatccggcgcaggcctggtcaaagtcaccatcaacggtgcgcataactgccgccgcgttgagatcgacccgagcctgctggaagacgacaaagagatgctggaagatctggtggccgctgcgtttaacgatgccgcccgccgcatcgaagagacgcagaaagaaaaaatggcgtctgtgtccgccggtatgcagctgccgccaggctttaagatgccgttctga

SEQ ID NO: 173112 - DNA, 606 bp, Klebsiella oxytoca
atgcaaaccagtccgctgttaacgcagcttatggaagcactgcgctgcctgccgggcgtcggcccgaagtcggcgcagcgcatggcgtttaccctgctgcagcgcgatcgcagcggcggtatgcgcctggcgcaagcgctgacgcgcgcgatgtcggaaatcggccactgcgccgattgccgcacattcaccgagcaggaggtatgcaatatttgcagcaaccctcggcggaaggaaaacggccagatctgcgtggtagagagcccagcggatatctacgctatcgagcagaccgggcagttttccggtcgttattttgtgctgatgggccatctgtcgccgcttgacggcatcgggccggatgacattgggctcgatcgcctggagcagcgtctgcgtgacgaatcgatgcaggaagtgatcctcgcaaccaacccaacggttgaaggggaggcgaccgcgaactatatcgccgagctttgcgcgcagtatggcgtagaggcgagccgtatcgctcatggcgtaccggtcggcggcgagctggaaatggttgacggcacaacgctgtcacactctcttgccggacggcataagattcgtttttaa

SEQ ID NO: 173113 - DNA, 1875 bp, Klebsiella oxytoca
atgaaaggacaagaaactcgtggttttcagtcagaggttaagcagcttctgcacctgatgatccattctctttattccaacaaagaaattttcctgcgtgagctgatttccaacgcctccgatgcggccgacaagctgcgcttccgcgccctgtcccagccggatctgtatgaaggcgacggcgaactgcgcgtgcgtgtttcatttgataaagacaaccgcaccctgaccattgccgataacggcattggtatgaaccgcgatgaagtgattgaccatctcggcaccatcgccaagtccggcaccaaagcattccttgagtccatgggctctgaccaggcgaaagacagccagctgattggccagttcggcgtgggcttctattcagcgtttattgtcgccgataaagtcaccgtacgtacccgcgcggcgggagacagcgcagaaaatggcgtattctgggagtccgccggcgaaggcgaatataccgttgccgacattaacaaagccgatcgcggtaccgagatcacgctgcacctgcgtgaaggcgaggatgatttcctcaacgactggcgcgtgcgttcgatcatcagcaaatactccgatcacatcgcgctgccggtggaaattgaaaaacgcgaagaagtggacggtgaaaccgtcattacctgggagaaaattaacaaagcccaggcgctgtggacgcgcaataagtcggaaatcaaagacgacgagtacaacgagttttataaacatattgcccatgactacagcgatccgctgacctggagccacaaccgcgttgaaggcaagcaggagtacaccagcctgctgtatatcccgtcgcaggcgccatgggatatgtggaatcgcgaccataaacacggcctgaagctgtacgtacagcgcgttttcatcatggatgacgctgagcagtttatgccgaactacctgcgcttcgtccgcggcctggtcgactccaacgatctgccgctgaacgtgtcgcgtgaaatccttcaggacagcagcgtgacccgcaatctgcgcactgcgctgagcaagcgcgccctgcagatgctggaaaaactggcgaaagacgacgcggaaaaatatcagaccttctggcagcagtttggccttgtgctgaaagaaggcccggcggaagaccacgctaaccagcagaccattgctaaactgctgcgtttcgccagtacccataccgattccgccgctcagaccgtgtcgctggaagagtacgtctcccgcatgaaagaagggcaggagaagatttactacattaccgccgacagctacgccgccgcgaagagcagcccgcatctggaactgctgcgtaagaaaggcattgaagtgctgctgctttccgatcgcatcgacgagtggatgatgagctatctgaccgagttcgacggtaagccgttccagtcggtggcgaaagccgatgagtcgctggataagctgacggacgaagtggatgaaaccacaaaagaagctgagaaggcgctggagccgttcgttgagcgagccaaaacgctgctcggcgaccgggtgaaagaggttcgcctgacccatcgtctgaccgatacgccggccatcgttaccaccgacgcggatgaaatgagcacccaaatggcgaaactgtttgccgctgcgggccaggccgcgccggaagtgaagtacatcttcgaactgaacccgctgcatccgctggtaaaacgcgcggcggacactcaggatgatgcgcaattcggcgagtgggttgagttgcttctcgatcaggcgctgctggccgagcgcggtacgctggaagatccgaaccagtttattcgccgcatgaaccagctgctggcgtcgtaa

SEQ ID NO: 173114 - DNA, 645 bp, Klebsiella oxytoca
atgcgtattattctgcttggcgctccgggcgcgggtaaaggaactcaggctcagttcatcatggagaaatacggtattccgcaaatctccaccggcgacatgctgcgtgccgcggtgaagtcaggctccgagctgggcaaaaaggcgaaggatattatggacgccggtaagctggtcaccgacgaactggttatcgccctggtgaaagagcgtatcactcaggaagattgccgcaacggattcctgctggacggcttcccgcgcaccattcctcaggctgacgccatgaaagaagcgggcattgccgtagattacgtactggaattcgatgttcctgatgaactgatcgttgaccgcatcatcggccgtcgcgttcacgctgcttccggccgcgtttatcacatcaaatttaatccgccgaaagtcgaaggcaaagacgatgtgaccggcgaagagctgaccacccgtaaagacgaccaggaagagaccgtgcgtaagcgtctggttgagtatcatcagatgacggctccgctgatcggctattatcagaaagaagccgaagcgggcaatacccaatacgcgaaagttgatggcaccaaagctgtggcggacgttcgcgccgaactggaaaaaatcctcggttaa

SEQ ID NO: 173115 - DNA, 963 bp, Klebsiella oxytoca
atgcatcagacgaaaacaggtatcttattagccaatttaggcactcccgatgcgcccacgcccgacgcggttaagcgctatctacgacagtttcttagcgatcggcgcgtggtggatacctcccgtctactgtggtggccgttgctgcgcggcgtgatactgcccctgcgcgcccccagggtcgctaagctctatcagtccatctggatggaagacggctcgccgctgatggtctatagccagcagcagcggcaggcgctggccgcgcggcttccggatacgccggtggcgctggggatgagctacggctcgccgtcgctggagagcgcggtggatgaactgctggcgcagggtgtggaccacatcgtggtgctaccgctctatccgcaatactcctgctctaccgtggcggcggtctgggatgagctggggcgtatcctcgccagaaagcgcgcgattcccggcatctcttttattcgcgactatgccgatgatgtggactacattcacgcgctggccgccagcgtacgcgcttcgtttgcggtgcacggcgagccggatttactgctgctctcctatcatgggattccacagcgttacgctcagcaaggggatacctatcctcagcgctgtcgcgataccactcgtgagctggtttcagcccttggtctgtcgcctgaccgggtcatgatgacttttcagtcgcgctttggtcgtgagccgtggctgacgccctatactgacgaaacgctgaaaatgctcggtgagaaaggggtgaagcatattcaggttatctgtcccggctttgctgccgattgcctggagacgctggaagagatcgcggtgcaaaaccgggaaatcttccttgaagccggcggccagcaatatgagtacataccggcgcttaatgcggacaccgcgcatattgaaatgatggtcaacctgacggcgaaatatcgctga

SEQ ID NO: 173116 - DNA, 1305 bp, Klebsiella oxytoca
atgaaatttcccggtaaacgcaaatccaaacactattttcccgtcaacgctcgcgatccgctgctgcaacaaattcagccggacaatgagtctaacgtcgcctgggtcgtcggcatcgatcaaaccctggtcgatatcgaagcgaaagtggatgaggcgtttatcgtacgctacggcctgagcgccgggcattcgctggtgattgaggatgatgtcgccgaagcgttgtaccaggaactggtccgcaacgatctgattacccaccagtttgccggtggtaccatcggaaacaccatgcacaactactcggtgctggcggatgaccgctcggttctgcttggcgtcatgtgcagcaatattgaaatcggcggctacgcctatcgctacctgtgcaacacctccagccgtaccgatctgaactacctgcaaggcgtggatggcgcgattggtcgctgctttacccttattagcgactccggcgagcgcacctttgcgatcagccccggccatatgaataagctccgcccggaaagcattccggaaagcgtgatcgccggcgcttccgcgctggtgctgacctcctacctcgtccgctgcaagccgggtgagccgatgccggacgcgacgatgcaggccatcaaatatgcgaaaaagcacgatgtaccggtggtcctgaccctggggactaaatacgttatcgctgataatccggcgtggtggcaggcgttcctcaaagaacacgtttctattctggcgatgaacgaagaggaggcggaagcgctgaccggactatccgatccgctgctggcttccgacaaggcgctggagtgggttgacctggtactgtgcaccgccgggcccgccgggctgtatatggccagttttaccgaggatgaggctaagcgcaaaacgcagcatccgctgctgcctggcgcgattgccgagtttaaccagtatgaattcagccgcgcgatgcgccaccaggactgcgagaatccgctgcgtatttattcgcatatcgcaccctatatgggcgggccggagaagatcatgaacaccaacggcgccggcgacggcgcgctggcggcactgctgcacgacatcaccgctaataattatcatcgcaataacgtgccgaactccagcaagcacaaatgcaaatggctgacctattcctcgctggcgcaggtgtgtaaatacgctaaccgcgtgagctatcaggtgctgaaccagcattcaccgcgtctgacccgcggcctgccggagcgtgaagatagtctggaagaggcctactgggatcgttaa

SEQ ID NO: 173117 - DNA, 1677 bp, Klebsiella oxytoca
atgcaccacgcaacaccgctaatcaccaccattgtcggcggccttgtgctcgcctttattctcggcatgattgccaataagctacgtatttctcctctggtgggatatctattagcgggcgtgctggccggaccttttaccccaggttttgttgctgataccaagctggcgccggaactggccgagctcggcgtgatcctgctgatgttcggcgtgggtctgcatttctccttaaaagatctgatggcggttaaggccatcgccatcccgggcgctatcgcccagatagccgtagcgaccctgttgggtatggcgctctctgccatgctgggctggtcgttaatgaccggtatcgtttttggtctgtgtctttctaccgccagtaccgtggtgctgctgcgcgcgctggaagaacggcagcttattgatagccagcgggggcaaatcgccatcggctggctgattgttgaagatctggtgatggttctgacgctggtgctgctgccggcggttgccggcatgaccgagaaaggcgacgtgggcctggcttctctggccctcgatatgagtattaccatcggcaaagtcgtcgccttcatcgccattatgatgctcgtcggccgccgcctggtgccgtggattatgtcgcgcagcgcggcaaccggttcacgcgagctgtttacgctgtcggtactggcgttagcgctcggcatcgctttcggcgccgttgagctatttgacgtctccttcgccctcggcgcctttttcgccggtatggtgctcaatgaatccgagctcagccatcgcgcggcccacgatacgctgccgctgcgcgacgccttcgccgtgctgttctttgtctccgtcggaatgctgttcgacccgatgattctgcttgagcagccgctggcagtactggcgacgctggctatcatcattttcggtaaatcggctgccgccttcttcctggtgcggatgttcggccactcgccgcgcactgccctgaccattgccgccagtctggcgcaaatcggtgaattcgcctttattcttgctggtctgggaatggcgctggatctgctgccgcaggccgggcagaacctggtgcttgccggcgccattatctccatcatgctcaacccggtcctgtttaccctgctggaaaaatacctcgataaaacggagacgctggacgaacagacgctggaagaagtgctggaagatgagaaacagatccccgttgatatctgtaaccatgcgctgctggtcggtttcggtcgcgtcgggagcctgcttggtgaaaaactgatggctcaggggataccgctggtagttatcgaaacatcgcgcacccgcgttgacgaactgcgcgcgcggggtattcgcgcagttttaggtaacgccgccaatgaagagataatgaatctggcgcatctggactgcgcgcgctggctactgctcaccatccctaacggttacgaggccggagagatcgtggcctcagcgcgcgagaagtgcccgaatatcgagatcatcgcgcgcgcgcattacgacgatgaggtggaatatattgttgaacgcggcgccaaccaggtagtgatgggcgagcgagaaatcgcccgcgccatgcttaagctgcttgaaacgccgccagccggcgagcttattaccggttaa

SEQ ID NO: 173118 - DNA, 1221 bp, Klebsiella oxytoca
atggcaatgaatcagaccgcacaacccttatccggccctgctgctgcgccgcaaaaagcacgcacctcgtttcgcattctcggcgccatcagcctctcccatttgctaaacgatatgatccaatcgcttattctggctatctacccgctgctgcaggccgagttttcgctgacctttgtgcagataggtatgattaccctcaccttccagctggcctcatcgctattgcagccggtcgtcggctatctgaccgacaaacatccgatgccgtggtcgctgccgataggcatgtgctttaccctgagcggtctggtgctgctggcgatctcggggagctttggtatggttctgctggcagccgcgctggtcggcaccgggtcttcggtctttcatccggagtcttcacgcgtggcgcgtatggcttccggcggtcgccatggcctggcgcagtcgatatttcaggtcggcggcaactttggcagctcgttaggcccgctgcttgcggccctgattatcgctccttacggtaaaggtaacgttggctggtttgtcctggcagcgctgttggcgatcgtcgtgctggcgcaaatcagccgctggtatgccgctcagcatcggatgaataaaggtaaaccgaaggcgctgattgtaaatccgttgccaaaaaacaaagttattctggcggtcagtatcctgttactgctgattttctcgaaatacttctatatggcgagcatcagcagctattacaccttttatctgatgcaaaaattcggattgtcggtgcaaaatgcccagtttcatctgtttgcctttctttttgccgtcgcggcaggaacggtgattggcgggcctgtcggcgataagattggacgcaaatatgttatttggggctctatccttggcgtagcgccgttcacccttgttttaccctatgcatccctggaatggaccgggattttaacggtgataattggttttatccttgcctcagccttttccgccattctggtctatgcccaggagctattaccggggcggatcggcatggtttctggtttgttcttcggttttgcttttggcatgggtggccttggcgccgcggtactggggctcttagctgaccataccagcatcgaactggtctataaaatctgcgctttcctgcctctaatcggcatcctgacgatatttctacctaacaaccatcaaaagtcatga

SEQ ID NO: 173119 - DNA, 1653 bp, Klebsiella oxytoca
atgcactttatgaagcaaggcgttgcgctggcgctatttacggcgctatcgctggggagcctgtcagcgcaggcttatgagcaggataaaacttacaaaataaccatcctgcatactaacgatcatcatggccacttctggcgtagcgactacggcgaatatgggctatccgcacaaaaaacgctggttgacggtattcgcaaagaggtggcggcagaaggcggcagcgtgctgctgttatccggcggcgatatcaacaccggcgtgccggaatccgatttacaggacgcggaacctgatttccgcgggatgaacctgattggctacgatgcaatggcggtgggtaatcatgaatttgataatccgcttagcgtactgcgtcagcaggaaaaatgggcgaagttccccttcctttcggcgaatatttatcagaaaagcaccggcgagcgtctgtttaagccgtgggcgctgttcaaacgcggcgggctgaatattgcggttatcggtctgacgaccgacgatacggctaaaattggtaatcccgagttctttaccgatatcgagttccgtaaaccggcggaagaggccaaactcgttatccaggagctgcagcagaatgaaaagccggacgtgattctggctactacccacatgggccattatgacaatggcgctcacggttcgaacgcgccgggcgatgttgagatggcacgcagcctgcctgcgggagcgctggcgatgatcgtcggcggtcactcgcaggacccggtatgcatggcgtcggagaacaagaagcaggtggattacgttccgggtagcccgtgcgcgccggacaagcagaacggtatctggattgtgcaggcccatgagtggggtaaatatgttggccgcgccgattttgaattccgcaacggcgacatgaagctggtgcgctatcagctgatcccggtcaacctgaagaaaaaggtcacctgggacaacggcgagagcgagcgcgtgctctatacgccgcaaatccccgaaaatccgcagatgctctccctgctgacgcctttccagaataaaggcaaagcgcagctacaggtgaaaatcggtagcgtaaacgcgcatctggagggcgatcgcagcaaagttcgtttcgtgcaaaccaatatgggacgtttgctgctggcggcgcagatggcgcgcagcaatgctgatttcgcggtgatgagcggcggcggagtgcgtgattcgattgaagcgggtgatatcacctataaagatgtgatgaaggtccaacccttcggcaacgtgctggtctatgtcgatatgagcggtaaggaagtgaccgagtatctgaccgccgtggcgcagatgaagcccgattccggcgcctatccgcagtttgccaacgtcggttttgtggctaaagacggcaagctcaataatttgaccatcaaaggcgaaccggtcgatccggcaaagacctatcgtatggcgaccctgagctttaacgccaccggcggcgacggctatccgcatatcgatacgaagcccggctatgttaataccggctttatcgatgccgaagtgctgaaagagtatatccagaaaaactcaccgttggatgcggcagcttatgaaccgaaaggcgaggtaagctggcagtaa

SEQ ID NO: 173120 - DNA, 480 bp, Klebsiella oxytoca
atgactcccgccgtaaaattactcgaaaaaaacaaaattagttttcaaatccacagctacgatcacgatccgaacgaaaccaattttggtgacgaagtggtgcgtaagctgggactgaacgccgaccaggtctacaaaacgctgctggttgccgttaacggcgacatgaagcatctggccgttgcagtgaccccggttgcgggtcagttggatctgaaaaaagtggcgaaggccttaggcgcaaaaaaagtggatatggcagacccgatggtcgcgcagcgggttaccggctatctggtggggggtatcagcccgctcgggcaaaaaaaacgtctgccgacggtgattgacgcaccggcccaggcgtttgccaccatctatatttccggcggcaaacgcgggctggatattgagctggcggccagcgatctggcgaagatccttgaggcaaaattcgccgatatcgcgcggcgcgattaa

SEQ ID NO: 173121 - DNA, 795 bp, Klebsiella oxytoca
atgggcctgttaaaccgaataaaaatgctgtggcaagccgccctcggctcgtcttattcctggcccgcgctggatatcacccttcccggggaacgccatctgcacctggtcggcagtattcatatgggcacccgcgatatgtcgccgccgcccgcccggctgttaaaaaagatccgtcaggccgatgcgctgattgtggaagcggatattagcggcagcgaaacgccattcagcaacctcccctcctgtccgccgctggcggaacgcctgaacgccccccagcttgctgcactgcaagagcgagcggcagaaatgggcctgtctgtcgcgctgttcgacagtcaaccgctgtggcaggtagcgatggtactgcaggcaactcaggcgcaaaaactggggctcagggcggattacggcattgattatcaactgctgatggcggcgcgcgagagccatatccgcgtgatggagctggagggagccgacagccagattgcgctgctgcgggatctgcccgatggcggtctggcgctgctggaggataccctcacccactggcgcacaaatgcgcgtctgctgcaggtgatgatcggttggtggctcgatcagccgccgtcaagaggggctacctcgctgccgacaacctttagccagtcgctgtatgacgttctgatgcaccagcgcaacctcgcctggcgggaaacgctgctggcgctgccgccgggacgctacgtggttgccgtcggggcgctgcatttatacggcgaagggaatctgccggacatgctgacgtaa

SEQ ID NO: 173122 - DNA, 2502 bp, Klebsiella oxytoca
atgtctaacactatcgacctcgcgcttgatggcctctcctgcggccactgcgttaaacgggtgaaagagagcctggagcagcgtcccgacgttgagcaggcggaagttaccgttaccgaagcccacgtcacgggcagcgccagcgcggaagcgctgattgagaccattaaacaagccggatacggcgcggagctcagccacccaaaggctaaaccgctggcagaatcatcaatcccgccggaagcactgacagcggccaccactgagcttccggcagcccgtgacgtagatgacagccagcagctgttaatcaacggcatgagctgcgccagctgcgtatcccgggtacaaaacgcgctcgccgcggtgccgggcgtctcgcaggcgcgggtcaacctggcggaacgcactgcgctggtattgggcagcgcgtccgccgcagaattagtccaggccgtagagaaagcgggctacggcgcggaggctatcgaagacgacctcgaacgccgcgagcgtcagcaggaaaccgccatcgccacaatgaagcgcttccgctggcaggctatcgtcgccctgctggtcgggatcccggtgatgggttgggggatgatcggcgacaacatgatggtcagcgatgataaccgtaccctgtggctggttatcggccttgtcacgctggcggtgatggtatttgccggcggccatttttaccgcagcgcgtggaaaagcctgaaaaacggcaccgcgacgatggatacgctggtggcgctgggtaccggcgtcgcctggctctattcgatgagcgtcaatctgtggccgcagtggtttccgctggaagcccgccacctttattatgaagccagcgcgatgattatcggtctgattaacctcggccatatgctggaagcccgtgcacgtcagcgctcctcgaaagcgctggaaaaactactcgatttaaccccaccgtcagcgcgggtggtcaccgacgaaggcgaaaaagatctgccgctggcggaagttcaggcgggaatgaccctgcgtttgaccaccggcgatcgcgttccggtcgatggcatcattagccagggcgaggcctggttcgatgaagcgatgctcaccggtgagccggtgccgcagcaaaaaggcgacggtgacgccgtgcatgccgggaccgtagtgcaggacggcagcgtactgtttaccgccagcgccgtcggcagccagaccaccctggcgcgtattatccgcatggtgcgtcaggcgcagagcagtaaacctgaaatcggccagttggcggacaaaatctccgccgtgttcgtcccggcggtcgtggcgatagccctgttcagcgccgcgatctggtactttttcggtccggcgccgcaaattgtctataccctggtgatcgccaccacggtgctgattatcgcctgtccgtgcgccctggggctggcaacgccgatgtcgattatctccggcgtgggccgcgcggcggagtacggagttctggtgcgcgatgccgatgcgctgcagcgcgccagcaccctggatacgctggtctttgataaaacgggtaccctcaccgagggtaaaccgcaggtggtggcgataaaaacctttgccgccatcgatgaaaccaccgcactgcgtctggcggcgtcactggagcaaggctccagccacccgctggcgcgcgccatcctcgacaaagccgcagatcaacgcctgcctgcggtagataatttccgcaccctacgcggactgggggtcagcggtgaagccgaaggccaccgtctgctgctcggcaaccaggcgctgcttaatgagcaaaagatagcaacggctgaaatagaaggcgaaatgaacgcccaggcgtcgcagggcgcgacgccggtgctactggcggtagatggtcaggcggcggcgctgttcgccatccgcgatccgctgcgtgaagatagcgtggcggcattagccaggctgcaccgccagggttatcgtctggtcatgctgaccggcgataacccaaccaccgccaacgctatcgctaaagaggcgggcattgatgaggtgattgccggggttctgccggacggtaaagccgatgcgattaagcgcctgcaaggccagggacatcaggtggcgatgatcggcgacggtatcaacgatgcgcccgcgctggcgcaggccgatgtggggatcgccatgggcggcggcagcgatgtcgccattgagacagcggcgattaccctgatgcgccatagcctgaacggcgtcgccgatgcgctggagatcgccaaagccacgctgcgcaacatgaagcagaacctgctgggggcatttgtttataactcgctgggcattccgattgccgccgggatcctgtggccgctaaccggaacgctactcaatccggtggtggcgggcgcagccatggcgctctcttcgattaccgtcgtgagcaacgccaaccgcctgctgcgctttaagccaaaatcctaa

SEQ ID NO: 173123 - DNA, 411 bp, Klebsiella oxytoca
atgaatattagcgatgtggcgaaaaaaaccggcttaaccagtaaagcgatccgtttttacgaagagaagggactggtaacgccgccgctgcgtagcgaaaacggctaccgcagctacagccaacagcatctggatgaactgaccctgctgcgccaggcgcgtcaggtggggttcaatctggaagagtgtcgcgagctgatattcctgttcaacgatccgtcgcggcacagcgccgacgtgaagcgccggacgctggagaaagtcgcggaaattgagcgccacatcagcgaactgcaggggatgcgtacgcagctgctggcgctggcggactcctgtcccggcgatgacagcgcggactgcccgatcatcgataatctctcgggctgctgtcaccgcaaagtccaggcctag

SEQ ID NO: 173124 - DNA, 465 bp, Klebsiella oxytoca
atgatcgcgctgattctcacccacccgcatattttctggctcagccttggcgggctgctgctggcggcggaaatgctcggcggcaacggctatctgctgtggagcggcattgccggcgtcgtaaccgggctgctggtctggatgctaccgtttagctgggagtggcagggcacgctgttcgccgtgctgaccctgctggcggcctggctgtggtcgcgctggctgcgtaaccgcgtaaaacgccagaagccgacggacgctcagcttaatcagcggggacagcagctgcttggccgccgctttacgctggaaacggcgctggttaacggccgaggacacgtccgcgtgggcgacagttcatggccggtaatagccgatgacgacctcatggcgggcagtaaggttgaagtcgtcgccgtcgaggggattacgctgcgggtcagggagctccctaacggccgctag

SEQ ID NO: 173125 - DNA, 918 bp, Klebsiella oxytoca
atgctgatttttatccccattcttattttcgtcgcgctggttatcgtcggagcgtcggtaaaaattgttcctcagggctaccagtggacggtagagcgctttggccgctatacgcaaacgctgcagccgggtatgagccttgtggttccctttatggatcggatcgggcgcaaaattaatatgatggagcaggtgctcgatatcccttcacaggaggtgatttcgcgcgataacgccaacgtcaccattgatgcggtgtgctttattcaggttatcgatgcgccgaaagccgcctatgaagtcagcaacctcgagctggcgatcatcaacctgaccatgaccaacattcgtaccgtgctgggctccatggaactggatgaaatgctctcccagcgcgacagcatcaacacccgtctgctgcatattgtcgatgaagcgaccaacccgtggggcatcaaaattacccgcgtcgagatccgcgacgtacgcccgccggcggagctgatcgcctcaatgaacgcccagatgaaagccgaacgaactaagcgcgcctatattctggaagccgaagggatacgtcaggcggaaattctcaaagccgaaggcgagaaacagtcgcagatcctcaaagccgagggcgaacgccagtcggcatttttacaggcagaggcgcgcgaacgttctgcggaagcggaagcgcgcgctacccagatggtgtcgtccgctatcgcctccggcgacattcaggccatcaactactttgtcgcgcagaaatataccgatgcgctgcagcaaattggcgcggcgaacaacagtaaagtggtgctgatgccgctggatgccagcagcctgatgggctccatcgccgggatcagcgaactgattaaggaaggggctggcgcccagaaaaaatcatga

SEQ ID NO: 173126 - DNA, 681 bp, Klebsiella oxytoca
atgaccgaaagtaacgctattttgcgcctggagaacgtggggtttcaggccgatgatgtcaccatccttaatgagataagttttcagctcagggcaggggaatttaagctaattaccggcccttccgggtgcgggaaaagcaccttattaaaaataatcgcttcgctgctgagcccgacgtcgggaaaaattctcttcgcgggtaaagatatcaacacgttgacgccggaaacctatcgccagcaggtttcctactgcgcgcaaaccccggcgctgtttggcgattcggtgtatgacaatctgatcttcccgtggcagattcgtaataaacagcctgaacccaaagcgctggtcgccgatctgctgcgctttgggctggcggaaaatacgctggaaaagtcaatcaatgaactttcgggcggggaaaagcagcgcgtttcgttgatacgcaatctgcagtttttgccgcaggtgctgctgctggatgaaattaccagcgcgctggatgaaagcaataaaaccaatgtgaatgagattattcatcgctacaccagcgaaaaaaacatcgccgttctgtgggtcactcacgatagcaatgaaattgcccatgcggatgaagtgattacgctaaagcctgctggcggaagagcgcaggaggagaaaaaaaatgaacgggcataa

SEQ ID NO: 173127 - DNA, 783 bp, Klebsiella oxytoca
atgaacgggcataatattaccaatgagtcgctggcgttatctatggttctggtactggtagcgatcgtggttagctaccgggaaaagctggcgctggaaaaagagattatctggagcatttgtcgggcaatagtgcagctgattattgtcggctatgtgctgaaatatatctttaacgttaatcacgccgtgctgacgctgctgatggtgctgtttatctgctttaacgccgcgtggaatgcgaaaaagcgtagcaaatatatcgacaaagcctttgtctcctcgtttatcgcgataacgaccggcgctgggttaaccctggcggtgctggttgtttccggatcgattgcttttgtgccgatgcaggtgattccgattgccgggatggtagccggcaacgcgatggtggcggttggactttgctacaacaatatggggcagcgttttagcagcgagcagcagcagattcaggaaaagctgagcctgggcgcaacgccgaagatggcgtctgcaaggcttatacgcgatagcattcgcgccgcgctgatcccaacggtagattcggcgaaaacggtggggctggtgagcctgccggggatgatgtcggggctgattttcgccgggattgatccggtaaaagcgattaagtatcagattatggtgacgtttatgctgctatcgaccgccagcctgtcaacgatcatcgccgggtatctgacctatcggaagttcttcaatgcgcgccatcaactggtggtgacgcagctgaaaaaacgcgcgtga

SEQ ID NO: 173128 - DNA, 189 bp, Klebsiella oxytoca
atgataatcacccggctcgcgctgcgcgtagccgggctacaggatggctgttctcgtggcccggacaggcgcgttcagcgccgcatccgggaaaaaatctcacgcgcgttttttcagctgcgtcaccaccagttgatggcgcgcattgaagaacttccgataggtcagatacccggcgatgatcgttga

SEQ ID NO: 173129 - DNA, 855 bp, Klebsiella oxytoca
atgtccgcacagaatatcgtcaatattaccgaagctaatctacaccagacgctgcagcaatccgcgacaacgccggtgctgttttatttctggtccgcgcgcagccagcattgcgagcagctgacgccggtactggagagcctcgccacccagtacaacggcctgtttaccctcgctaaagttgactgcgatgccgaacaaatgctggcttcgcagtttggcctgcgcgctatccctacggtttacctgttccagaacggtcagccggtcgacggcttcgaaggcccgcagccggaagaagcggttcgcgcgctgctggataagttcctgccacgtgaagaggagctcaaagcgcagcaggcgctggcgctgatggaggaagagaactacgccgaagcgctgccgctgctgaaagacgcctggcagatgtcgaatcaggagagccagatcggcctgctgctggcggaaacgctgattgccctccatcgttccgatgaagcggaaacggtactgaaaaccgtgccgctgcaggatcaggatacccgctatcaggggctggtggcgcagatcgagctgctgaaaaaagccgccgacacgccggaaattcagcagctgcagcagcaggttgagcagaacccggaagatgcggcgctggcctcccagctggcattacagctgcatcaggtggggcgtaacgaagaagccctggcgctgctgttcagccatctgcaaaaagatttaggcgccggaaacggcgaggttcgcaaactgctgcaagagatcctttccgcactcggcaccggcgacgcgctggccgcgaagtaccgacgccagctctattctctgctttattaa

SEQ ID NO: 173130 - DNA, 771 bp, Klebsiella oxytoca
atgcaaaaatcggttttagttacaggatgttccagcggaattggtcttgaaagcgccctggatttaaagcgccagggctttaacgtgctggccgcctgccgcaaagcggaagatgtcgcacggatgcaggcgctggggctgaccggtgtgttgctggatcttgacgatccgcagagcgttgaacgtgccgccgccgaggtgattgccctgaccgacaaccgtctgtacggcctgtttaacaacgcgggctacggcgtctacggcccgctgccgaccgtcagccgccggcagatggagcagcagttttccgccaacttttttggcgctcatcagctaacgatgctactgcttccggccatggagccgcacggagaagggcgtatcgtgatgacctcatcggttatggggattatctccagcccgggccgcggcgcctatgccgccagcaaatatgcgctggaagcctggtccgatgcgctgcgtatggagctgcgccacagcggcattaaggtcagcctgattgagccgggccccatccgcacccgcttcaccaacaatgtcaaccagactcaggccgataagccggtggaaaatcccggtatcgccgcccgcttcacgctcggaccggaagcggtggtggaaaaagtgcgtcacgcttttgtcagcgataaaccgaaactacgctatccggtaaccctggtgacgcacgcggtcgccttgcttaagcggctgctgccgacccgcgcgatggacaaaattatccagggctga

SEQ ID NO: 173131 - DNA, 555 bp, Klebsiella oxytoca
atggcggccgacacgctgttggttctcggcgacagtctgagcgccggttatcgtatggcaggcaataccgcctggcctgcgctgctaaacgataagtggcagacaaaaacgccggtagttaacgccagtatcagcggcgatacctcgcagcaggggctggcaaggctgccggccctgcttaagcagcatcagccgcgctgggtgctggttgagctcggcggtaatgacgggctgcgcggtttcccgcctcagcagacggaacagacgctgcgtaccattattgagcatatcaaagcggcggacgcccagccgctactgatgcaaattcgcctgcccgccaactatggccgccgttataatgaagcctttagcgctatttatccggcactggccaaagagtttgatattcctctgctgcccttttttatggaagaggtttatctgaaaccgcagtggatgcaggatgatggaattcacccgaatcgcgacgctcagccgtttattgccgactggatggcgacgcgcctggctcccttagttaatcatgactcctga

SEQ ID NO: 173132 - DNA, 687 bp, Klebsiella oxytoca
atgccagcggaaaacatacttgaagttcatcatcttaagaaatccgtcggtcagggtgagcatcagctttccatccttaccggagttgagctggttgtcaaacaggggcagaccatcgccctgattggcgagtcggggtccggtaaatcgacgctgctggcgatcctcgccgggctggacgatggcagcagcggggaggtttcgctgctcggacaaccgctgcaccagatggacgaagaggcgcgggcgaagctgcgcgctaagcacgtcggctttgtgtttcaatcttttatgctgatacccaccctcaatgcgctggaaaatgtcgagcttccggcgctgctgcgcggcgaaagcgatagccagagccgcggcagcgcccgggcactgctggagcaactggggctgggtaagcgcctgcatcatctgccggtacagctttccggcggcgagcagcagcgggtcgcgctggcgcgcgcgttcaacggccgcccggagctgctgtttgccgatgaacccaccggcaatctcgaccgtcacaccggggataaaatcgctgacctgctgttttcgctgaaccgcgagcacggcaccacgctgatcctcgtcacccacgatccgctgctggcggcgcgctgcgaccgacggctgcggctggttgatggccagctgcgggaggaagcatga

SEQ ID NO: 173133 - DNA, 2418 bp, Klebsiella oxytoca
atgattgcccgctggttctggcgcgaatggcgctcgccgtcgctgctgatcgtctggctggcgctgagcctggcggtggcctgcgtgctggcgctgggctcgataagcgaccgcatggagaaaggacttagccagcaaagccgggaatttatggccggcgaccgcacgctgcgcagttcgcgcgacgtccctggcgcatggattgatgaagcgcgccgccttggtttaaccgtcggcgagcagctgagctttgccaccatgacgttttccggcgatacgccgcagctggcggatgtcaaagcggttgacgacacctatccgctatatggccagctgcaaactcagccgcccggactgaagccgcacgccggcaccgtgctgctggcgccgcgattaatggcgctgctgaatctgaaaaccggcgacaccatcgacgtgggcgacgccacgctgcgcattgccggcgaggtaatacaggagccggatgccggttttaatcctttccagatggcgccgcggctgatgatgaacaccgccgatgtggcgaaaaccggcgcggtgcagcccgggagccgcgtctcctggcgctataagtatgccggaaccccgcagcagctggcggactacgaaaagtggctgctgccgaagctggggcctgagcaccgctggattggcatagagcaggacgacagcgcgctgggtaaatcgctgcaacgttcgcagcagtttttgctgctgtcggcgctgttaacgctgctgttagcggtcgccgcggtggcggtggcgatgagccattactgccgcagtcgttacgatctggtggcgatcctcaaaaccctcggcgccggacgggcgcagctgcgcaaactgattgtcggccagtggttgatgctgctggcgctggcggtggtcgccggcggggcgatgggcgtcgggctggagcatattctgctggcgatgcttaagccggtgctcccggcggcgctgccggcggcgagcggctggccgtggctgtgggcgatcggcgcgatggtggtgatttccctgctggtcgggctgcgtccttatagactgctgctggcgacgctgccgctgcgggtgctgcgccaggacgtcgtcgccaacgtctggccgctgaagctctacatcccgatcgtgtgcgcggtggtggtgacgctgctggcgctgctgatgggcggcagccccctgctgtgggcggttctggcgggtgccgtagtgctggcgctgctgtgcggcctggcgggatggggcgtcctgtggttactgaagcgtttgacgttaaaagcgctgccgctgcgcctggcggtgaaccgtctgctgcgccagccgtggtcgaccctgagccagctggcggccttttcgctgtcgtttatgctgctggctctgctgctggtgctgcgcggcgatctgcttgaccgctggcagcagcagctgcctccagaaagtcctaactatttcctgattaacatcgcaccggagcaggtggtgccggtaaaaaccttcctcgccgagcatcagacccgcgccaccgagttctatcccatcgtgcgcgcccgcctgacgcaaattaacggccaggcaacggagggcaataaagatgaagccctgaaccgggagcttaacctcacctggagccgcgagcgtccggatcataatccgctggttgccggtagctggccgccaaaagcgggtgaggtgtcgattgaagaggggctggcgcagcgtctgggcgtcaagctcggcgatagcgtgacctttaccggggatactcaggactttagcgcgaaggtgtccagcgtgcgtaaagtcgactgggaaagtctgcggccgaacttcttctttatcttcccgcagggggcgctcgacggccagccgcaaagctggctgaccagcttccgctgggataatggcaacgggatgctcacgcagctcaaccgcgaattccccaccgtcagcctgctggatatcggcgcgattttgcagcagattggccaggtgctgacccaggtgagccgcgcgcttgaggtgatggtgattctggtcaccgcctgcggcgttttactgctgctggcgcaggtgcaggtcgggatgcgtcagcgttaccaggagctggtggtctggcgcacgctgggtgccggtaagtctctgctgcgcaccacgctgtgggcggagttcgcgctgctgggcgtggtatccggcgtcgtggcggcgattggtgcagaggttgcgctggcgctgctgcaaagcaaaatctttgacttcccgtggtctccggactggcgcctgtgggtgatgctgccgctgtgcggggcgatactgctgtcgctgtgcggcggctggctggggctgcgtctgctgaaaggtaaagcgctgttccgccagtttagccagggatag

SEQ ID NO: 173134 - DNA, 306 bp, Klebsiella oxytoca
atgtcgaaaaaactactgcagctgcactttgcttttaacggtcccttcggcagcgagatgtcccgtcagctcgtggagctggccgagtccatcaatcaggaaccagggtttatctggaaggtctggacagaaaacgaaaaaaatcaggaagcgggcgggatctacctttttgagaatgaagaaactgcgctcgcttacctcaacaagcacaccgcgcgcctcaaatcgcttggcgtaaacgaggttatctgtaaagttttcgacgttaatgagccgctcaccgcgctgaaccacggccatttgtaa

SEQ ID NO: 173135 - DNA, 1146 bp, Klebsiella oxytoca
atggcacataaaataaaagcgctggcgataacgatcggcgcagccctggcgttaacctcttttgcatcccaggcggaaattacgcttttaaaacaagatccgcaggcgggcgatccgttaagccggcttaattttaccgtcggcgggagtatccgtccccagttcaacatgatgtccggcgatggcgacaaaggctcatataaacgtaacggtttcgatggcggaacccgtttccgcttcgcggccgactactatctgtttgatgatattagctggatcagctattacgagctgggcgtcaatattccggcacttttcgactgggataaccactatgccgaaggcgcgaataacaccagccgccgtatgctctataccggcctgaaaagcgatatctgggggacgttaacctacggtcagcagaacagcgtttattacgacgtggtcggggtaaaaaccgatatctgggattatgacatgattggccaggcgccgggtaacggcattaacggcgactacgatggctcctatcgctcacgtaatatgctgaaatataagaaaaccgttggcgatgtcgatctctatgcctcttatctgtttgaggacagcgaatatctgccgggtaacggtctgcgctataaacgtaaaggcggcggttccatcggcgcggattaccacattatgaaagatctgacctggggcgccgcgtggaactatacccgcgccgatatgcgtaacccgtccagttctgacagcaaatcatacgatcagaatatcgtcggtaccgcgctaagctggacgccggataactggaccttctccttgggcggcggttggtatcagaacttcctgaccaccaaaaaaaccgatgtccataactacttcgcgggcgatgcctgggggattgagtactttgccggttataaattcccgattggtcagtatgcggtgaaatctattcagccatactttatgggcgaccgcctgcagtacgtgaacggccgcaactatcagcgtatcgataacggcgtcggcgtgagtttccagctggattatggtttccgcgttgactatgaacacgtcttcacgtcgagcaccgacaacctgggcgatatgaacctggtgcgtctgcgctacgacttctaa

SEQ ID NO: 173136 - DNA, 1083 bp, Klebsiella oxytoca
atgatggaattagtcccacaaaatattcggcagattcttgccagcgatacgccgctgattgacgtacgtgccccggttgaattcaggcaaagcgccatgcccgcagcgatcaacctgccgctgatgaacgatgacgagcgcgctgccgtcggtacctgctataagcgtcaagggccggaagccgctctcgcactgggccatcagctggtgaatggtaagattcgcgccggccgcctcgccgcctggaaagaggcctgcgcgcgttatccagaaggctacctgtgctgcgctcgcggcggccagcgttcgcatatcgtccagcagtggctgaaagaagctggcgtggattaccctctgatcgtcgggggctataaagcgctgcgccaggccgccatacagcttaccgaagagctggtacagcgccctatcgtgctgatcggcggctgtaccggcaatggcaaaactcagctggtctgcgctcaacctgacggtatcgatctcgaagggcttgcccatcaccgcggctcttcattcggtcgcaccctccaggagcagtatcagcaggctacctttgaaaatcatctggccgtggcgatgcttaaaaagtccgggcagcagacgcgctgggtgctggaggatgaggggcatatgatcggcgccaatcacctgccggagtgtatgcgtcttcgcatggcgcagtcgccgctggcggtggtggaagatccgtttgctatccgtcttgaacgactgcgggaagagtattttgcgcgcatgcatcgcgatttcctggcggcctacggcgaagaacaaggctggcaggcgtatagcgaatatctgcatcatggcctgttcgcaatccgccgccgcctcgggctacagcgttttgcccagctcaccgccaggcttgatgaagcgctgcttgaacagcagcaaaccaccgacaccgaagcgcatttcagctggctggttcccctgctgaatgagtattacgatccgatgtaccgctaccagctcggcaaaaaagcggagaaaattattttccgcggcagctggcaggaagttgccgcctggctggcggagtaa

SEQ ID NO: 173137 - DNA, 924 bp, Klebsiella oxytoca
atgctagaccccgaaacactacgtacctttgtcagcgtcgcggagaccggcagcttctccagagcagcggaaaaactctataaaacgaccgccacgattagctatcgcatcaaactgctggaagacaacaccggcgtcgcgctcttttcgcgcactacgcgcagcgtcctgctgactcctgccggaatgcatctcctggcgcaggccagagagtggctgggctggattgacagtatgcccggcgagctgcagcagattaacgacggcgtggagcgccaggtgaatattgtggtgaataacctgatgtatgaccctcaggccattgcgcggctgctggcctggctcacccagcgttacccttttacgcaatttcatttttcacgacaaatttacatgggcgtctgggatacgctcctgcacgatgacttttcgctggccatcggcgtcaccggcaccgaaccgttagcggagaatattgccgtcgccccgctgggtgaagtcacctggctgttcgtgatgtcgccgaatcatccgctaagccagcaaaccgaccccctgtcggaggcccagctacgccgctatcctgcggtcaacattgaagacagcgcgcggagattgaccaaacgtgttgcctggcgcctgccgggacaaaaagagatcgtggttcccgatatcgaaaccaaagtcgccgcccatatcgccggcgtcggcatcggctttttacccgagccgctgtgccagccgcttatcgcgcgcggcgagctggtttcccggcagataccgaccatgcgtcccccctctcctctgagcctcgcctggcgtaaagatcatcatggtaaagcggtgcaggatatcacctcgctattcggtcactccgccccggaaatccagggattcctgacgctattcagcgatacaccgtga

SEQ ID NO: 173138 - DNA, 150 bp, Klebsiella oxytoca
atgtaccggtcaattcatggccatctcaaagtggtatcaactataagttggaataattttccaaaacctgatttaagccacataattgagagggttattatgaaaaaatacttaaaaatcatgggcgaattattaaattacgaggaataa

SEQ ID NO: 173139 - DNA, 483 bp, Klebsiella oxytoca
atgaagctagaggtattgccgctgacgcgcgaagcattccgtccctatggggacgttatcgaaacggaagggcaggatttttttcatattaatgatggcaaagtgcagcgttttcacgatctggccatggtggagaccctgcagcaggatcgcacgctaatcagcattaatcgggcccagccggcggtattgccgattgtcgtcaccgagctggaacgtcatccgctgggcacccaggcgttcgtgccgatgaacggcgaagcctttgtggtggtggttgcgtcaggaggcgatgagccggacatgaccacgctgcgcgcgtttatctccaatggccgccagggggtaaattatcatcgcaatgtctggcatcacccgctgtttgcctggcagagcgaaaccgattttttaaccgtcgatcgcggtggaaaagataactgcgatgtcgtggagatcccgaccgtggagctgagctttgcgtga

SEQ ID NO: 173140 - DNA, 819 bp, Klebsiella oxytoca
atgacagaagtgagaaggcggggaaggccgggccagcaggagccttccgcgcaaaaaggcgcacaggcgctggagagagggatcgcgatactgcaataccttgaaaagagcggcggcagctcgtcggtcagcgatatttccctgaatctggacttaccgttatcgaccacttttcgcctgcttaaagtgctggagggcgcggattttgtctatcaggacgcgcagctaggctggtggcacatcgggcttggcgcattcaatgtcggctcggcgtacatccataaccgggatgttttatccgtcggcggaccttttatgcggcggctgatgctgatgtcaggggaaacggtaaacgtggcgattcgtaacggcaacgaagcggtgttgattggccagcaggagtgcaaatcgatggtaaggatgtgcgcgccgctcggcagccggctgccgctgcatgcttctggggccggaaaggcgctgctgtacccgctgtccccggatgagttggtggatgtgattgtgaagaccgggctgcagcgctttacgccatcgacgatcgtcgatttaccggtcctgcagcgaaacctggatgaggcgcgcgaccgcggctacagcattgaccaggaggagcacgtgacaggattaaactgtattgcttcagcggtttacgatgatgtcggatccgtagtggcggcaatttcgatttccgggccagcgtcccgcttaaccccggaccgttttgtcagccagggagagctggtgagggagacggcaaggaatatcagcaccgcgctgggactgaagccccaggcagagtga

SEQ ID NO: 173141 - DNA, 1782 bp, Klebsiella oxytoca
atggcaaaaatgagagccgtcgacgcggcaatgtatgtactcgaaaaagaagggattaccaccgcattcggcgtgcctggcgcagcgattaaccccttttattccgccatgcgtaagcacggcgggatccgccatattctggctcgccacgtggaaggcgcgtcccatatggccgaaggctatacgcgtgccgcagccggtaatatcggcgtatgcctggggacatcgggcccggcgggaacggatatgatcaccgcgctctattctgcctccgcggactcgataccgattttgtgcatcaccggccaggcgccgcgcgcgcgtctgcataaagaagatttccaggcggtcgatattgaatccattgctaagcccgtgaccaagatggcggttaccgtgcgcgaagcggcgctggtaccgggcgtgctgcagcaggctttccatctgatgcgttccggcagaccgggaccggtattgatcgacctgccttatgatgttcaggtggcggaaatcgaatttgaccccgagctgtacgcgccgctcccggcttataaacccgtggcgactcgtccgcagatcgaacgcgcgctggcgatgctgctgatggcggagcgtccggtgattgtcgccggcggcggggtgattaatgccgatgccgcagcgctgctgcagcaatttgctgagattacgcaagttccggtcatcccaacgctgatgggctggggctgtatcccggatgaccacgaattgatggccgggatggtcggcctacaaaccgcgcatcgctacggtaacgccacgctgctggcctccgacctggtattcggcatcggtaaccgctttgctaaccgtcataccggttccgttgagaagtacaccgcaggtcgcaaaatcatccacatcgatatcgaaccgacgcagattggccgcgtgctgtgcccggatttaggcattgtgtccgatgcgaaagcggcgctggctcaactggtagatatcgcgcagcagatgcaaaaagagggccgcctgccgcgtcgcgagcgctgggttgccgagtgtcaggagcgcaagcgtacgctgctgcgtaaaacccacttcgataacgtgccgatcaaaccgcagcgcgtttatgaagagatgaataaagcctttggtcgcgacgtgtgctacgtcaccaccatcgggctgtcgcaaatcgccgccgcgcagatgctgcacgtatttaaagatcgccactggatcaactgcggccaggccgggccgctgggctggacgcttcctgccgcgctgggcgtttgcaccgccgatccggagcgtaacgtggtggccatctccggcgactttgacttccagttcctgattgaagagctggcggtgggcgcgcagttcaatattccttacatccacgtgctggtaaacaacgcctatctgggcctgattcgtcagtcgcagcgcgcgttcgatatggattactgcgtccagctggcgttcgaaaacatcaactccagcgaagtgaacggctacggcgtcgatcacgtcaaggttgccgagggtctcggctgtaaagcgattcgcgtcttcaagccggaggatatcgcgcccgccctggcgcaggcgaaagtctggatgaaagagtatcgcgtaccggttgttgtggaagtgatccttgagcgggtcaccaatatctccatgggtagcgagctggataacgtgatggagtttgaagatgttgccgatagcgccatcgatgcgccaaccgaaacctgctttatgaaatatgaataa

SEQ ID NO: 173142 - DNA, 777 bp, Klebsiella oxytoca
atgttgcgcttttcagccaacctttcgatgttatttctggaatatgattttctggatcgttttgagaaagcggcggcctgcggttttcgcgccgttgagtttatgttcccgtatgattatgcgcccgaggtattaaagcaaaagctgagcgacaaccggctggagcataccttacataacttacccgccggcgactgggcggcgggagagcgcggcatagcctgtattcccggtcgcgaagcggaattccgcgaaggcgtggatgctgcaatccgctatgccaaagcgctgggcaatcgcaaaatcaactgcctggtgggtaaaaccccgcctggctaccgcgaggatcatattcgttccacgctggtggcgaatttacgttttgccgctgccgcactggcgcaggaaggtattctgctgctgatcgaaccgattaattacttcgatatgccgggcttttatctgaataccactcatcaggcgctggcgcttattgatgaggtcggcagcgataatctgaaaattcagtacgatatttaccatatgcagcggatggagggggagttaacccatacgatgcaaacttatgctaaccgtattggtcatttacagattgctgataatccgaatcgcggtgagccggggaccggtgaaattaattacgattatctttttaaatttattgatagatcaagctatgacggctgggtgggctgcgaatataaaccgctgaccaccaccgaagcgggtttgacatggtttaatcactaccgctaa

SEQ ID NO: 173143 - DNA, 879 bp, Klebsiella oxytoca
atgaaactgggatttattggtctgggtattatgggcaccccgatggcgctccgacttgccagggcaggccacgctctgcacgttactaccatcggcccggttgctgacgacctgcttaagcaaggcgcgcagcatctggctaccgccgagcaggttgcggcgcagtcggagattattttcatcatggttccggataccccacaggttgccgacgttctgtttggcgagcgcggctgcgccaaagcggcgctgaaggggaaaaccatcgtggatatgagctctatctcgccgattgaaaccaagcggtttgcgcagcaggtgcgcgacctgggcgcggattatctggatgctcctgtatccggcggcgaaatcggcgcgcgtgaaggcacgctctcaattatggtcggcggcgatgaaaacgtctttgcccgggtgaaaccgctgtttgatattctgggtaaaaacatcaccctcgtaggcggtaatggcgacggtcagacctgtaaagtcgccaatcagattatcgtcgcgctgaatattgaagcagtgtccgaggcgctggttttcgcgtctaaagccggagccgatcccgctcgcgtgcgtcaggcgctgatgggcggctttgcctcctcgcgtattctggaagtgcatggcgaaagaatgttgaaccggacgtttaatcccggctttaaaatttccctgcaccagaaggatcttaatctggcattgcagagcgcgaaagcactggcgcttaatttaccgaatacggcaatctgtcaggagttatttaacacttgtgccgccaacggtggtagtgaattagaccactcgtctttagttcaggcgctggaattaatggcgaatcataaaatatcgtaa

SEQ ID NO: 173144 - DNA, 1257 bp, Klebsiella oxytoca
atggatactatcaataaaacgggtatcgactattggaagaaaatagtcgtggtcatgagtctgggctgggtggcaatatggatttatcgtaccgtattaacacctatttatccggaaattcaggcgtccttaggtaacgtcagtaatgctgaaatcggcgcgattgccagcttctattttctggcctattgcggaatgcagatcccctgcggcattctggtcgataagctgggacaaaaaattatgctgatgtgcggtttctcgctgtttattattggtacgttgagtattgctaatgcgggaaacctgacgctgatttatatcggctcgctgctggccggcgctggctgcgcgtcgttttttagctccgcctattcgctctcctcggccaatgtgccgcaggaacgccgggcgctggcgaacgccatcatcaacagcggctccgccatcggcatggggattggcctgattggctcaagcattctggtcaaaagcatgcatatggcgtggcaaaatgtcttgtttatcgtcgccgcgatcctggtggtgatgctctgcgtgttcaccctggtgattcgccgcaagctaaaagagcccgccgtagcggagaataagcctggcgcagcgactgccgctccggtcgctgaagagaaatcggcgccgctgttttcgccgctgctgtgcagcgtctactttctctatttctgcacctgctacggctactacctgatcgtcacctggctgccttcttatcttcagaccgaacgcggctttgacggaggcgccattggttttgcttccgcgctggtggcggtggtcggggtgccgggcgcgctgttcttcagccatctctcggataagttccgcgacagtaaagtcaaagtgattctcgggctggagattgtcgctgcggcgatgctgatgtttaccgttctctcgccgaataccaccatgctgatgattagcctggtgctgtacggactgctgggcaaaatggccgtagacccgattcttatctcgttcgtttccgagcaggcgtcagcgaaaacattaggccgcgcctttagcttgtttaatttctttggcatgagttcggcggtggtcgcaccgacgctcaccggttttatttccgacctgaccggttcaaaagaaattagttttgtgatgtctgccgggttggttattaccggaacgatactgtttgcgctaattaccttgcgtaagaacaaaatacagtcaaagacaatcccagtataa

SEQ ID NO: 173145 - DNA, 1455 bp, Klebsiella oxytoca
atggaacaaactcaagacctgtacaaagccaggggttacagcgacgatctactgcccaaagtagcctcgcagcgtaactggaaaacatttaactattttaccttatggatgggctccgtacacaacgtgcctaattatgtaatggttggtggtttttttattctcgggctatcaacgtttagtataatgatggcgataatattgagtgcttttattattgccctggttatggtgtttaatggtgctgccggaagtaaatacggcgtccccttcgcaatgatattaagagcttcttatggtgtgcgtggggcattattacccggcctgctcagaggcggcattgcggcaattatgtggtttggtttgcaatgctatgccggctcgctggcattcctgatcttattaggcaaactgtggcccgagtttctgacgctcggcggtgattttaagctgctgggactgtcgttgccggggatgatcgcctttctggttttctggctgattaatgtggcgattggtttcggcggcggaaaagttctcaataaatttaccgcaatcctcaatccctgcatctatattgtcttcggcggcatggctatctgggctatctcgctggtcgggatcggtccgatccttgactatctgccgaccggggtggcgaaagcggagcataccggcttcctgttcctggtcgttatcaatgcggtcgttgccgtctgggccgcgccggcggtgagcgcctcggactttacccagaacgcgcgttcgtttcgcgagcaggccgttgggcaaacccttggcttagtggtggcctatattctgttcgcggtggccggagtgtgcattatcgccggtgccagtatccattacggtatggatacctggaacgtactggatattgtgcagaaatgggacagcctgtttgcctcgttctttgcggtgctggtgatattaatgaccacgatctccaccaacgccaccggtaatattattcctgcgggctatcaaattgcggcgattgctcccacgaaactgacctataaaaacggcgtgctgattgccagtattattagcctgctgatctgcccctggaaattaatggaaaatcaggacagtatttatctttttctcgatattatcggcggcatgctgggtccggttattggcgtaatgatggcgcactattttatcgtcatgcgtgggcaaattaatcttgatgaactttacaccgcgcctggagattataaatatttcgataatggatttaacgttaccgcattcctggtaacgattgtggcggttattttatcgctcggcggaaaatttatcccgctgctcgaaccgttctcccgcgtgtcgtggtttgttggtgttattgtcgcttttgccgcctacgccttgctgaaaaaacgggcccagccgaataacctggcgcgccccaatgctgtgaattga

SEQ ID NO: 173146 - DNA, 1362 bp, Klebsiella oxytoca
atgtcttttgatttaatcattaaaaacggcaccgtcattctggaaaacgaatcccgggtggtcgatatcgcggttgctgacggcaaaattgccgctatcggtgaaaacctgggggacgcgaagcagatcatggatgccacggggctgatcgtttcgccggggatggtcgatgcgcatacgcacatctctgagccgggtcgtacccactgggaaggatacgaaacgggtacccgcgcggcggcaaaagggggcatcactacgatgatcgaaatgccgctgaaccagctgccggccaccgtcgatcgagagaccattgagctgaaattcgacgccgcgaaaggcaagttgaccatcgatgccgcgcagcttggcggcctggtctcctataaccttgaccggctgcacgagctggatgaagtgggcgtggtggggttcaaatgcttcgtcgcgacctgcggcgatcgcgggattgacaatgacttccgcgacgttaacgactggcagttcttcaaaggcgtacaaaagctggccgagatgaagcagacggtactggtgcactgcgaaaacgcgctgatctgcgatgagctgggcgaagaggcgaaaagagaagggcgcgtgaccgcccatgattacgtcgcctcccgtccggtattcaccgaagttgaggcgatccgccgcgttctgtatctggcgaaggtcgccggttgccgcctgcacgtgtgccacgtcagcagcccggaaggggtcgccgaagtgacgcgcgcccgtcaggaaggtcaggatgtcacctgcgaatcctgcccgcattactttgtactggataccgaacagtttgaaaagattggcaccctggcgaaatgctctccgccgatccgcgacgcggaaaatcagaaagggctgtggcaaaagctattcaacggtgagatcgactgcctggtgtccgaccactctccgtgcccgccggaaatgaaggcgggcaatatcatgcaggcctggggcgggattgccggtttgcaaaactgtatggacgtcatgttcgatgaagcggtccagaagcgcggtatgcctttgccgcagtttgctcgcctgatggcgaccaacgccgcggatattttcggcctgaagcataagggtcgcatcgcgccgggcaaagacgctgacctggtgtttattcagccgaacagcagctacgttctgcaggcggaagaccttgaatatcgccataaagtcagcccttacgtcggccgtacgattggcgcgcggatcgccagaaccctcctgcgcggcgatgtgatctatgacatcgagcagggcttcccgcacgcgccgaaggggaaatttatccttaagcatcagcagtaa

SEQ ID NO: 173147 - DNA, 1308 bp, Klebsiella oxytoca
atggtggtatttccgctcaataaacgaaacaccctggcgggatttcaatggttcttctttattttctgcaacaccgtcgtggtaccgccgacattacagtctgcttttcagctgcccgccagcgcgctgattacgctgactcagtacggttttatcaccaccgggctggcctgcctggcgcaggcgctgctgggccatcgtcgggcgattatggaagggcctacgggactatggtggagcactatcctgaccgtcaccgtcggtgaagccgcgcgcggcactccatttgccagcattgcgtcaagcctggcggttggcatctctctgtcggcgatattcaccatcatcatcggcgtgagcggcatcggtcaccgcctggcgaagctcttcagcccgacggtcatggtcttttttatgctgctgctcggcgcgcagctcaccacgatcttttttaaaggcatgctcgggctgcctttcagttcgacccaggctaacgtgggcgttcagctggcgccgtttagcctggcgctggcggtgatgctgttggtgctggggatgatcatttttcttccggacggcattgctcgctatgccctgctgtttggcaccctcgtaggctgggctggctggtacctgctgtttcgcactccgcccgccacgatggcatccgggccgattcactggcagtggtttccacttggctacggcggggagttacgccccggcattattttgacggcgctgctggcggggctggtgaatattacgaatacctacggcgcaattcgcggtagcgacgttttttatccccagcagggcgccagcaatacccgctaccgacgaagctttattatctccggcctgatgaccttaataacggttccgctcagcgtggtgccgttttcgccttttgtttcatcgataggtttattaacccaaactggagagacttcgcgccagccgtttattatcggctgcctgtgctgtctgctggtgggactatttacgccgctgacccacttttttaccacgctgcctttgccgattagcagcgcggtcatgctggtctcctatcttccgttgttatattccagcttatctttcagtaaacaaatcaccttcaccgcacgaaatatctaccggctggcgctgccgttatttatcggcatctttttaatgggcctgccgccggtctatctccagacgctgcccctgacaattcgaccgctattaggcaacggcttattaatcggcgtgctgctggcggtggtgatggaaaatctcattccctgggatcgtattaagtaa

SEQ ID NO: 173148 - DNA, 1146 bp, Klebsiella oxytoca
atgaaaataattattgcaccggactctttcaaagaaagcgtaagcgccagccgctgcgcccaggcgattaaggcgggctttacctctattttcccgcaggcggagtgcatctgtctgccgatcgccgacggcggcgaggggacggtggaggcaatggttgaggccaccgagggtaaaatggtgatgctgccggtcatggggccgatgggcgattttgtcggcgccttctatggcctgagcggcgacggacacaccgcgtttattgagatggcggcggccagcggactcatgctggttccccccgacgaacgcaaccccctgcaggccaccagctacggcaccggtgagctgattcgccatgcgctggacgccggcgtccgtcacataattctcggtattggcggcagcgccacggtggacggcggaatggggatggctcaggcgctgggagcacgctttgttgatgaacgcggcgagagcgtcggcctcggcggcggagcgttagagcggctggtcaacgttgatttacgcgatctcgacccgcgacttcgcgagtgccggattgacgtagcctgcgatgtggataatccgctactcggcgaacgcggcgcggcggcggtctttggcccgcaaaaaggggcctgcgcaggcatggtcgccgttctggagcgcggtttagaaaattacgctcaggtgctgctgacggcaaccggtcaggatgtgacggcgatggtcggcggcggcgcggccggcgggatgggcgcggcggctcgagtattccttaacgccacgctgaaatcgggcatcgatattgtgctggaggcggttcatctggaggaggcgctgcgcgatgcggacctggtgatcaccggcgaagggcgtatggattcgcaaaccgtcggcggcaaagcgccggttggcgtggcgcggatcgccaaaaagcacggcattccggttatcggcatcgccggcgtgctgggtgacggcgtcgaagcggtgcatcagcatggtattgatgcggtctttagcatccttcccgcgctggcgccgctggccgaggtgctggatcgcggcgagcagaatctttacgcctgcgcgcgcaatatcgcctgcgccatcaagcttggccagacgctgcctgcctga

SEQ ID NO: 173149 - DNA, 783 bp, Klebsiella oxytoca
atgggttatttaaataatgtgcttggctatcgcgatgatttactggccagccgttccatcgtgcgccacggcaattacgcgctgctgacgccggacggtctggtcaagaacgttattccgggttttgaacattgcgatgtgactattttgtcaacgccgaaattaggcgccacctttgttgattatctggtcacgctgcatgaaaacggcggtcatcaaagcggttttggcggcgaaggcatcgaaaccttcctgtatgtgattaagggagaaatcatcgccggggctcagggtaaatccttcgcgctggccgaaggcggttatctttactgcccgccgggtgagcggatgactttcagtaataaccattcagccgatagccagcttttcctctataagcgccgctatattccgacagagggccatgcgccttatctggtcaccggcaacgtcagccagctggagcgtattcattatgaaggaatggaagacgttattctgatcgatttcctgccaaaagagctgggcttcgatatgaatatgcatattctctctttcgcaccgggggccagccacggctacattgaaacccacgtccaggagcatggcgcctatattctctccggccagggagtgtataacctcgacaacagctgggttccggtcaagcaaggcgattatatctttatgggcgcttactccctgcaggcgggatacggcgtcggacgggaaacgttcagctacatctattcaaaagactgcaaccgcgacgttgagatctga

SEQ ID NO: 173150 - DNA, 1236 bp, Klebsiella oxytoca
atggctcattattttcgacaggcaatagaagagacattgccctggctttcctctttcggcgccgacccgaccgggggcataacccgcctgctctattcgccagaatggctgcaggcgcagcaggcattcaaacaaagaatgagcgaaagcggactggaaacgcgctttgatgaagtgggcaatctctatggtcgcctgcccggcacgcgctttcccgatgaggttatcctcagcggttcgcatattgatagcgtcgttaacggcggcaatcttgacggccagttcggcgcgctggcggcctggctggcggttcgctggctaaaagagacctacggggcgccgctgcgcaccgtggaagtgctggcgttagcggaagaagaaggtagccgcttcccttacgtcttctggggcagcaaaaatatcgtcggcatcgctaatccagcggacgtacgcgaaattaaagacgctaaaggcgtggcgtttatcgatgccatgaagcagtgcggtttcagcctacctgccgctccgctggcgccgcgccgggatattaaagccttcgtagagctgcatattgagcagggtcgcgtgctggaaaccaacaagcagtctatcggcgtggtcaacgccatagtcggacagcgtcgctacaccatcaccctcaccggcgagtctaaccatgccggcacgacgccaatgggctaccgtcgcgataccgtccacgcctttagccgtatctgctgcgaatctatcgccaaagcaaaagcccacggtgacccgctggtgctcaccttcggtaaagtcgacccgcagccgaataccgtcaacgtggtgccgggcaaaaccgtcttcactatggactgccgccataccgatgctctggagttaacggcatttactgaggtcattgaggccgatatgcggcggatctgtcaggagatggatatcggcattgagatcgacctgtggatggatgaggctccggttcccatggataagaagctggtggcccagctcaccgcgctttgtgaaaaagagaaggtgaatttccgcgtgatgcacagcggcgcgggacacgacgcgcagatattcgctccctgcttcccgacctgcatgatctttatgccgagcatcaaaggcatcagccataacccggcggaaagcacgcatatcgaggatctggcggaaggcgtaaaaacgctcgccttaatgttgcatcaactggcctggactgaataa

SEQ ID NO: 173151 - DNA, 1050 bp, Klebsiella oxytoca
atgaaagtcagtcgggaaacacttcatcagcttattgccaataagctgaatacagcagggcttactcgcaatcatgcggatatcattgccgatgtactggtttatgccgatgccaggggtattcattcgcacggcgcggttcgcgttgaatattatgcggaacgtatttcaaaaggcggaaccaatcgtcatcccaccttcacctttgaaaagaacggcccctgcagcggtattttgcatgccgataatgccgccggtcaggtggccgccaaaatgggcatggagcacgcgatagaattggccagggaaaacggcgtggccgtggtcggcatccggcgtatgggccacagcggagcgatctcttacttcacccggcaggccgcccgcgccgggctaatcgggatttcgctgtgccagtcagacccgatggtcgtgccttttggcggggcggaaatctattacggaaccaacccgctggcctttgccgcgcccggcgagggcgatgatatcatcaccttcgacatggccaccacggtgcaggcatgggggaaaattctcgacgcccgctcgcgccatgaaaccattcccgatagctgggcggtggataaaaacggcgcgccgacccgcgatccttttgccgttcacgccctgcttccggcagccggcccgaaaggctacggcctgatgatgatgatcgacgtcctctccggcattttgctcaatctccccttcggccgccaggtcagctctatgtacgacaacctgagccagggacgcgagctgggccagctgcatatcgtcatcaacccggcatttttctcctccagcgcgctattccgccagcatatcagcgacaccatgcgtgaattaaacgccattacgccagcgcccggatttaaccaagtgtattaccccgggcagaacctggatatcaatgagaaaaacagcgccgtcaacggtatcgagatcgttgatgagatttatgactatctggtttcggacgctttatataaccgctcttatgaaaccaattccccgtttgctcaataa

SEQ ID NO: 173152 - DNA, 1668 bp, Klebsiella oxytoca
atgatccatgcctttattaaaaagggctgtttccaggattcggtcagcttaatgattatttcacgcaagctgagcgagtcggaaaatgtcgatgatgtttcagtcatgatgggcacaccggcaaataaatcgctgttggaaacgaccgggttctggcacgacgattttgccagcgcgacgccaaatgacatttgcgtggcgatccgcaccgattgcgcggatgcgtcggttacgcaaatgatcgccgcccgtcttgatgaggcccttaccgccctggcgcaggggagcgggcaaagtcagagcctgagcgtggttcgccgctggcaaagcgcaacgcagaagctaccgcaggccaatatggccttaatttccgttgccggggagtacgctgcggagcttgcccatcaggcgctcagcagcgagaaaaacgtcatgctcttctccgacaacgtcatgctggaagatgaaatcgcgctcaaaacccgcgcccgcgacaaagggctgctggtcatggggccggactgcggcaccgccatgattgccggcacgccgctggctttcgccaacgttacgccggaaggcaacatcggcgttattggcgcgtccggcaccggtattcaggagctggtctcgcagattgtcctcggcggcgaagggatcagccatgcgatcggtctcggcggccgcgatctgagcgccgaagtgggcggcatcagcgcgcaaacggcgctggaaatgctgacccaggatgcgcagagccaggtgctggcctttgtttctaaacctcccgccgaagcggtgcgtctgaagatcatcgccgccatgaagcgcagcgcgaaaccggtggtggcgctatttctcggctatacgccgccgatcgcccgcgatgaaaacgtctggttcgcccgcacgcttgacgaggccgggcgtctggcctgcctgctggcgcgagtggggcggcgtcaggcaagccttcccgcggtggcgggcaagcagattcgcggcttatacaccggcggtacgctggctgctgaatccgcaggattgctggcagaacggctgaacattacccctgatgcgcatcacccgcagggcatgatgctcaacgcgcaggggcaccgggtcgtcgatcttggcgacgatttttacaccgtcggccgtccgcatccgatgatcgacccctccctgcgcaaccagctgattgccgaacttggcgcggaaactcaggttggcgtactactgctggacgtggtgattggctacggcgccaccgccgatccggccggctcgctggtcgaagcatgccagcgggcgtgggcgaccagagccgacgatagtccgctgcacgttatcgcgacggtgaccggaaccgaaagcgatccgcagtgccgctcccgtcagatttcagtccttgaagatgcggggatcgccgtggtcgatagcctgcctgaagccaccttgcttgccgccgcgctgattagcccgccgcggaaagccgctcctgccccgcgcgccggcctgctggacggcgtgtcggtgattaatgctggcctgcgcagctttgcgctcgatttacagaccgccggaacgccggttgttcactatcagtgggcgccgattgccggtgggaataagaaactggctcgtttattagaacgtttgcaataa

SEQ ID NO: 173153 - DNA, 1260 bp, Klebsiella oxytoca
atgtttacatcagtggcgcaggccaatgacgcagtaatagaacgaattcgtaatgcacgtccgcactggctggatgtgaagccggcgggttctttaatcggggcgctgaatcaaaacaaaacgctgctccacgccgggccgccgatgcgctggcaggagatgaccggtccgatgaaaggggcctgcattggggcctgcctgttcgaaggctgggcgcaggatgagaaaacggcccacgcgatgctggaaaacggcgagattacctttattccctgccaccacgttaatgccgtagggccgatgggtggtattacttcgccgaatatgccgatgctggtcgtggagaacatcgccgaaggtaaccgcgcgtattgcaacctgaacgaaggcattggcaaggtgatgcgtttcggtgcctacggcgaagatgtgcagcagcgcctgcgctggatgcgcgatgtgctgatgcccgttctcagtgcggcgctgaaacagatgacgcgcggcattgatctcaccgcgatgatggcgcagggcatcaccatgggcgatgagttccaccagcgcaatatcgccacctccgcgctgctgatgcgcacgctggcaccgcatctggcgcgactcgaccacgacaaacaacagatcgccgaagtgatggattttctcgccatcaccgatcagttcttcctcaacctggcgatggcctactgcaaatcagcgatggatgctggggcgcagatccgcgccggcagtattgtcaccgcgatgacccgcaacggcgatatgttcggtattcgcgttagcggactgggcgaccgctggtttaccgcaccggtgaatacgccgcaggggctgttctttactggtttctctcaggaacaggccaacccggatatgggcgacagcgccattaccgaaaccttcggcatcggcggcgcggcgatgattgcggcgccgggggtgacccgctttgtcggcgctggcggaatggaggcggcaaaatccgtttcggaggagatggcggaaatcttccttgagcgcaatatgcagctgcagattcctggctgggatttccagggcgcctgtcttggactggatattcgccgggtggttgaaaccggcattacgccgctcattaacaccgggatcgcccataaagaagcggggatcggccagattggcgccggaaccgtcagagcgccgctggcctgtttcgagcaggcgctggaagcgctggcggacgaactgggcgtgagctga

SEQ ID NO: 173154 - DNA, 804 bp, Klebsiella oxytoca
atggagaggattcgtccgctgataggcagcgtcgatgcgccggatcatcgccaaccgtggcgaaccggcggcctctggcggcgcaccattaacctctatgttgtaggcggcgcgctgctgacgctgcatcatcgggggcagggcgtgagccccggcggatgggttgttcgtcatcgcgattttatccggctgcacgcggcgctgcggacgggggcgtcgccgatagcgcggaatgacggtattcaggtcggcgatcttttgctgatgccgccgcgcaggcgctgctccctgcggctccgctgtcaatccgtaagcgcttatctctcgccagcgctgatgagtcgaccggaggagaccgggctgttcgggccgctgtcgcaggctatcgaactgcggcagcatcccgagctgcgccagcttcgccactgttttgcctccgcgctggccggcaacgccgtcgactggcggctgtggctgggcaaggggccgggcctgacgcccagcctggacgacatgctgatcggcatgatgctggcggcgtggcgctcggggcgcatgtcaccctgcggcggaaaggcattttttcgcgcctccggcgatctgcgcgcggccaccactcaggtgagcgtcaactatttacgctacgccagcgaggggcgcttcgcttcgccgctgatgcattttgcctgcgccctgcaacgtggacgacgtctcgagcccgccgtcgaagcgctgctggcgatggggcatacctccggcgccgacacgcttctgggattctggctggcgcaacatcttatctaa

SEQ ID NO: 173155 - DNA, 894 bp, Klebsiella oxytoca
atgaaaacgctggttgttgcccttggcggcaacgctttattacagcgcggggaagcgctgaccgtagaaaatcagtatcgcaatatcgatagcgcggttcccgcgctggcgcgtctggcgcagacgtatcggctggccattgtgcacggcaacgggccgcaggtgggtctgctggcgctgcaaaatctggcctacggcgacgttgagccctatccgctggacgtgctggtcgcggagagccagggcatgattggctatatgctggcccagcgcctggcgcaggaatcactcatgccgccggtatcgacggtgatgacccgcattacagtctcgtcaaacgatccggccttttcggcgccggagaagtttattggtccggtttacgatccggagctgcaaaaacggctggaagatgagtacggctggaggatgaagcgcgacggtaaatatgtgcgtcgggtggttccttcgccgacaccggtgaggattgaggagagcgagtcgattgagcgtctgctgggtgaggggcacgtggtgatatgctgcggcggcggcggaattccggtgcttgagagcgggcagggcgcagaggcggtgattgataaagacctcgctgccgcgctgctggcggagcagattgatgccgatggcctggcgatcctgaccgacgcggatgcggtatatgaacattggggcacccccatgcagcgaccgatccgcgaagcgacgccggaagagctggcgccttttgcccgcgacgacggcgcgatggggccgaaaatcgcggcggtaagcggctacgtgcgccgtcggggcaagcgggcgtggattggggcgctgtcgcgtatcgatgacacccttgccgggctggcgggaacctgcattaagccctga

SEQ ID NO: 173156 - DNA, 1068 bp, Klebsiella oxytoca
atgaaacaagtttgcgttctcggtaacggccagctaggccgaatgctgcgccaggctggcgaaccgctgggtattgcggtctggccggtcggtctcgaagccgacccggaagcagtgccggtacagcaaagcgtgattaccgcagagattgaacgctggccggaaacggcgctgacccgcgagctggcgcgtcattccgccttcgtcaaccgcgacgtttttccggttatcgccgaccgtctgacgcaaaagcagctgttcgataagctagagctcgctaccgcgccgtggcagcttctggcggagaaaagcgaatggccgacggtattcgcccgtctcggcgagctggctatcgttaagcgccgcgtcggcggctatgatggccgcggtcagtggcgtttgcgggaaaatgaaaccgcgcagctgccggatgataactacggcgagtgtatcgttgagcaggggattaacttctccgccgaagtgtcgctggtcggcgcacgcgcccgggacggcagcacggtcttctatccgctgacccgcaacctgcatcaggacggtattttacgcgccagcgtcgcctttccgcaggccaacgcccgccagcaggcgcaggccgaacagatgctgtcggcgatcatgaatgagctgggctacgttggcgtgatggcgatggagtgttttgtcaccgctgatggtctgctgattaacgaactggcgccgcgcgtgcacaatagcggccactggacgcagaacggcgcgtccatcagccagtttgagcttcatctgcgggcgattaccgatctgccgctgccgccgccggtggtcaacagcccgtcggtgatgatcaacctgatcggtaccgatctcaactatgactggctgaagctaccgctggtgcatctgcactggtacgacaaagaggtgcgtccgggacgtaaagtcggccacctgaacctgaccgacagcgataccgatcgcctgagcgcgacgctggaagcgctgaagccgctgctgccgccggaatacgccagcggtgtattctgggcgcaggcgcagctggcgtaa

SEQ ID NO: 173157 - DNA, 510 bp, Klebsiella oxytoca
atgtcttcccgcaataattcggcgcgtatcgccatcgtgatggggtccaaaagcgactgggctaccatgcagtttaccgcagaaatccttgatgccctgaacgttccgtaccatgtcgaagtggtttccgcccaccgcacccccgataaactgttcagcttcgccgaaggcgcgcaagacaatggttttcaggtgattattgccggtgcgggcggcgcggcgcatctgccgggcatgattgcggcgaaaacgctggtgccggtgttgggcgtgccggtgcagagcgcagcgctgagcggcgtagacagcctctactccatcgttcagatgccgcgcggtatcccggttggtacgcttgctatcggtaaagccggtgccgccaacgctgccctgctggcggcgcagatcctcgcccagcacgatgcggaactgcaccagcgcctcagcgcctggcgccaggcgcaaaccgatgaagtgctggataacccggatccgcggggtgcggcatga

SEQ ID NO: 173158 - DNA, 330 bp, Klebsiella oxytoca
atgcaaaaatggagtcagcccctaatctggggcatggttatcgccgtcatcggcccgattaccgccagctattttggcctggtgtttatctacttcggttcgctgaccgtgctgggaatcgcagcgctactttggatcctctatttttacgcgatttatctgctttgtacgcggccgcacgatgagcgctttgtgcaaatctacatgctggtcatgagcattcttatgctgccctggggagtggtgctggtttttaccttttttgccagcgcgaccaccgcccataaccggcgcgttgcccccagtcacgacgagacaaaagagggctag

SEQ ID NO: 173159 - DNA, 723 bp, Klebsiella oxytoca
gtggcgacactttttattgcggatttacatctgcaaacggaagaaccggcgattaccgccggttttctgcgctttttacagggggaagcccgcaaggcggacgccctgtatatcctcggcgacctgtttgaagcctggatcggcgatgacgatcccaacccgctgcatcggcaaattgcttcagcgctgaaagcgctggccgattccggcgtcccctgctacttccttcacggcaaccgcgattttctcgtcggtcagcgctttgcccgcgaaagcgccatgaccctgctgccggaagagaagcttctcgacctctacgggcgcaaggtgctgattatgcacggcgacaccctctgcaccgacgatgccggctatctggcgtttcgcgcgaaagtgcacaatccctggatccaacgcctgtttctggccctaccgctgtttatccgccgccgtatcgctgccagaatgcgcgccgacagcaaagcggccaacagcagcaagtcgatggaaattatggatgtgaatccacaggcggtcgttgacgttatggaaaaacatcacgttcaatggctgattcacgggcatacgcaccgtcctgccgtccatccgctagaagccaacggtcaatccgcatatcgcgtggttctgggcgcatggcatcacgaaggctccatggtcaaagtgacggccgaaaaggtcgaactgattcagttccccttctga

SEQ ID NO: 173160 - DNA, 495 bp, Klebsiella oxytoca
atggttactttccacaccaatcatggcgatatcgtaatcaagacgtttgacgacaaagcgccggaaacagttaaaaacttcctggactactgtcgtgaaggtttctacgacaacaccattttccaccgtgtcatcaacggttttatgattcagggcggcggttttgagccgggcatgaatcagaaaaccaccaaatctcctattcagaacgaagctaacaacggtctgaaaaacacccgcggcaccctggcgatggcccgtactcaggcgcctcactccgccaccgcgcagttcttcatcaacgtcgccgataacgacttcctgaacttctccggcgaaagcctgcagggttggggctactgcgtattcgcagaagtcgttgagggtatggacgtggtcgacaaaatcaaagcggtcgccaccggccgcagcggcatgcatcaggatgtgccgaaagaagatgttgtgatcaaaagcgtcaccgtcagcgaataa

SEQ ID NO: 173161 - DNA, 1386 bp, Klebsiella oxytoca
atgttaaaaatttttaatacactgacgcgccaaaaagaagaatttaaacctatccatgccggggaagttggcatgtacgtgtgtggtattaccgtttacgacctctgtcacatcggccatggccgtaccttcgtctccttcgacgtggttgcgcgttatctgcgttttttaggctacaagctaaagtatgtgcgcaacatcaccgacattgacgacaaaatcatcaagcgtgccaatgaaaacggcgagagctttgttgcgctggtggaccgcatgattgccgagatgcacaaagacttcgacgcgctgaatatcctgcgcccggatatggagccgcgagcgactcatcacattgcggaaattattgagattaccgagcagctgatcgctaaaggccacgcgtatgttgccgacaacggcgacgttatgttcgatgtcccaaccgatccgaactatggccagctgtcgcgtcaggatctcgaccagctgcaggccggcgcgcgcgttgatgtcgttgacgtcaagcataatccaatggactttgtgctgtggaaaatgtcgaaagagggcgagccaagctggccgtcgccgtggggcgcgggccgtccaggctggcacattgagtgttcagcgatgaactgcaaacagctgggcaaccattttgatattcacggcggtggttcggatctgatgtttccgcaccatgaaaacgaaatcgcccagtccacctgcgcccacgacggcgagtacgtgaactactggatgcactccgggatggtgatggttgaccgcgagaagatgtcaaaatcgctgggcaacttctttaccgtgcgcgacgtcctgaagttctatgacgcggaaaccattcgctacttcctgatgtccggccactatcgcagtcagctgaactacagcgaagagaacttaaaacaggcgcgttccgcgctggagcgtctgtataccgcgctgcgcggaaccgataaaaccgcagcgccggccggcggcgaagcgtttgaagcgcgcttcattgaagcgatggacgacgattttaatactccggaggcttattccgtgctgtttgatatggcgcgtgaggttaaccgcctgaaaaccgaagatgccgccgcggccaacgcgatggcggcgcatatgcgtaagctctctgcggtgctcggtctgctcgaacaggagccggatgccttcctgcagagcggcgcgcaggcggacgacggggaagtggcggaaatcgagtctttgattcagcaacgtctggacgcgcgtaaagcgaaagattgggcggcggcggatgccgcgcgtgaccgtctcaatgagatgggcatcgtgctggaagatggcccgcagggtaccacctggcgccgtaagtag

SEQ ID NO: 173162 - DNA, 213 bp, Klebsiella oxytoca
atggcgaatttttctttaggcaaacacccgcacgttgaactgtgcgatctgctgaagctggaaggctggagcgaaagcggcgcgcaggctaaaatcgctatcgccgacggtctggtcaaagtcgacggtgcggtggaaacccgtaaacgctgtaaaatcgtcgccggtcagacggtcagctttgaaggtcagagcgttaccgttaccgagtaa

SEQ ID NO: 173163 - DNA, 867 bp, Klebsiella oxytoca
atggcagcaaaaattattgacggtaaaacgattgcgcagcaggtacgctctgaggttgcggaaaaagtgaaggctcgcgtggcggccggatttcgagcaccaggcctggccgtcgtgctggtcggcagcaacccggcatcgcagatttatgtcggcagcaagcgcaaagcgtgtgaagaggtaggcttcgtctcccgctcgtacgatctcccggaaaccaccagcgaagcagagctgctggaacttatcgacaccctgaatgcggatagcgctatcgacggcatcctggttcagctgccgctgcccgccggcattgataatgtcaaagtgctggagcgcatttcgccggacaaagacgttgacggtttccacccgtataacgttggccgcctgtgccagcgcgccccgcgcctgcgtccatgcacgccgcgcgggatcgtcacgctgctcgagcgttacaacattgatacctacggcctgaacgcggtggtcattggcgcctccaacatcgtcggacgcccgatgagcatggagctgctgctggcaggctgtactaccaccgtaacccaccgttttaccaaaaacctgcgtcatcacgttgaaaacgccgacctgctgattgtggctgtaggtaaaccgggctttattccgggcgagtggattaaagaaggcgcgatcgtgatcgatgtcgggattaaccgcctggaaagcggcaaagtggttggcgatgtcgtttatgaagatgccgccgcgcgcgcgtcgtacattacgccggttcccggcggcgtcggcccgatgaccgtagccacgctcattcagaacacgctgcaggcgtgtgaagagtatcacgatattcaggaggcctga

SEQ ID NO: 173164 - DNA, 684 bp, Klebsiella oxytoca
atggcccgcaatcatgttctcttcacctcactttcgcgccgtaaacgtcggagcgcgactctcaaaatcaaaaatcttatctacaaagagcgtgctgtctggggcggcgtcttctatgacgaatgcgaacatgatgcggcagttgccagcgggggctggacctggagcgatatagtttttctcggtcgtgacccagccgttttctggaatgcggagatcatcacggcgaatgtggcttttagcgatgagatagaagaggctgctttcaatgaggcgctattgcggcttgacgctgccagccagcgtcaggcaatgcatctcgatttcataccagatattaatcgcgatggaaaaacgattagctatacatggggacgaaagcctcaacggaatgactcgcagcttgagggattatccataagtgattttgccgataaacgtgcgcgagaaattgcgcgtactaatccaccgccagtttattgcggttaccgcatattgccgggctacgcagcaggaatcggcttgaaaatggtggttgacgctgaagtgctcagtcggagtgtaattgaaagcgctattgctgattttctcgctcgcggagaacaaaactggttttctgacgtgcctgcccttgtccactacattgacaatatctactgcaaaccgcttaacgaggcatcctga

SEQ ID NO: 173165 - DNA, 219 bp, Klebsiella oxytoca
atggcaagaacccgtgcggaacgacgccatcacatgcgtcgcatgaggcataaacggcgaaacgacaacgctgtgcgtaacggcagtccaaaagatcaggggcgccactataccactccatgttgttgttcctgttggatgtgtgggcacaagcgtgactggtacggaccaggcatacaggagcagcgcgcgcaggcaaaatataaggaggacatatga

SEQ ID NO: 173166 - DNA, 291 bp, Klebsiella oxytoca
atgtctgtttttaattcacgaagagaccgcgatcgtaacggtaaacccaaaccacattgccatgttggctatccagggttcgaaggaaagatgatgcaccatcgtcatcgcgcttcctggctttggcccgactttaacacttgtcattgcccgtcgacctggacgcgtatgtttatgaccagaccccgtcgggcgaaggagttcgtagcgctccggcgaatcatgaaaggaggcgatcctgacgggatcttatttcctcatcgctccaggccctacgtgtactattactga

SEQ ID NO: 173167 - DNA, 708 bp, Klebsiella oxytoca
atgactgcacatattaatgccaaatccggcgattttgcttcaactgttattatgcctggcgatcccttgcgcgctaaatttatcgctgaaaattatctgctggactatcgggaagtgacgaacgttcgcaatatgctgggatacacaggttattatttcgggcagcctgtatcggtgatgggacatggaatgggaataccatcaatgacgctttatgcccatgaactggttaatgactttggcgttaagagaatcattcgcgtaggcagcctgggggcgactcagcagcatgttaaaatgcgtgacattatattggctgttgccgccggaacagattctatcaccaacctgaaacgcagttcaggttattcaatggcgacatccgctgattttaaactgttgcatcaggcatggttgattgcgcaaaaaagtggcattgatataaaagttggcaacgtctttagcggcgatctctattacgacccggatgaaaatctgatccctgcgctggagaagtttggagtgctggggattgatatggaagttgccggtctttatgccttagctcatcagtttgcaattgaagctcttgccattttaacggtctccgatcattgcctcaccggagaagagaccacagctgaagagcggcagttaactttcaataatatgatcgagctggctctgaatacggcgattacagcttag

SEQ ID NO: 173168 - DNA, 1164 bp, Klebsiella oxytoca
atgaaaaataaactctcacttaccctaattagctttctggcgaactttattatggcggggtttgccagccagtttggcatgctgattgagcccattgcagagcattataatgcggatatcaacgcggttgcgtctattttctctttactcaacggaggagccctggcagggacgatagcggcatttttccttattgaaaaaatcggcgtaaaacgcatgacgctgatgatctactccgtggttttcctttgcgcgctggcgatgcatgtaagcagtgaactgtggtctgttatggtggcgatgaccctggtggggctctgcggcggcattggcctgtgcgtagcgggtaccatcgtggtttccgtttggcaggaccgtatccagagcacgatgctggtggtccaggatgccaccttcaacgttgcgggcgtgatcttcccgctgatcaccacctttgccctgacgcacaacatgtcatggagctacagttacctgagcgtcggtatggtggcgcttgtcacgctggggattgtggccctgacccgcttcaatgcctgtgaagcagcgccctcttcgggcccctcagacgcggtaaaatccgaatggaaccctggaattatcagcggcgggattggcctgtttcttggcatgctggcgctttataccttcctgacatgggcgccgctgtttgtgaaaaacaaatttggcattccctttgaagaggctggaaacatcattactcaatattggggagctgcgctggtgggggcattagtttcaaccggtattgtcgcccgggtgaagatacactattttttgttgagcattattttactggcctgcgtcattacgacgattatcgtcactaaagaaacgctttctggcttagattacctggcttacagctatggctttgtatgtgcagcgctttacaactcgtttattgcctatggcgtatcctttgttaaacgcgccagcagtcaaaatgtatcttatatattaattagcggaagcgcgggcgccatgtttagcccggcgatcagcgcgttaatggaaaaaacgatgggactgcagaaaatcatgtatgcgatacctgttttatatttcattatttttgtcatgctggtggctacccttaaattaaaacgtaaagtagtacaataa

SEQ ID NO: 173169 - DNA, 822 bp, Klebsiella oxytoca
atgtttaatgccaaaaaaacattattagcaatgataattagcgttggctgttctcaggcaatagcagctgactatcgtgacggcaatatcagaaagaatgactttagctggatgcaaatgaatcttatgcagagcgtggatgctaaagtcccatacggaattcgcaacgatacctatcttgaacttgagtttggcgcgcgctcgggtattgtcgatctttacggctatgttgatatttttgacatctttgacagtaaacatgacgatcgccatggcggagataacttttttgctaagatatcgccgcgtttttcactggatgccattttcaacaaagatttatccgtcggcccattcaacgagttttatatcgcaacggtcaataacattggcgatcgcgaattatttgagcactatatagggcttggtacggatgtgaaagtcccgtggttcgggatggtagggatgaacgtctatgctcactatgtacgggaaaactatggcgccgaaaacgaaggcaagtgggacggatatatgttctccacgaactggtcaacccccttttaccagtttgccaatggtagctatttaaattaccaggggtatttcgattatcagtttgcggcgaataaaaatagcgatcggtcgctttacagtaacaatgcgattgaatggtataacggtatctactggcatacggaaaattatgccgtaggttacggcttgaaatatttccgcaatatggcgttgatgcaaaaccacggcggcgcaggccgtacaaccgggcttgggcactactttagtctcacctggaagttttaa

SEQ ID NO: 173170 - DNA, 687 bp, Klebsiella oxytoca
atgcagcttaaaccactcaccaaaggtcgttttcatagcatttggcaacaggatgatgcatttatcgagagaacgtttcgcgagctactctcagataagcagcttattgccgaaaatgagcatctttatcatcagggccaggttgttgaccgcttaatcatggtcgaatcgggcagaatatctctgcgttacagcgcggaaaacggccgtcgcttccagctgggtgcaatggaatgcgatgagcaactctttggtgaaatggagtttttcacaggctatcgctgtcagctggatatcgtagcagaggaaccacttaccgttgcggtatgcagctgcgagcggctcgaagaagcattgaatcaacatcctaaactggcgatattttttgccagcgccatggcggtagactaccaggatatgctggaaatcttcttgcatcgcatgctctaccccatcgttcataatgttgcctatgacctctaccggcagcacctgaacaaacagccaatggatggattcagtaagaattatcaggaagcggaaagattcggcaccaccgaccgcgtttatcgccgcgcggttaaagcgctgattgatgccggactggtagtacgaactaaacaaggcattgcaattcaggatcttgatgggttgcggaagtttctcggcaacgatattgctgaatga

SEQ ID NO: 173171 - DNA, 2175 bp, Klebsiella oxytoca
atgccaacaatcaaagacatagcaaagatagccggtgtgtcacacggcactgtctcgaacgtacttaatggcagaggaaatgtcagcgttgagaagattgaagcggttcaacgagcggctaaggaagtgggctatcagttaaatgcgcaggcgcaatcgttaagagccagtaaaagccagggggtggcgctgctgctgccagacattaatgcggagcagtattaccagctttaccggggcttacatcaggtctgtcagccatcattaagcgaaccgctggatctttacctgaccaacgatctgcccaacctggaactggagattctgcaaacgctggcggcaaaatcttaccagaccattgttaccgtcagctgcctgagcaatagccaaccttattatgaaatgctcaagctgcccgcggaacagatcctttttgcgtaccgacaacctgccggagctgacaactatttcagcctcgattacgtcactgcgggtgaacaccttgcgagaagagcgctcgcgcagcggccgggccatatcggtatcttttgcgaaccgcttgaatatgctcatagcgcatgttttattcaggcgatacaggagacctgccggacagtcagtccgcagactaagctcaccgttttatcctcgcaggcgggcgagtctaacaccgtagcgtttgattttttccgcggcgttgcccccgatattttcatcactcaggatagtgataaaacgcgagccgtgacgcaggcagcctggtttggtagcgcgcagtcctgtccgccgatactgcagttaagtgataatcttccggcagccttcgacggcgtcacaaactaccagatggactatggtcgcctgggtaccgccatcgcttcccatattcgccagcctaaaaaacaggtaacgcatcgaattctgacaaatagcggattttcattagatggccaatccgtccagccgcctgagaccgaggcgacgctgaatatgttaattttgcccagcccctcaaccgatgcgctgaaaaaactgttacctcacttttatcgtcagaccggtatcaaggtaaatcttgcggtttatccttatgatgaagtgtttgaaattctttcccatcttcatctgcatccctattacgatctcctgcgcatcgatatggcctgttttccctggtttgcagaaaaagcgttattgccgctggagtcgatttcccctgcgctgccgcagctgctgactcatttttctgaccagattcgacagcacttcagcatggtgaatggcaccgcgtgggccatcccctttgatgccagtatgcagctcctgttttaccgacgcgatctctttgaagatgcgacgataaaacggatgttctacgaaacgacgggaaaagagttaacgctacccgaaaactttgcgcaatttgatgagttagcggctttcttcagtcgccagcatcagccggataacagactgcgcccgatgggcacggcggtgaccttaggcagctcagggcttatcgccacggaatatctgctgcgttactacgcgctcggcggacgtctggttcgcgaaggcgaaccggttcaactggagacttcgcttgccgctacggcgcttgaacagtacctgcaacagctctccgtcgccgtgaatctctcaggagaatggtggagtgacgccgttaagcagtttgagcgcggcaacctcgccatgttgatcatgtatctcaatttgttcaatgacgtcgcgcatagccctatcgcccccactatcggctatgcttcagtcccgggacagcttccacagttgggagggggatccattgggatgtcccgctacagcaaaaagaaaaaacaggttgagcagttcttcaactggctttattccgatgaaattgcgcgtcatctggttctgctcggaggaaactgcgcctggtcaggggtttgtcacgatcagaacgtccttaacctctatccatggtttaatttattgaatgaaaagggcatggtcgggataagagagtcgcagggtacgcagggtaagcctttcaacctgcgccaggcagaaattattatcggccagggcgtgacgaacgcgataaatgggattatggatgtctctcaggccgtggaatacattaacaggcgaataaaaaatgaaaccggcgcctga

SEQ ID NO: 173172 - DNA, 825 bp, Klebsiella oxytoca
atgaagatccattttctgggaacggcagcgtctgaagggatacctaacccgttttgccgctgcgagcactgtcagcaagcccgtatacgtaagggaaaagacattcgtacacactcttccgcgattattgatgatcaactgttgattgacgtcgcgccggaatttagtcagcagctgctgcgcgacggcatggacgcaactgaaatcaggtcgcttctgtttacccatactcatcccgatcatttcaacgtcggcgatcttttcagccgaatggagggttacggatttgagattacccatccgctgaatatctttggtaacgatcgtgcgattaacggtgcggcagaggttttgccgggctatagcgcagagcgctttgcctttcattgcctggtgcccttcgtcaccgtagaaacccgtggttatcggataactccgctgctggctaaccatgctaaatgggagctttgttatacctggtttatcgaaaaagagggccagtcaatattttacggtcatgactctggctggtttcctgagctcacctggcagtggctggaagggaaaaaaatcgatctggccgttctggagtgtacctacggctttaatggagaaaatcgtaccaataaccatatgagtctggaaacggtgttcgctgccagagacagactggcggaactgggctgcctgaagaaaacaagtcaacttatcgtctcgcatatttcacacagcggcggtctcctgcacgatgagctagtagcagcatgcgataaagagaacattcttgtcgcctgggacgggcttaacctgagcattaaccaataa

SEQ ID NO: 173173 - DNA, 1236 bp, Klebsiella oxytoca
atggaccttaataaaacaccacgcctgttaattatgatgttcatacagtactttatgcagggcgcctggaatatgaccatggggctggtattaagtacctatggaatggcgaccataatcggctcgtcctatgccttgctcggattagcgacgattatttcaccgttatttattggtatggtggccgatcgcttctttgcatcacaaaaggtcatggcgatcctgcacttagtcaatgctggcgtgctgctgtttgttccgcaatttattgaagcgcaaaataccggcatgacgctgaccatgattttcctggtcggtctgctgttttatccgacaacggcgctggctaacagtatcagtttcagccatatcaatggggttaaatatttcccattcatccgcgtttttggcaccttcggctttatggcaatcggctttatcattggtgaaatgggctattccggcaacacagttacctggtatattgcggcagcttccggcgtcgtcctgggcttatattgcttcacattgccgaatacgccgccaaaagcaaaaggaaacgctttcgcgctgcgcgatctgttatgtctcgatgctctggcactcttcaaagatcgtagcttcagcgtgctgatgctgagtatctttgtcttaatgatccccaaaaccgcatattccgcctatattccggtctttttgaaagcgctggggttcgataatgccgcatcaatgatgcagatcgggattgcctgcgaagtgattttcatgttcctgctatcgttcttcttactaaaagccggctttaaaatcacgctgatgctgggggccgtttgctggatcatccgcacgctgttgtttgctcatgcctcgctggatgccaacatgatgtttgtgctgatcggcctgatgttacagggattctgctgggactttttctttaccgtcggcgatatttatgttgaccgcaaagccgcgccagagatcaaagcgcaggcgcaaagcttgaggtttatcgtctccaacggcgtcgggctgctgtttgcttctaccgtttgcgggcagatttttaacagtaccgtgacagagcaagggccggaagcgttaccgcaatgggaaacattctggttagtttcagccggtgtcgccgcggtagtgagcgtcttcttcctgattttcttccgcgacgatctgtcaaaacgcaaaacggatctcgcattgaagaaagtgaactcctga

SEQ ID NO: 173174 - DNA, 714 bp, Klebsiella oxytoca
atgaataatctggccgccacgatcgtcgatcacggatggtttccgttattgaccatcgtcaaaatcagcattgcgtttattctgggaggcatcattggcctggaaagagaatcgaaagggaaacctgtcggattcaaaacctgcgtcattttgtctgtcgccagctgtgtattaaccatcgtttcaatacagtcggcggaatactatgctgaaatttcgatgaacattcgtagcgatccgatgcgcctggcggcccagattatcagcggcgtcggttttctgggggcgggagtgattctgcatcgacacgacgatgctatttcaggcctgacgacggcggccattgtctgggcatcagccggggttggaattacctgcggcgccggtttttattttcatgcttttttcgccacgggtttgttcttattggcgataaaattaagcccgttcattatattcctgcaaactaaaaatcagttccccggaaaagtgaaagtacgggtggttcttgatgaacgaggggcccttgaaaagctgataagccgtatccatcagcaaaaaaatattatcgaaaatattacgattagagaccttaaaaagggaaagattgaggttaatttgaaaatggttattcgccagagaatgaccttacctgacttataccacgatctgtctcatgttgatcatgtctgcgcgcttgcccttgaacattga

SEQ ID NO: 173175 - DNA, 174 bp, Klebsiella oxytoca
atgtggaaaatatgttcgattctggatattattcgcagtagcaatgagaaaccattgataataattgttaacgacagtatgcatctccgacttatcagaccctctctctcatgtgagcaaatcaggaagataagcatcgaacaacttgaggagatcatcatcagagaattataa

SEQ ID NO: 173176 - DNA, 321 bp, Klebsiella oxytoca
atgtacagctatcgttgggccaaattcctggttgctggcgcaaaatataatgacagtcatttcctgctggtagagttttatattcatcacgaactcgatggcgtcattaaaccaggcatttgcagaaacagacaatgggtattaagccaattagttaatggttctactttatttactttaaatcaaaacaataataaatgggaaaagaaggatagaataattctcaaccaagttgctggtagatattatattaggacgaatccctctcctcatcccggcgatgatataggctatcattttactcaaggctgtatgatataa

SEQ ID NO: 173177 - DNA, 774 bp, Klebsiella oxytoca
atgaagtacttaattgaaagcaaattgttttataacgctgagtctggtgagcttatttatattgatatcggtgtaacggagaaacaccagttaaccaaaacggctaaccatattctggctatactgatggcgtcacatgggaaggtcgtttctcgacaaagtttcttagagcaagtctgggaatcccgtggacacgaggcatcaaattcatctttaaaccaatatattagtatcctcagaaagaaattatcattcctgataagaaaagataatattatattaacaagccccggcgttggtttttatctcacgaaagatatcaaggtcaaacggtatgatgactcaagccaggaaggaccaccttcaggaaaattacgtcagcaacgatttcgttacctaaaacacggaggcgtggtagctttgatagccagtttgattattgttttttttgccaggtatgaagtggccgcaacatcgattctggctaagagctcaaataacctggaagaaatcggtaagtgtcaaataagatcttatgttcagatccctgaaagtatgcaggaaaaattacttaatattttggttaggcaccatcctgggttacttgaacattgccaaagcagtccagcccggttgataatatatgcacaaagaaacgttttgcagggtaagtctggggggatattttcatctttttgcccaatggatagtgtaaataagaaaataatttattgtaataacgtttatgtaagtcaatggaggcagcatgactaa

SEQ ID NO: 173178 - DNA, 492 bp, Klebsiella oxytoca
atgactaacaacgtgctctaccgttcctgcggtttattaggctgcgctatcattgttctgattatttatttgttgtgcttattcagtaagaaaagaaaaatgaaaacatgtgaggccaatgtatactataatatatcatccttaaatgattcatatacatttgatggtcatgttttatttgatatgaataataacactggttatgtttccttgtccggaaaaatagtcgatggcgatgagacttactatctgtcacaggacatcaactttgactacatggcggtgggtgagggccggtataaattattgccaggtaaacaagatactaataaatatggagatgttcctgatgatcttgtaatgccactttatgatatcatgggcttatccgggaaatcccccatttttatctttgctaaaaatcgggattatatagtctggggaacgctaaatacaccggttatgacctgcgtctttactttggatcactga

SEQ ID NO: 173179 - DNA, 1977 bp, Klebsiella oxytoca
atgcgcaataccttccgaccttcacgccctatgctggcgctgactatcgccctggccggactcgcaggcggctgtaatgacagcggcgtaaaccgcgataacccggcggaagcgcccgcctccgcgccgcagaacgtcatggttcccgtcctgtctgctgatgaaaatagcctggtgctggtttgggaaaagccggaatcagagacgcagcaggtggtggactacgcgatttaccgccagggcgagcggctgggtctggcgcgcgaaaatcaaaaccatttttcaccggccaaaccctatattgataacttctatcagcggattgccagcgacggctggcagcagccaatcgatttgcgtacctttacggtcactcacctgcagccggatacggaatatgcctttacggtgcgcgcggtctacgccgatggccaggaatctccggacagcgcggtggttaaagcgcaaacccgcaaaacgccgcacgtcatcgaagccagaacctttggtgcaaagggtgatggcaccacgctgaatacccaggcgctgcagcaggcgatcgataactgtacggtctcgcactatcctcagggctgcaaagtgctgatttccggcggcatattcaagagcggcgcgctgttcctgcacagcgatatgaccctggagattgcggctgacgccaccctgctgggttcagacgatccggcccagtatccgctggaaaaaggctattacctctatccctacagcgatcatccgcagccccgtcgcccgccatcattaattaacgtgctggaagcggacgataagggcgagtctccggccgggacgtttcgcaatattcgcatcgtcggtcaaggtacgattgacggcaacggctggacccggggcgtcaaaagcggcggcgaggccacaattatcgatgaaatgggcaatgaactgccgcagtaccgggccagtaatgccaataaagttggcgcagacggtattctggcaaagcatcagaccgaagcggctattgcggaaggcatcgaaagcaatagcgcctataaaaatcgccgctccagcctgatgactctgcgcggcgtgcacaacctctatcttgccgggctgacaatccgcaaccccgcgttccacggggtaatggcgctggagtcaaaaaatatcacgctcaatggcctggttcaccagacctttgacggcaataacgccgacggcgtggagttcggcaatagccagaatgcgctggttttcaacaacttctttgataccggggatgattgcgtcaatttcgccgccgggtttggtaaaggcgcggaaacttttcatcaacagccgcaaagcggggcgtggatctttaataactatttccgtaaaggccacggcgccgtggtgaccggtagccataccggagcatggatcgaaaaagttcgcgccgaggataacgtcatgtatatgaccgatgtcggcctgcgcatgaaaagccgcccttactacggcggtggcgtaagggatgtgctgttccgccataatgcgatgaaagatatcgccaaagagccgttcgtttttactatcaaatacagcgccgacgtgaatgatacgacccctgccgacgagcccgctcagttccgcgacgttcaggtgcaggacgtcaccgtcgatggtacttcggctaagcacagcatcctgattgacggcatgacggtagccgaaatggcagaatcatttgggctgacctattctcgcgatgcctatcaccagaatctgcgtttttccaacgtcagtttccgtaacaccaaagcgaccagtatctccttcctgcatgacagccagtttgatgaggtaacgttcgccaatacgccgcaggcctgggcgtttttcgccgtcaatgacgtgacgctcgctgatagcctgcatcagcagagcatcacccggggagaaaaggacaaacttatccttgagggggcgataaagtaa

SEQ ID NO: 173180 - DNA, 828 bp, Klebsiella oxytoca
atgcgcaatcccgcttttatctcccgccagattggcgactttcaggtgatggcccttagcgacggcagtatggccgccagcctgacgctgctttccggtatcaatagcgatgatgctctggaaatccagcgccatgccggcatcattgcgccggatgatatcgacattaatgcctatcttattcgcggccagggaaggacgattctggtcgatgcaggtacaggaggcggcacgcttgccgcgagtttgcaagcggcgggggttggagcagaagagatcgataccgtactactgacccacggccacccggatcacattggcggcctgttggatgctcacggcgcgccatgctttcccaacgcccgtcttcatctgcatcctctggaagcggagtactggcaggatgacggtatgttgaatcgggcaaatgagcggggacagcgcaacttcgccctcgcccgccgaaccctgggcgcgtgggcccgccgcctcagctttctcgatgagagagaggtcgtcccgggtatccgcccgctttggctacccggacacacgccgggccattgcgggtttcgcatcgactccgctccgcaaagcctgctgatttggggggatattgtccattttccgcatgttcagaccgcccggcccgcctctgccatcgcttttgatagcgaccccgcgcaggccagagcgacgcgggaatcgctcctcgcccgggccacaagcgaaaacctgctcgtcgccggtatgcatcttggcggctcgggatttgcacatgtgctaccgacctcctgcggctatcgtctcgattatgccgcgcagtaa

SEQ ID NO: 173181 - DNA, 543 bp, Klebsiella oxytoca
atgctatatatcgttgagtgcagttacgccgatccggaaagcgaagccagctggaatacgttttacagccagcacaagctgccggcgctggtttccgtcggcggtttccgcgcctcgcagcgctttcgcgccctttcctcccgcagcccgctctatctggcgattcataccattaccgatgcagccgttatcgccagcgaagagtatcggcttaaaggcggcggcaacttttcgcgctggcaggcgcatatttgcgactggcgccgcaacctgtatcggtacgacgatgtatttccgcaggtctcccaggatgaggttctgttactcagcccggcgccgctggacttcattgacgcagaactggggtatccgccgaccatactgcacgctgccgggctggataacaatccgccgcagcgcgtggcctacattctgccgcgccgggaggccaggctgcttgcgggacaggaaaaataccgcatctacgagaccatgggcgctcagctgctcagctctcttgatattcaacctgatgcacgctaa

SEQ ID NO: 173182 - DNA, 876 bp, Klebsiella oxytoca
atgcgaaaaaaactccccagcagcgcctctctgcaggcctttgaggccgccgccaggcacggtaattttgcccgcgcggcggaagaactgtcgcttaccgaaggggcgataagtcggcaaatcgcccgcctggaatcgctgctgaattgcaaactgtttgaacggacgggaagccgggtgcggctgaatcctaacggcgcgcgctatgcgcaccatgtgcgcgagacgctggagcggctggaacgcgacgctcagtatctgatgggcgtcgcggacggcagccgaagcctggaaatcgcctcccccccgacctttgccagccgttggttgattccccgtctgggggattttcatcgccgctacccggacatcatgctgaacatcgcggtcagaaccgagccgtttattcttaccggcagtggttttgatgcggcggtgcactttgagcatcccgcatgggccggaatgcgccggcaatttctgtttgaggagcggctggtgccggtatgccattctgcgttgttcacgggaggcgaagccttgagtcagttgaacctgttaccgcgcattcaccgacggcaaaaccccgacgcctggccgcgctatgctgaagagtgtgggatcgcgctggatcatccggcgcggggcgtgcgctacgatctgcatgagatggcgatagccgccgcgctggccgggcagggcgttgcgctggtaccgcacgtgtacgttgaaaaagagcttgaaaacgggacgctggttgcgccctggcctttggctcgcagcctgagcaagcgcttttgtctggttaaaccgctggagcccgggatcaatgaatcggcgctacaggcgtttgaacagtggctactggcgcaataa

SEQ ID NO: 173183 - DNA, 867 bp, Klebsiella oxytoca
atgacctggaaaataaacaagcaaattgtgcacaatgacgttttaagaaatagcttcattgatcttgcgcttaaaaccttcgatctctcctttaaagagtggtaccgcaaaggatactggaccgacgcctatattccctacgccctcgtcagcaacaataaagtgattgctaacgcctccgccaatattatcgatctggtctggcaggatgaaccccgccgctatattcaaatcggtaccgtgatgaccgatgtcgatcatcgtaataagggcctcgccggtcagctcgtgaatgccattctggcggactggcaggataaagccgatgctttctttctgttcgctaacccaaacaccgttgatttttatccaaaattcggcttcgagcgcaccgaggagcatcaggctatcctgccggtaatgccggcggcgggcgacttccgcaagctcgatatggatcggccggaggatgtcgcgctattacagcggtattatgaaaaatcgaatcccttttcgcagctgcgcgtacagaataacttcggtttattgatgttttactgttccgcgtttatgaagcacttcgtcttttattccgagaaaaatcaggctatcgccatcgcgatgcaaaacggaccggcgctgatctgttttgatattttttgcgacagcggccgttctttgtcggccattattaatgagctcgccgatgaaaatacctatcaggccgtgctgggctttactcccaaagagaaccgggttggtgagtatgaaaaaattgaaggcgaagatcttctgtttatctacggacaaaaagaaaatatcttcaaagcgcataagctgatgttcccgcttttatcccacgcctga

SEQ ID NO: 173184 - DNA, 981 bp, Klebsiella oxytoca
atgtcagaactaaagtttgccacccgactcaactcttttgcatcaggagcttacctgtattggtcggatttaaaaggaaagccaaccgtactgcagatgattgagcgggcagggaaagtgaaaggacttacccatctcgatctgaattatccccagcatatgagtgacaatgtcagtacgatgcgccgggctattgaagacgccggccttgcggttaacggtatgcagatgcgttgggatgccccacagtttcgtattggcgcgtttactcacccggacccaaaaattcgccgcgaggctatcgatttaaccaagcggggtatcgataccgggcgcgagtttggctccagactgatgacgctgtggatggggcaggacgggtttgattactgttttcaggctgattacaaaaaaatctgggaggatgcggtcagcgcggtgcgtgagatcgcggaatatgcgccagacgttgatatcagtatcgaatataaaccgaatgaaccacgcgcgttcagtattttccctaacgtaaccacctgcttgctggcggtggaagaggccggcgcgccaaacctcgggattaccctcgattttgcgcacgtcctttacgccaatgaaattccggcctatgcggcggcgatggtcgcgcgtcgttcccgcctgttaggactggatctgaatgacggttggggaaaacgagatgatgggctgatggcgggctcggttaatccgcgcgcgacgctggagtttttgtggcaaatgcgtcgcgatggctatcagggcgcctattattttgacaccttcccggatgccagcggtctcgatcccgttcgtgaggcgcagaccaatattgcgaccgtcacgcgactgctgaagctgtgcgaaaagctggaaaacaaccaacctctgctggatgcaattagccgccaggacgccgttgcctctcaacaaattgttaatgacatcatgctggccaggtag

SEQ ID NO: 173185 - DNA, 1041 bp, Klebsiella oxytoca
atgaaaaaaatattactctctgtactcgcttcatctctgttgtgttctagcgtttatgcggcagatttaccgccgctgcaatctgatactgaacccgatcggaccgactggtctcaattggaaagcaagtacggcccgctaccggcggctgataagtcgctgaaaattggcggtgtatccaaaacattaaccaatgaatactggcgttctttaggtgagggctataaaaatgtcgccggtcgttatggtttcaccgtcgcctaccaggcagcggcgaatgaagaagatcagctaggccagctttccattgctgaaacgctaatttctcagggattcaacggcctactggtatcgcctcagacggacattaacctgtcgcctgcgctggaaagcgcgaagaaaaagaatatcccggtcattaacgtgaacgacgctgtgatgcctaatgctcagtattatgtcggaaacgtgcaaaaggataatggcgttcgcgtggctaaatggtttatcgaacaccatccgcagggtggaaaagtagcggtaatcgaaggccagccgggcgtttatgcggccggacaacgtacgcgcggatttaaagagacgttggccgaaaagggtaaatttaacattgtcgccagcgttccggcgaactggagtcgcgaacaggcattcaatgcggcgaccactatcctgcaacaacatcccgatctgataggtttctattccaataacgacaccatggccctcggcgttgtggaggccgttcgctctcttaaaaaatccgggcaggtagccgtatttggaaccgatgggatttccgacgcctatgcctcaatcaaacgcggtgaactaaccggtacagtggatagcttccctgtccttactggtgaagtggcgatggatgtcatgattcgcctgattaacggtcagaaactgtcgcgcgtgatctccacccctcaagccttaatcaccaaagaaaacgttgatgcattttcaactaaagataacaacgcgttacgccagctactgactcaacaataa

SEQ ID NO: 173186 - DNA, 1500 bp, Klebsiella oxytoca
atggaacagtatcgtttagagatgcgcggcatcaataaaacttatggaaataccgcagcgttacaggatgtggatttttgcgtcaaaccaggggaagtacacgcgcttattggcgaaaatggcgctggaaaatcaacgttgttaaacatcctttccggcgtgcgcagtgcagataaaggcgatatcagcgttggtggtcatcaggtgcagataaaaaatccgcttagcgcgcgtcatgccggtatcgctatgattcatcaagagttgcagcacgttcctgaactctccgtagcgcaaaatatgtttcttggacgcccgcttactaaagcgaagggaatgtggctaaacaagaaggagcaagaagagagggcaaggcgggtattaaagcagcttgatccctctatcgatcccggcgagccgatcaaaaacctgaaggtctcgcagcagcaaatcgtggagattgcccgggcgctgcttgatgatgcaaagattatcgccatggatgagccgacatcaagcctgacgcccagagagttcgagcgcctggctgagctgattgctgacctgaaagcgatgggtgtttctctcatctacgtctctcacaaaatgaatgagatattcaaagtgtgcgatcgagctaccatcatgcgcgacggcaggcaggttggggtggtgaacatctgcgatgaaaatgaagaaagcattgtcgccaaaatggtgggcaggaaaattgagcatgtcgcgcataactcctgggctactgaacgccacgttctgatggttgaaggcctggcgagtgccgcggtcagcccggcgacattttccgtttgcgccggcgaggtcctgggcgtcgctggcctggttggcgcagggagaacggaactgctgaaactgattgccgggatagataagcgtaccggcggtaccatacgggtcaacgatcggctggttgaacgtcaggatgtccgaacggcgataaaagccgggataggattagttccggaagatcgtaaaaaagaagggattatcaaggcgcgggcggtaaagatgaatatggccttaccgtcaatgcgtcactttacaagcgcaggactggtcaatacctcaaaacttaaccaagtggcgaatagagtgatggcggatctgaagctgcgcccgctggacattgaaaaaacgattggtacgctgagcggagggaatcagcagaaagtcatcattgggcgctgggtggccgctgatgctcaggtattcttatttgatgagccgacccgcggaattgatattggcgcgaaatcagaaatttataatctgatagaaaaactcgccgcagcaggtaaggctattattgttgtttcatcagaaatgacagaaatcatcagaatctcagatcgggttctggttatgcgagaaggaaaaatcactcaggagctgacggggaattcgattactgaagagaatattgcccgttttgccattaatgatgcgggccatattgcctga

SEQ ID NO: 173187 - DNA, 969 bp, Klebsiella oxytoca
atgatgacacatgcaggtaaaaatagagttttaccgtcctcgctggttaaattcaacgtgcgcgatgccggaaccctaattgggttgctaatcattattgtcacgttttcttttttatctccggtatttctcacactgccgaatttacttaacatacttcagcaatcgtcaattaatgcgttaatcgctttaggaatgactctggtcattatttctggcggcattgatttatcggttggtccgacggcggcaatgtccgccgtgttcggcgcatcactaatggtcgccggtattccgctgccgcttgccgttgtgttgaccctcggcgtcggcgccgcgtgcggacttttcagcgggacgctgattgcgtgggccggtctccagccgtttatcgtgactctgggggggttatcgctattccgcgctattgcgctgatctttaccggcggtaatccggtattcggtatcccatcctccttccgcgatatgattaatagctcgctgtttggtataccgactccgattgttatcgtggcaattattgcgctcatactgtggacggtaatgaacaaaaccccgctgggagaatatattctggcgattggtggcaatgaagaggccgcccgcgtggcgggggttccggttagacaaactaaaattacggtttacgttatctccggtattcttgcctcgttggcatcgctgattctgattggccgcctgggcgcagcggaacccactatcggcacattatgggagctggacgctattgccgccgcagcgattggcggcgcctcattgatgggcggcaaaggcagcatattcggcaccctgattggggtcattattttgggggcgttacgaaacgggctgacgttgcttaatattcaggcattttatcaattgcttgcaacaggtcttattattatcatagcgatgttaattgacagagcaacccgaggcaagtaa

SEQ ID NO: 173188 - DNA, 858 bp, Klebsiella oxytoca
atgaagcaggatccacgagccattggcgctcagatacgtatgcgtttgccacagctgacaccgcttgaacggcgtgttattgaggcaataatttcccgaaccgatctgacagagcaaacttctttaaaagaaatcgctcaagaaaataatgtttcggaagccatgatcgttaaaataactaaaaagcttaacttcacggggttcaggcatttcagaagcagcctgatttattataacgaatcagaagtggcgggattgcatgcggaaatcgagcctggtgatacctctgagcagcttctggctaaggtatttcgcacctcaattcaggctatcgaagagaccatgtctattcttgatatttctgaatttaatcgtgcggcggatcttatatttaaagcgcgccatattgatctgtatgctgtggggggatccgcgaccgtggctcgcgatctcgcacacaaattgctaaaaataggcataaagtcatctgtttatgatgacgcgcatattatgttgatgtctgccgccgttttatctgacgatgacgtggtgattgctataagccattccggagcaacccgtgcggtgaatgctccggtaaaacttgccgcccgtaatggcgctaaagttattgtcgtcactaattatgcagagtcgcccattgcgcataacgcgcatgtagtactcaattcaacatctcaagggtcgcatttacttggcgaaaatgccgcatcgcgtattgctcaactcaatatactggatgcgctgtttgtggctatcgctaaaaaggatctcagtcaggcagagaaaaacctgatgaaaacccagcgtgcggttcaggatcttcgggagttctag

SEQ ID NO: 173189 - DNA, 867 bp, Klebsiella oxytoca
atgaacaaaattgcagttgcaggcagtctccattacgacatcatgattgatgcgcatcatcggcctgagaaaggtgaaacggtaatggggaccgcctgtcgctataagtttggcggtaaaggggggaaccaggctatctcggcggccaaacatggctcagaggtccgattcgccggcgccgttggcgcagatgaacagggacgttttctggttgaaacattacgtcaggcgggcgttgacgcgagcgccgttgcggtggtggcagacgcgccttcgggaatgagcgtggccatttccgatcgtgaaggcgattacggggctgttgtggtatccaatgctaatcagaaaatccccgccagcgtattccagaacgcgcgcttctgggatagcgtcagcatgctggtgttgcagaatgaagttccggagacgattaatattgaagccgccagcgcggcaaagcagcgccgtattccggtatgtattaacgctgcgccggcacgcccgcttagcgaacccttcgcggcgctgatcgatattctgatcgtcaatgccattgaggcacgcgatatgtgcggcatcgaggttgaagatttggcttcggcacagcatgccgcgacgctgctggcggagcgctttgctaaggtggttgttaccgctggcgagcacggtgttgcctggtgcgaagcgggtaaagccgcgcaagctttgcccgcccggaagattaagctggtcagcactcatggggcaggggactgctttgttggggcgctgtgcgcatctttcacggcaggccattcgttagcggaagcggtggcaagcgccaacgctgccgcagcccgccacgtctctcagccagcgacgccttaa

SEQ ID NO: 173190 - DNA, 1578 bp, Klebsiella oxytoca
gtgttatcatcccgcctttcccttttcgtcctggggctcttttttatgcaacaacctgttgttcgcgttggagaatggctggttactccctctgttaaccaaattagccgcaaggggcgtcagctaactctcgaaccgcgcttaatcgatcttctggttttctttgcccgccatcctgatgaagtactgagtcgggatgagcttatcgacaacgtctggacccgcaacgttgtgaccagtcacgtcgtcacgcaaagcgtttctgagctacgtaagtcgctgaaagatggcgacgatagcagcatggaatatatcgctaccgttcctaaacgcggctataagctaacggtgccggtgatttggtgtacggaagagggggaggaactgacgccggttattcctgcagaaacgccgacggtcgccgtggacgcgccatcggtttccccgcagcctgaggcggctgcgccagagatggcgccggtggcgaagccggaaaaacgtaagcggctgagtacctttatcgtctggggcctgtttttgctggcgctcgcaagctgcgtggcgctggtggcattatccaccctggagtcgcgcccgccggtcacaaaaacccgcatactgctcaacccgcgggatgttgatatccacctgctcagcggcaatacctgtaacaactggtcatcgcagcactcctatgccatcggcctggggagcctgattaccacctcgctgaacacgttctccacctttatggtgcatgataaaaccaactacaacatcaatgagccgagcagttccggaaaaaccctgaccattgagttcgtcaaccagcggcactatcgcgcgcagcagtgctttatgtcggtcaaagtggtggataacgccgacggatcgacgatgatggacaagcgctacttcgtgaccagcgacaaccagctgtcgattcaaaacgacctgctgagtagcctgtcggacgcgcttaagcagccatggccggcgcgaatgcaggagatgcttaagcagtatcagccgtcgcaaagtatcgcgctcacgcatttctatcaggcacatcagttattaatgaacggagacgtcgattcgctgggcaaagccagtagcctgcttgccgatgtgaataagcagtcgccggactttacctacgcctgggcggaaaaggcgctggtggacgtattacgccattcccaacagccgttagatgataaacaactggccgatctttacagcgaaataacccgggtgggtaatatgccggggattaaagatatggcaatattttatcaaattaaaacggtagacatgctgggtaaaggcaaagtcgatgaagcctacagcgcgattaattccgggattgatctggaaatgtcgtggatgaactatgtgctgctgggcaaagtgtacgaaatgaaaggacagaaccgggaagctgccgatgcctatctgacggcgtttaatttacggccgggagagaatacgttttactggattgaaaacgcggtattccagacctccgtaacccgagtggtaccgtatctcgataatttcctcgcttcagaataa

SEQ ID NO: 173191 - DNA, 210 bp, Klebsiella oxytoca
atgtttctcatgagccgccagattgttatatcttataaccagtccggtcccgcatgtaacaccttttcaacacgatttagagttcacaacttattgaaaaataacttcatttatcttttcctgatatcaacatgtcatcctgatatgttgcacgaaaaaggtcaaaatatcatttgtctgatgtttgcagttatttcactttatctttag

SEQ ID NO: 173192 - DNA, 1338 bp, Klebsiella oxytoca
atgagttctgccaagaagatcgggctatttgcctgtaccggcgtcgtcgccggtaatatgatggggagcggtatcgcattattacctgcaaacctcgctagcatcggtggtattgccatctggggttgggttatttctattattggcgcgatgtctctggcttatgtttatgcccgactggcgaccaagaacccgcagcagggcggccctattgcctacgccggtgaaatatctcctgcgttcggtttccagaccggtgtgctttattatcacgccaactggatcggtaatctggcaatcggcattaccgccgtctcttatttatcaacgttcttcccaattttaaataacccggtgccggcaggtattgcctgtattgccatcgtatggatattcaccttcgtgaatatgctcggcgggacctgggttagccgcttgacaaccattggcctggtgctggtacttattccggtagttatgaccgccgtggtcggctggcactggtttgatgccgcaacctatcaggcaaactggaacacctccagcactactgacagtcatgcggtaatcaaaagtattctgctctgcctgtgggcctttgtcggggtggaatccgccgccgtcagtaccggaatggtgaaaaacccgaaacgcaccgtgccgctggctaccatgctgggcactgcgatggccggtatcgtgtacatcgcagcgactcaggttattgcgggtatgtatcctgcttctcagatggccgcatccggtgcgccgtttgcagtgagcgcctccactattctcggcggctgggctgcgccgatggtttccgccttcaccgcctttgcgtgcctgacttcgctcggttcgtggatgatgctggtgggtcaggccggcgtacgtgccgccaatgacggtaacttcccgaaagtgtatggcgaagtcgacagcaacgggatcccgaaaaaaggcctgctgctggccgcggtgaaaatgaccgcgctgatggtactgattaccctgatgaactctactggcggcaaagcttctgacctgttcggcgagttgaccggtatcgcggtactgctgactatgctgccttacttctactcctgcgttgacctgattcgcttcgaaggcatcaatgtacgcaacttcgtcagcctgatttgctccgtactcggctgcgcgttctgcttcatcgccctgatgggggcaagctccttcgaactggccggtacctttatcgtcagcctgattatcctgatgttctacggtcgcaaaatgcaccagcgccagaacaacgacaactcagcagatagcaacaccgccagcgcgcattaa

SEQ ID NO: 173193 - DNA, 2148 bp, Klebsiella oxytoca
atgaacgttatcgcaatcatgaatcacatgggtgtctacttcaaagaagaacccatccgtgaactgcatcgcgccctcgaacgcctggacttccgtattgtctacccgaacgaccgtgaagacttattaaaacttatcgaaaacaatgcacgtctgtgcggcgtgatcttcgactgggataaatacaatctcgaactgtgcgaagacatcagcaaaatgaacgaatatatgccgctgtatgcctttgcaaatacttactcaacgctggacgtcagtctcaacgatctgcggatgcaggttcgcttcttcgaatatgcgctgggcgccgcggaagatattgcgaacaaaatcaaacagaatactgacgagtatatcgacaccattctgccgccgctgaccaaagcgctgtttaaatacgtacgtgaaggcaaatataccttctgtacgccaggccatatgggcggtaccgcgttccagaaaagcccggtcggcagcatcttctacgatttctttggttccaataccatgaaatccgatatctccatttcggtatctgaacttggttctctgttggaccacagcggcccgcacaaagaagcggaagagtacatcgctcgcgtcttcaacgcggaacgcagctacatggtgacgaacgggacctctaccgctaacaaaatcgtcgggatgtactctgcgccagcaggtagcaccgtactgattgaccgtaactgccataaatcgctgacccatctgatgatgatgagcgacattacgccaatctacttccgcccgacgcgtaacgcctacggtatcctcggcggtattccgcagagcgaattccagcatgcgaccatcgcgaagcgcgtaaaagaaacgccgaacgcgacctggccggtgcacgcggtgatcaccaactccacctatgatggtctgctgtacaacacggactacatcaagaaaaccctggatgtgaaatccatccactttgactccgcgtgggtgccttacaccaacttctcgccgatttatgaaggcaaatgcgggatgagcggcggtcgcgttgaaggcaaagtgatttatgaaacccagtccacgcacaaattgctggcggcgttctctcaggcttcgatgatccacgttaaaggcgacgttaacgaagaaacctttaacgaagcctacatgatgcacaccacaacgtctccgcactacggcgtggtggcctctacggaaaccgcggcggcgatgatgaaaggcaacgccggtaagcgcctgatcgacggctctatcgaacgttctatcaagttccgtaaagagatcaaacgtctgaaaggcgagtccgacggctggttcttcgacgtctggcagccggaacatatcgatggtcctgaatgctggccgctgcgttccgacagcgcatggcacggtttcaaaaacatcgacaacgagcacatgtatctcgacccgattaaagtcaccttgctgaccccggggatgaagaaagacggcaccatggatgagttcggtattccggccagcatcgtggcgaagtatctcgacgagcacggtatcgtggtcgaaaaaaccggcccgtacaacctgctgttcctgttcagtatcggtatcgataaaaccaaagcgctgagcctgctgcgcgcgctgaccgatttcaaacgcgcgttcgatctgaacctgcgggtgaagaacatgctgccgtcgctgtatcgtgaagatcctgaattctacgaaaacatgcgcgttcaggaactggcgcagaacattcacaaattgattgagcatcacaacctgccggacctgatgttccgcgcgttcgaagtgctgccgaccatggtgatcacgccgtacgccgcgttccagaaagagctgcacggtcagaccgaagaggtgtatctcgaagagatggtgggtcgcgttaacgccaacatgatcctgccgtatcctccgggagtgccgctggtcatgccgggtgaaatgatcaccgaagagagccgtccggtgctggagttcctgcagatgctgtgcgaaatcggcgcccactacccgggcttcgaaaccgatatccacggcgcctatcgtcaggcggatggtcgttacaccgttaaagtgctgaaagaagaaaacaacaaataa

SEQ ID NO: 173194 - DNA, 1476 bp, Klebsiella oxytoca
atgaaaacaccctcacagccgcgcgcgatttattacatcgttgcgatccaaatctgggaatatttcagcttttacggcatgcgtgccttgcttatcctctatctcacccatcagctcggctttgatgacagccatgccatcagcctgttcagcgcttacgcctctctggtgtacgtcactcctattctcggcggctggcttgccgaccgcctgctcggcaaccgcacggcggtgattgccggcgcgctgttaatgacgcttggccacgtggttctgggcgtcgaatccacttccacctggagcctgtatctcgcgctggcgatcattatctgcggctacggcttgttcaaatccaacattagctgcctgctgggcgaactctatgccgttgacgatcggcgccgcgatggcggtttctcgctgctgtacgccgccggtaacgtcggctccatcgccgcgcccatcgcctgcgggctggcggcgcagtggtacggttggcatatcggttttgcgctggcggggatcggcatgtttgtcggcctgatgatcttcctcagcggtagccgctacttccgtgatacccgcggcgtcgataaacaggcgctgcggacggtgaagtttgtgctgccgacctggggctggctggtggtgatgctctgcgttgcgccggtgttctttacgctgctgctggaaaataactggtccggctacctgctggcgatagtttgcgtgttcgccgcccagatggtagcccgcattatggtcaaatccccggaacatcgccgcgcgctgtggcagatcgttctgctgatgctggccggtaccctgttctgggttctggcgcagcagggcgggagctcgattagcctgttcatcgaccactttgtgaaccgccgcttgctgaatattgaagtgccgaccgcgctcttccagtcggttaacgccgtggcggtgatggcggcgggcgtcgtactggcgtggttgatgcgtccggaaggttccgtgcgctcggcgctgcgcgtatggctgaagttcgcctttggcctggtgctgatgggctgcggctttatgctgctggcgcttaacgcacgccacggcgcggcgcaagggcaggcatcgatgggcatgatggtggcaggactggcgctgatgggctttgccgaactgtttattgacccggtggcgatggcgcagatcacccgcctcaatatgcccggcgttaccggcatgctgaccggcatttatatgctggcgaccggcgcggtcgctaactggctggcgggcgtcgtcgcccagcagaccaccgagtcgcaaatcagcgatacggcaattgccgcgtatcagcacttctttgcgcagatgggcgaatggacgctgggctgcgtggcgatcattgtcgtcgtcgccttcgccgccgcgttcagcgttggcaaacgccgcgcggccgccggtgagcttcccggaggcggcgcctag

SEQ ID NO: 173195 - DNA, 1518 bp, Klebsiella oxytoca
atgtctgaacaacaagcacaaggtgccgatgaggcaattgaccttaataatgaactgaaaacccgtcgtgaaaaactggccgcgctgcgcgagcagggcgtggcgttcccgaacgattttcgccgtgaccacacttctgaccagcttcatgcggagttcgatggtaaggaaaacgacgagctcacctctctgaacgtcgaggtctccgtggctggccgcatgatgactcgccgcattatgggtaaagcctctttcgttactttacaggacgtcggcggccgcattcagctgtacgtcgcgcgcgacgatctggcggaaggcgtctacaacgaacagtttaagaaatgggatctcggcgacatcatcgccgcccgcggtaagctgtttaaaacccaaaccggcgaactctccattcactgtaccgagctgcgcctgctgaccaaggcattacgcccgctgccggacaagtttcacggcctgcaggatcaggaagcgcgctatcgtcagcgctatctggatctgatttccaacgaagagtcgcgccacaccttcaaggtgcgttcgcagatcctcgccgccatgcgtcagttcatggttgcgcgcggctttatggaagtggaaaccccgatgatgcaggtgatccccggcggcgcttccgcgcgtccgtttatcacccatcataatgcgctcgatctggatatgtatctgcgcatcgcgccggagctgtatctgaaacggctggtggtcggcggctttgaacgggtattcgagatcaaccgtaacttccgtaacgaaggtatttccgtacgtcataacccagagttcaccatgatggaactctatatggcctatgcggactataaagatctgatcgaactgaccgagtctctgttccgcacgctggcgcagaccgtgctgggtaaaaccgaagtgccgtacggcgaccaggtgttcgacttcggcaagccgtttgaaaaactgaccatgcgcgaagcgatcaagaaataccgtccggaaaccgagatggcggatctggataacttcgatgcggcaaaagcgctggcggaatccatcggtattcacgttgagaagagctggggactggggcgtatcgtcaccgaaattttcgatgaagtcgcggaagcgcatctgatccagccgacctttatcaccgagtatccggcggaggtttcgccgctggcgcgccgtaacgacgtgaacccggaaatcaccgaccgcttcgagttctttatcggcgggcgtgaaatcggcaacggctttagcgagcttaacgatgcggaagatcaggcgcagcgtttccaggatcaggtcaacgccaaagcggcgggggatgacgaagcgatgttctatgacgaagactacgtcaccgcgctggaatatggcctgccgccgaccgctggcctgggcattggtatcgaccgcatggtgatgctgtttaccaacagccataccatccgcgacgtgatcctgttcccggcaatgcgcccgcagaagtga

SEQ ID NO: 173196 - DNA, 414 bp, Klebsiella oxytoca
atgaaaaaaataaagctaattgttggcagcgtgatctgtgcaagttatttattagcgtcagtgttatcaatggcaagtgataaaataaacagtaatgctgtccattttgataaaggcagcagcggtacgataataaaaagtactgtgaccgggaacgatgtcaatgattttacgctggtggcgaaagcgggccagatgatgcatatcagcatgacgagccagtggccgcatccttattttaatgttatcgcgcctgataataatgccatttataacggttcaatgagcggagatacctttgagcagcgtctggccgtcagcggtcaatatacggtgcgggtctatcagatgggcggcgcgcgtgatgaaggtaaaaccagcggttatgcgctgacgtttaaaatcaccgactaa

SEQ ID NO: 173197 - DNA, 873 bp, Klebsiella oxytoca
atgataaaaagttcgtggcgtaaaattgcaatgctagccgccgccgttccgctgctgctggcgagcggcgcactgtgggccagtaccgatgctatccatcagaagctgacagctctcgagaagcgttcaggcggcaggttgggcgtggcgctaatcaacacggcagataattctcaaatcttatatcgcggcgacgagcgttttgccatgtgcagcaccagtaaagtgatggccgccgccgcggtattaaaacagagcgaaagcaataaagaggtggtaaataaaaggctggagattaacgcagccgatttggtggtctggagtccgattaccgaaaaacatctccagagcggaatgacgctggctgagctaagcgcggcgacgctgcaatatagcgacaatacggcgatgaatctgatcatcggctaccttggcgggccggaaaaagtcaccgccttcgcccgcagtatcggcgatgccacctttcgtctcgatcgtacggagcccacgctgaataccgccatcccgggcgatgagcgtgataccagcacgccgctggcgatggctgaaagcctgcgcaagctgacgcttggcaatgcgctgggcgaacagcaacgcgcccagttagtcacctggctgaaaggcaataccaccggcgggcaaagcattcgcgcgggcctgcctgaaagctgggtggtcggcgataaaaccggcgccggagattacggcaccaccaatgatattgcggttatctggccggaaaatcacgctccgctggtattagtcacctactttacccagccgcagcaggatgcgaaaaaccgcaaagaggtgttagccgcagcggcaaaaatcgtgaccgaagggctttaa

SEQ ID NO: 173198 - DNA, 1032 bp, Klebsiella oxytoca
atgttcccgtcacagttaccgaaaccgcgccatcctgccgctgcggcgatcccctcgctgcgctgggccattattggccccggctggattgccgagcgctttgtgaaatcgttaaaagagctcagccgccagcgggtggttgccgtctcctcgcggacgcaacaaaaggccgatagctttgccgcccgctgggggatcccgcaggcttacgctcaggtggacgagatgctggcgcgaccggatattgatgcggtttacgttgccaccccgcataaccaccacttcccggacgggctgcgggttctgcaggcgggcaaacatgtactgattgaaaagccgtttgcgctgaaccggcgggaaggcgcggcgctaaaagcagaagccctgaaacaggggaagctggcgatggaggcgatgtggtgcgattacgcgccgaaatatgacgtgattcgccagctgctggatgacggcgcgctgggcgatctgcatacgctgctcgccgatcacggtgaatattttacttcggatcatcgcatttttaatgccgatcttgccggtggaccgatgatggatctcggcagctatctgacctcattcagcgtgatggtcggcggcgtgccgcaggacattgtcgcccgcgggcgccccgcccaaaggggcatcaatgggcaaatttcgatgctgtttaactgggaaaacggcttacagggattgctcaacaccacgctattcagcaatacgccgggcggcgcggtggtggccgggcgcgacgcgaccctggtccttgacgggcaattctatgcgccggggaattttaccctcgccgccagccaggggggacagatactgcgctgggaagagccgcgtaaccgctacgaccagctgttttatcaggccgaacattttgcctggtgcgtggggcaagggctcacggattcgccgattcgcccgctgaccagagttctggaaaacctgagcgtcatggatgaagtgcggcggcagattggcgtaatatttaacgaggagcgttaa

SEQ ID NO: 173199 - DNA, 1008 bp, Klebsiella oxytoca
atgacctgcattcgttttgcgttattaggcagcggttttataggccaggttcacgccgccaacctcgctcgccatgagcgaaccgttctggccatggtggcagacgccgagcccgagcgggcgaaaacgctggcctcccgctacggcgcgcgggcaaccaccgtcgccgaggccatcagtagcgatgccattgatgcggtgctcatcgccagctcgaccccttcacatgcggaactgctggaggcagccgcgcgcgccgggaaggccgtttactgcgaaaaaccgatcgacctttcgctgacccgcgcgcgccaggttgtcgacagggttttgccgctcggcgtgccggtgaccgtgggctttaaccgccgctttgacgccagccaccagcagctgcgtcgccaggtcgaggctggcgttatcggtaaaattgaactggtgcagatggtgtgccgggcatcggttatgccgccgctggcgtatctgcgcagctccggcggccagatgcgcgaccaggcaatccactttttcgatctgctgcgttttcttaccggcgatgaagtgacaacggttgccgccatgggagaggcgctggcgctgccggagctcgccgggatcggcgatgtcgatacctccattctcatgctgcggatgcgcggcggcgcgctggcgcagctggacaacacccggcgcaccggccacggctacgatgaacgcatcagcctgctcggcccggagggcgtactggagtccggcagtcaggcctcgcgcggcgtgacgctgtggcagggagcgcgctgcattcagcccggcctctatccggactggttcagccgcgtcgaggagtcgtactacgcgcatctggatgcttttgtccgctcgtcaggcggagaagaggagccggacctgccggggctgctggacgggctgcgggcgcaggctatcgccgaagccgccgtgctttccctgcagcaagggcaatttgtcagcgtcgaaccgctggcgtaa

SEQ ID NO: 173200 - DNA, 1020 bp, Klebsiella oxytoca
atgaaaagcatttcactggcggcgctggctaaacggatcggcgtgggcgtggcgacggttgaccgggtgcttaacgaacgcggcggcgtgtcgccggaaaccacgcgccgggtgctgcaggcggcgcgtgaagccggtttaaagcgtattttgccggaagaacgtcgtctgccctggcaaatcgaagtgttcctgagcgctaacgactcgcgctttttctctcgcctgacgcaggatttcgccgacgtggcggatagccttggctatcgccgactgacgctgcaccgcacgctggtggcggaatcctccccggaaaaactggcgaaaagccttcttcgcagcagtaaaaagcgccatgcgataattgtcttcggcaacgaacatccgctggtctatgaagccctgcgccagtgtcgcgaagcaaacgtaccggtaattacgctggtcaccgacctgcccggcgcgcagaggctttgccatgtgggaatcgatcagcagcaggcgggacgtaccgcgggcatgatgatggggctgatggcccatcagcccggggaagtgttgatgctctgcggtcgtcaggatttcagcgcccaccgctcgcggattcagggatttcgcgaggtgataagccagcgctttccgcatctgcagcttggtgaggtgctggcgggtgaggataaccggcagcggatcgaccgtttgctggaagaagccctgaaccgtaaccgcgacgcggtgggcatctacaataccggtctgggcaatagtctggtggcgcaggcgctggcccgccatcgccgttatggtaagtgctgttggattactcatgaacgctatagcaccacccgcgaacagctggcgcatggtgggatggcgttgacggtcgatcaaaatcctcatcagcatgccaggctggcggtggagctggccctgcgccacctggaaaccggctatcagccccatctctttcgtgacggcaaggtcgagtttatcctctatagcgctgaaaacgtcgactga

SEQ ID NO: 173201 - DNA, 924 bp, Klebsiella oxytoca
atgaatatcaagaaaacggttgttgcctctttgatagcctgcatgctgccagcggtcgtgatggcgaaagatatttcggtcggtgtttctatggcgctttttgatgacaacttcctgaccattctgcgcaccgccatgcaaaaagagatgcaaaaagagggcgtgaagtcccagatggaagatgcgaagggcgacgtctcgcagcagctacagcaggtgcagaattttattggccagggcgtcgacgccattatcgttaacccggtcgataccaacgcggtcaaaccgattatggaccaggcgaccaaagcgggcattccgctgatcttcgttaaccgtcgtccgcaggcgcagctgaccgataaaatggcctacgtcggctccgactccgtgctggcggggcgcttacagatggaagcgctagccaaagcgatgaacggcaagggcaacgtcgccattctgctcggcgacctggcgaatgaatcgacccgcgaccggaccaaaggggtcgaagaggtggtggcgaaataccccgatatcaaaatcgtgcagaagcagaccgccaaatttatgcgtaacgacgccgttgacgtagtcagcaactggatgaccagcggcgaagacattcaggcgatcgcctccaataacgatgaaatggccatcggcgcgctgcaggcgctggggaaaaaccccaaccatatcctgattgccggggtggacggaacgccagatgccctgcaaatgcttaaaaacggcaagatgatcgccacgattttccaggatgccaaagggcagggcgaaggcgcggtagatgccgctattaagctggccaatggcgaaaaagtggaaaaggtcatcgacgtcccttaccagctgatcaccaaagacaacatggctgaattcatcaatcgcaaccagaaatag

SEQ ID NO: 173202 - DNA, 1485 bp, Klebsiella oxytoca
atgaacgcttttgcacttgaagccgaagggatcagcaaattcttccccggcgtgaaggcgctcgacaacgtctcattacgcgtgcgtccggggacggtgcacgcgctgatgggcgaaaacggcgccgggaaatccacgctgatgaaatgcctgatcgggatctaccgtcccgataagggcgcgatccgcgtcaaaggggagccggtccagtttcaggatacgatggacgcgctgcgctccgggatctcgatgatccatcaggagcttaatctggtaccgcatatgacggtggcggaaaatatctggctcggccgcgagccgatgaaatacggtttcgtcgatcatcgccagcttgcccggcagactcaggaactactgaataaactgaatattcgtttatccgccgatcgcctggtaggggaattaagcatcgccgcccagcagatggtggagattgccaaagcggtttcgtggaatgcggatattgtgattatggacgaaccgacctcggcattaaccgagagcgaagtggcgcatctgtttaccattattcgcgatttacgccagcagggaaaagccattatttatattagccataagatggatgaaattttcaccattaccgatgagatcagcgtatttcgcgacggcacctgggtaggaagtcaacctaccaccgagtttacccgccagtcgctgattacccggatggtcgggcgggagcttacccagctctttcccaaattcaataataccattggcgaagaggtgctgaccgtgcgcaacctgtcgcgcaagggggtctttcacgatatcaactttagcgtgcgccgcggggagatcctcggcgtggcggggctggtgggggccgggcgcagcgaagtgatggaaagcctgttcggcatggagaaagccgatagcggcgaagtgctgattgacggtgtgccggtcactattgattcgccttcaacggcgattgaaaaagggatggcgctgctgacggaagaccgcaaaaagtccggcctgttcctcgtactgtcggtgctggagaatatgagtatcgtcaaaatgccggaatatatcggtaaaaccggttttgttcagcacctcaaaatggccgaggactgcatggagcagatccgccgcctgaatattaaaacccccaccatggatcagattattaataaccttagcggcggcaatcagcagaaggtgcttattgcccgctggctgctggctcagccgaaaatactcattctcgatgagccgacccgcggaattgacgtcggggcgaaagcggaaatatatcatctgattagcgaactggccaaccgcggcgtggcggtcattatggtttcttctgaattacctgaaattctcgggatgagcgaccgggtgatggtgatgcatgaaggacggattaccggcatcctcgataaagaggacgccgatcaggaaaccattttgtcgttggcatcccattga

SEQ ID NO: 173203 - DNA, 1032 bp, Klebsiella oxytoca
atgagcaatatgaaaataacggcgaccccgatcgatgagaaaccctctttctttgggcaattacgccaccggctgccgaaagataccggcatatttatcgtcatgctggtgattgccctgacttttgaaattgctggctggtacgtccgcgaccagtcctttttattaaacaccaatcgcctgatattaattgttttacaggtagcgattatcggtattatcgcagtcggggttactcaggtcattattaccaccgggattgacctctcctccggttcggtgatcgcgctcgccgccgtggtggcggcgagcctcgcgcaaacctccgacagcctgtcgccgatgttcccgtcgctggtcaatatgccggcgataatcccgattggcgccggcatcggcgtcggtcttctgtgcggcttaaccaacggttttctggtgacccgcaccggcatcccgccgtttattgccaccctggggatgatggtgtcggcgcgcggtctggcgcagtattacactcagggcaacccgattagcttcttatccgacagcttcaccgccatcggtcagggcgcgatgccggtgattattttcttcgtcgttgctgcggtcttccacatcgccctgaagcatacccgctacggtaaatacgtttatgctatcggcggcaatatgacctcggcgaaggtctccggtatcaacgtgaataaatacctggtgatcgtctataccatcgccggggcgctctccggccttgcaggcgtagtgctggcggcgcgcgtcagcagcggccagtcgagcatgggaatgtcctacgagctggatgcgatcgccgcggcggttatcggcggcagcagcctgatgggcggggtagggcgcatcaccggcactttaatcggcgccatgatcctcggcctgattaagagcgggtttacctttgtcggcgttgacgcctacgtgcaggatattattaaaggcatcattatcgtcgcggcggtgactatcgatatgcgccgcaaccgcaaaaagcattga

SEQ ID NO: 173204 - DNA, 1245 bp, Klebsiella oxytoca
atgataaccgtcaacggcgcacgtctgtggtcgacgctcaacgagatggcgcagctcggcgccacgccggcgggcggcgtgacccgactggcgcttagcgaagaggaccgccaggcgcgcaatctgctgcgccagtgggcgcgtgaagctggcttcccctgcgaagtcgacagtatggggaatatgtttattcgccgctgcggtaaacattcgcatctgcccccggtgttgaccggttcgcacgtcgattcccaaccgctcggcggccgctatgacggcatttacggcgtcctcgccgggctggaggcgctgcgcacgctgaacgaccgcggcattgcgaccgaacgcgatatcgtgctggtgaactggaccaacgaagaaggggcgcgctttgccccggcgatgctggcgtccggcgtctgggccgggcagtttagcgagtccttcgcgctcgcccgcgaagatcgcgacggcatcagcgtcggcgaggcgctggaggctatcggctatcgcggggagcgtcctgccgccgcctgcccgctccacgcctgctacgaagtgcatatcgaacaggggccgattctggaagaagaaggcgttgatatcggcctcgttcacgcggcaatgggccagcgctggttcaacgtcaccctggagggcttttccgcccacgccggaaccacgccgatgggcagccgccgcgacgcgctgaccgccttcgccgagctggcgctggcggtggagcaaatcggcatcgcccataatccagacgggcgcgcgactatcgggatggcgcaggtcattccgggatcgcgcaacgtagtaccgggaggcgtggcgtgcagtgtcgaatttcgtcatccgcaatccccggcgctggaagccatggaacgagcgctgcatcgcgccgctgaagcgctggcggcgcggggcgtggcggcaaacgtcgagcgcatttttgattatgcgcccattgcttttgatcgcgagtgtctggcgcgcagccagcgagcggcggacgaactgggctatagcgcgcgaaccatagtctccggcgccggtcacgatacctgctatatcagcaaggtcgcgcccgccagcatgattttcataccctgcgagaagggaattagccataacgaggcggaaaatattctgcccgcatgggccgagaaaggggctaacgtgctgctcaacagtttacgccttgccgccgatgagctgcccgctcgcagcgcgacgtaa

SEQ ID NO: 173205 - DNA, 483 bp, Klebsiella oxytoca
atgagtgataataacgagctgggcattctcgcccgccgcaaaattgaagcagaaataatcaagccgatttacgacatcctggtgcgggagataggtaaggctcgcgcccaggcggtcatcggcgaagcgattgaaaacgctgcgattgaggcggggaaagcctttgcccgccaggagccgaacggcgcggatattcgcagctttgtcgcgctgcagtacctgtgggaaaaagataacgccctggaggtcaaggtactggacgccgacgaccagcagtataactacaacgtgaaccgctgccgctacgccgagatgtaccacgaaatgggcctcggcgaaattggccatctgctctcctgcgcccgcgacgataagtttatcgtcggctatgccccggatgtggagctgacccgtaccaccaccattatgcagggcggaaagtgctgcgacttccgctatcgcgtgaaaaaggataagccatga

SEQ ID NO: 173206 - DNA, 1158 bp, Klebsiella oxytoca
atgaaaaccgtaaaaatcagcgcgctcagcgccgctattctgctcagtggttttgcctcatccgccgcgtggtccgcggccagcgaaaccgtcattatcggcctggcaggcccgctcaccggcccttccgcgcgtatcggcaaggatctggaaaacggcgcgcagctggcgattgacgatatcaacaagcagcacccgaccatcggcggcaaggcggtgaccttcaagctgcaatcggaagacgatcagtccgacccacgcaccgccgtcgccgtcgcccagcgtctggtggatagcggcgtcgcgggcgtcgtcggccactggaacaccggcaccagcattcccgctgcgcgggtttaccacgatgcgggcatcgcccaggtcgcgccggtcgccaccgggcacgcctacaccaaacagggtttcgacaccagcttccgcgtgatgggccacgacgatgacggcggacagtttgccggacagtacgcggtacaaaccctgaaggccaaacgcatcgcggtcatcgatgaccgtaccgccttcggccaggggctggcggatgagtttattaagtcgctggaagcgcagggaatcaacatcgtcgaccgccagtacgtcgatgacaaaaccgtcgacttcagcgccgtgctgaccgctatccgcagcaaaaacgccgacctgattttctttggcggcgtcgatagtcaggccgccccgctggcgcgccgcatcaaacagctgggcatgaacgccaccctgatgggcgcaggcggcttcgttagccagaccttcctccagttggcgcaaaaagagggcgacggcgtggtggcgctggagccgggactgccggttgagcagatgccgggcggtaaagccttcgagcaggcctaccagtcgcgctatcacacccatatcgaactgcacgcgccgttcgcctatgacgctacccgcgtgctggtcgcggcgatggaaaaagccgactccgtcgatcccgccgactatctgcccgccctgcgcgccattaactacgccggcgtgaccggacaaatcgcctttgataaagagggcaacctgaaatcgccaacctttaccgtttataaagtcgtcgacggcaaatggcagccgcaaaccgtactcggcggcgcaacaacgaagtaa

SEQ ID NO: 173207 - DNA, 720 bp, Klebsiella oxytoca
atgtctgatttattaaccgttaaccagcttagcgtccactacggcggcatccaggcggtgcgcgacgtctcattcagcgtgaaagagggcgagcagaccacgcttatcggcgccaacggcgcgggcaaaagctccaccgtccgcgccattaccgggctggaaccctttagcggcgaaattctgtttaacggcaaaccgatacgcaaacgtcgggccgaatccctgctgcgcgaaggactcgtgatggtgccggaaggacgcggcatctttgcgcgcatgacggtgctggaaaacctgcaaatgggcgcctggctacgacgcgacgcgacggcggtcaaacaggagatgcgcgccatcttcgctaatttcccgcgcctcgccgaacgccagcatcagctggcggggctgctctccggcggtgaacagcagctgctggcgctcaaccgcgccctgctcagccagccgcgcctgctgatcctcgacgagccgtcaatgggcctggcgccgctgatggtcgagaacatttttcgcgttatcgccaccctgcgccagcgcggcgtcgcgctgctgctgatcgagcagaacgcacgcctggcgctggaggcgaccgacagcgcctgggtgatggacagcggcagcatcgtcgagcgcggtcagtcgcaaacgctgctggccgacgatcgtattgcacagatttatttgggcgaaatgcccgtttaa

SEQ ID NO: 173208 - DNA, 768 bp, Klebsiella oxytoca
atgagcctgttaagcgtacgccatatgaccaagcgttttggcggtctgacggcggtcgacaacgtatcgctgagcatcaacgagggcgaaatctacggcctgattggccccaacggcgcgggaaaaaccacctgttttaatctgattaccgggctttacccggcggacagcggcgagttcgctatcggcggcgaagcctattttccgaagaatattgagaaagtgaccgccgcagggatcgcccgcacttttcagaacgtgcggctgtttaacgacatgtcggtgctggagaacgtaatggtgggccgccacgtgcgcacccgtaatggcctgtgggccgcgctctcccgccataaacgcgcccgcgctgaggaagcgcaaacccgcgagctggcctggcacctgctggattataccggtatcgcgcagttcgcccactaccgcgcctgcgacctcgcctacggccaccagcggcggctggagattgcccgcgcgctggcgaccgatccgcgactgttagcgctggatgaaccagcggccgggatgaacgccgccgagaagatggcccttggcgaactgctgctgcgtattcgcgacgacggcaaaacgctgctgatgattgagcatgacgtcaagctggtgatggggatctgcgatcgcctgatggtgctggattacggcaaaacgttaaccagcggcacgccggatagcgtacgccgagatccggcggtgatcgccgcctggctgggaggcagcgcccatgtctga

SEQ ID NO: 173209 - DNA, 1107 bp, Klebsiella oxytoca
atgacaacggcacaactcgatacgcctgtcgtctcccgccgcttctggtccgggatgaccctgttggtctgcgcgctgctggtggcgccgatggtcgccagccagctcggcggcaactactgggtgcgagtcatcgacttcgccctgctctacgttatgctggcgctggggctgaatattgtggtcggctacaccggcctgctggatatgggctttatcgccttttacgccgtcggcgcgtatctggcggcgctgctggcctcgccgcatctgctggacgtcttcccgattttaaatagctggtttccggacggcctgcacacctcctggctggtgattattccgctcgccgcgctggtggcggcaggctgcggtatcgtgctgggcgcgccgacgctcaagctgcgcggcgactatctggccatcgtcaccctcgggttcggtgaaattattcgcatcctgatgcgcaacctcgaccgtccggtcaacatcaccaacggcgcaaaaggcatttccggggtcgattcgctgaatctgttcggcctcaagtttagcggcgtctatcactggtttggttttaaagtcccggcgctgtggctgtggtactacctgctgatgctggcgatcgtggcgattattttcgtctgcctgcggctacagcattcacgcattggtcgggcctggcacgcgatccgcgaggacgaagacgtcgcccgcgcgatgggcatcaacctgcgtaattacaaactgctggctttcgctatcggcgcctcattcggcggcgtggcgggcgcgctgttcggcgcatttcagggctttgtttcgccggaatcctttaccctgcaggagtcgattgcggtcctggcgatggtggtgctgggcgggatggggcacatccccggcgtgatcctcggcgcggtgctgctgaccgcgctgccggaactgctgcgcagccaggcggcgccggtacagcaggcgctgtttggcgaagtgctgattgacccggaagtattgcgccagctgttctacggtctggcgctggtgctggtcatgctgctgcgcccgcagggcatctggcccgcgcgacatcaaggagcaaaagcatga

SEQ ID NO: 173210 - DNA, 915 bp, Klebsiella oxytoca
atgctcggcagcatctacgccctgatcgcgctcggctacaccatggtgtacggcatcctgcgcattattaactttgcccacggcgatattctgatggtcggcgcgttgaccacgctttccgggatgcacgcgctgaacgcccatttccccactttgccgccgctggcgcagctggggctggcgctggtgctggccatggcggtctgcgccctgctggcgatggcggtcgaacgctttgcctaccgccgcctgcgcaacgccccgcgcctggcgccgctgatctccgggatcggtgtctcggtactgctgcaaaccgtggcaatgatcgtctggtcgcgtaatccgctgatgttcccgcagatcctgtcaatggatgccatcgccgtgacccacggcagcgcagcgcatccgccggctctcgttaccgtcaccggaatcgtcaccgtcgcgctggccttcgcggtgatgcttggcctgtggctgctggtggagtacacccgtttaggtcgcggtatgcgcgcggtagcggaaaatccgcgcatcgccacgctaatgggcgtaaaccctaacgcaattatcgccctcactttcgccatcggcggcatattcgccgcgctcgctggcgtcatgatggccagcaactacggcaatgccagcttctccatgggctttctgcccggcattaaagcctttaccgccgcggtgctcggcggcatcggtaatattcgcggcgcgatgatcggcggcctgctgctgggccttatcgaatctcttggcgcaggctatctcggggacctgacccacggcgtcttcggcagcaactaccaggatatcttcgcctttatggtgctgatcctggtgctggtcttccgcccggccggtttgctcggcgaacgcgtcgcgcaccgggcttag

SEQ ID NO: 173211 - DNA, 930 bp, Klebsiella oxytoca
atgaaaaaaacagaacaatcagaggggccggttagctggtcggagagtacgttggccaacgatcccccgctgcgggcggtgcgcgccttcgaggcgatcgcacgcctcggcagcgtaaccctggcggcgcaggagctggcgatatcgccctcggcggtcagccatcagctcaaagtgctggaaggctatttgcagatcccgctcaccgcacgtcaggggcgacggctgaccctcagccagcaggggcgggagtattaccgctcgatccgcgcggcgtttaacgtgctgcgtcaggccactgagcacctggtcgatcaggtgcaaacccagcaggtgacgatcagcctgatcccgctgtttggcatgggctggtttattccccggctgccgtcattcgtgcacgcgaatccgcataccgaaatcaacgtggtttacgccaaccaccgcaactatcttagcgacgcttccgatatgtcgatccgctttggcaacggtcactgggttggctatcaaagcgaaaagctgatctccggcagaatggttccggtatgcagtcaggcttttctccgcctccatgggcatattgataccccggaacagctgttacaaatgccgctgctgcatgatgaggagcgcaccacgtggaaccagtggtttgtgcagcagggagtgaagcgcccgccgcgatcgaccgggccgatgtttgaggatggtctgctaaccctggcgggcgtacaggccgggttgggctgtgcgctaatgcgcgagccgctgatcgctccctatctgaagagcggcgagctggtgaaaatcttcgatgcggcaattgatgatggccgggattattatctctgcgtgcgccaggatagcgagatgacccccaatggcaaactattacaaagctggcttcgtcagcaggccttcggctga

SEQ ID NO: 173212 - DNA, 1881 bp, Klebsiella oxytoca
atgaactataacgaaacagcagacaaaatcctccacgcggtgggcggtgcggagaacatccgtatgctcacccattgcgcgacccggctgcgcatggagttcaacgaccgcgcaaaggttaacgatgcgcagattggcgccctccccggcgtgatcagcgtagtggagaagggcggccagttccagatagttatcggcaatgaggtgcagcaggtttatcgcctgctcaataaggcgctgccggagaaaaaaggcccggcaggcggcgataaaaacgcgaagccggccggcatcgtcgcccggattatcagcgttatttcgaccacctttaccccggtgatcccggcgattaccggcgcggggatgattaaagcgctgctggccattctcaagctcaccggggtgattagcgaaaccagctcgacgtatcagctgctgaatattattgccgacgccgccttcttcttcctgccggtgctgctggcctacggcgcatcgctgaagtttgaatgcaacccgattctggcgatgaccctcgcgggcgtgctgctgcatccgggcatcggccagatgctggcggccggtaaagcggtggattttgtcggcatcaacgtcctgctttccgattacgccggttcggtgctgccgattattctgaccgtgtggctgatgtcgtgggtggagcgcttcgccgaaaaagtgtcgccatcgattatcaagtttttcgttaagccgatgctgattctgctgattaccgcgccgctggcgctggtggtggtcggcccggcgggcattttgcttaacgacctggtggctgcgggggcgggcgctatcgaccgccacgccagctggttaatcccgatgctgatgggcaccctgcagcccttcctgatcattaccggcaccgcctgggcgatgacgccgatcgccaccggtcagctgagtaaaagcggttacgagatgattaacggcccggggatgctggcctcaaacgtggcgatgggagcggcgacgctgtgcgtggcgctgaaaaccaaaaatagcaacctgcgccagctggcctcctcgtcgggatttaccgcactgctggggatcaccgaaccggcgctgtacggggtgctgctcaagttccgccgcgtgctgattgccgcgatgatcggcggcggctgcgccggggtctatgccggggtgagcgggctggtgcgctacgcgtttgtctcgccaggcctcgcggcgctgccggcgtttatcggtgaaaacccgatgaacatcgttcatgcgctggtgacctgcgcgatttcgatcgtggtgacctttaccctgacctggtttctcgccttcaaagatgttcctgaggaacaagaagcggtggacgaggcgccgcagcctgcggcgagcgctaaaagcgagggggagacggaggtattaagcctgctgcgcggtcaggtggtggcgctcagtgaagtgaatgacgacgtcttttccggcggtctgttgggcgaggggctggcgattcgtcccgaagagggagtactgcgcgcgccgtttagcggcacggtgatgatgtttctgccctcctgccacgccgttggcctgcagagcgacagcggggttgagctgctgatccatatcggtattgataccgttaatcttaacggccagcactttagctcatcgctgaaggtgggggatagggtggaggcggggcaggtgctgatccgctttgatattcccgccatcgaacaggccggatacgacctgattacgccagtcattgtggtcaacggcgatgggcagcacgctctgcgctttaccgacgccgcccgggtggattacggcgagacgctgatggtgcaatccgttaaggaggcgcagccatga

SEQ ID NO: 173213 - DNA, 1425 bp, Klebsiella oxytoca
atgatttatcaacagcaggcccggttcccggacggttttctgtggggcgcgtccacctcagcctatcaggttgagggcgcgtggaatgaagacggtaaaggaccgtcggtagtcgacatgcttagccatccgccgggaacggcggacttccgcatcgccagcgaccactatcatcacgtggaggaggacgtcgcgctgatggcgcagatggggctgaaggcctaccgtttttcggtggcctggtcgcgggtgatacctgacggcgatggcccggtgaatccggatgggctggccttttatcaccgcctgatcgacgccctgacgcgccacgggatcacccccatcgtgacgctctaccacttcgacctgccgtgggcgctggagctaaaaggcggctggctgaaccgcaaaaccggggaggcattcgtgcgctatgccaggctgctgttcagcgaatttgccgccaaagttccgctctggctgaccatcaacgaacagaacaccatgattctgcatcccggcgcgattggcgtgcccgccgatcgtgaactgccggataagaaggcgctgtaccagcagaatcatcatatgatgctggcccaggcgcagatcttcgccctgtgccaccgtgagttccccgggctgcgcatcggcccggcgataaacaccacgtcgatgtacgccgaaagctgtaagccggaggacgccatcgccgcgcataactgggagacgctgcgctgctggagctttctggatgttgcggtgcatgggcgctacaacgccctggcgtgggcctatatgcaggatcgcggcctcgcgccgaatcggcagccggaggatgcgctgattttgcagcaggggaggccggactttatcgccattaattactactcgaccgccaccattgccgccagccggggcgacggcggggacgttgcgccccgcgcgggcgatcagcaaattatgctgggcgaagagggggtttatcgtccggcggaaaatccatgggtcggcaaaaccccctacggctgggtggtcgacccggtagggctgcgtctgacgctgcgtaaagtgtgcgagcgctatggtctgccgattctgattagcgaaaacgggatgggcgcgccggacaagctggagcctgacgggacggtgaatgacgactatcgcatcgccttcctcgacgcgcatatcgcacagatgcggctggcgattgccgacggcgtcgagctgatgggctactgtccgtgggcggcgattgacgtggtcagcacccatcagggatacgccaagcgctacggttttatttatgtcgatcgcggcgaggatgacctgaagcgcctgcaaaggatccgcaaacgcagcttctggtggtataaggatgtcatcgcgcaaaacggcaaccacgacgagtcgcagagatga

SEQ ID NO: 173214 - DNA, 840 bp, Klebsiella oxytoca
atgattgttcagaaggtgctcaataatagcctcgtgctctcgatggacgacgataacagggaggttatcgtcatggggaaaggcattggtttcaatagcaggcccggcgatgcaatcgccccggagaagatagagaagctattcgtaacccaggcgctcggcgcgcgcagcggctatcttgaggcgctctccgccattccggatgaggtcattgagatggccgcaatgattatttcccgcgccaatatgcagctcgccagcaaagtccgcgagcagattttctttaccctcgccgaccatctgactttcgccatcgagcgcagccgcaaagggatcgctattcagaaccgcctgctgccggaagtcaggcgcttttatccgcagcagttccgcgtcgccagtgaggcggtgacgattattcgccaacagtacgggattgaactgccggaggaggaagccgggaatatcgcctttcatctggttaacggccagagcgagggcgacgacgtagcgcagaccatgcagtcggtgaaaatgctgaaggatatttttaatctcgtgcagtaccactttaagcagcagatagacaccgaatcgataaactactcgcgctttctggtccatatgcagtttttcctccagcgtttacaggagggggagctggacggcgcgcgggacagctttctgctggtgcaggtgattaaggcgtatccggacgcttaccgctgcgcgctgctgatccgcgactacgtcaaagcccagctcgatatcaccctcggcggcaacgagctgctgtggctcaccgttcatctggtgcggatcgcggggctggatgtgtga

SEQ ID NO: 173215 - DNA, 339 bp, Klebsiella oxytoca
atggcaaagccgtcgacccgaacctactctcgttacagtcgcgacgcagcacggttgctgggaatgatgatccgtaccgcacgcatagaatccagactcactatcgaggagctggcagaacgtgctggcgtgtcgcgtgggctggtttatcgtgctgaggaaggcgatatgggatgtgcgattggcgcggtatttgaactggcgacaatagtgggcgtgccgctgtttacgccagagcgttctgctctggcgttacatattgctaatgcagagaaaacgctgtcattaatgccgcgtgcggttcatcactcaaggaaggtgataaatgatgacttctga

SEQ ID NO: 173216 - DNA, 1293 bp, Klebsiella oxytoca
atgatgacttctgagaatagccttgagcaagtgtatgtctggatctggctgcctggagcaacagaacccgttgtcgccggagtgttaagcagagacaacggtcggtttattttcaactacggccgcagttatctggagcggaaagaggcgatagcggtttatgtgccggagcttcctttagtcagaggcgcaattgtacctgcccctggtttgcaaatggctggcgcgttacgcgatggcgctcctgatgcctgggggcggcgagttattctgaaccgactgatgggcgcacaaggcagagataccgatcccaacaccctggatgaaatgacctacttacttgagtccggttccgatcggattggtgggcttgattttcagcgctctgcgacggagtatgttccacgcgcggcccgaggagcatcgcttgaagagcttatgcaggcagcgtcgatggtggaaaacggtataccgttaaccgtcgatcttgaacaggcgttatttcacggcacttcactcggtggagcacgaccaaaagcgatgatcgaatttgggaatcgtaaatttatcgctaaattttcttcttcaacagatacctataatgttgttaaaggcgaatatatcgccatgcgcctggcaggctgcgttgggttgaatgttgcgcctgttctctttcgccatactgctggtaaagatgttttgcttatcgagcgttttgatcgcgtccaaagcaagaccggttggcaacgccgcctgatggtgtcagcgctgactatctttggtcttgatgaaatgatggcaagatatgcgagctatgaagatttggcggacattatacgtcagcgttttagtgcccctaaagagacgctgcgggagctgtttgggcgacttgtttttaacattatttgtggtaataccgacgatcatgccagaaaccatgcggcattttgggatggtaaaaggcttagcctgacgcctgcatatgacatttgtcctcaagggagagccggcaatgaagccacgcaggctatgctgatcgtaggcgaaaatcggatgagtaaccttgcggtttgcctgtcggctgccgaccgttttttactgagcagacgtgaagccattgagcttattgcccattatcttgatacggtccatatgaactggaaagccctcggtgatgaggtggggttaagtgaagtggacagaaaactcttctggggaaggatgttttttaatcctttcatatttgaaggcgcgccagaagagattttgaggctacgtaagtcgtggctttaa

SEQ ID NO: 173217 - DNA, 1005 bp, Klebsiella oxytoca
atgaaaaccaaacgcgtaaccattaaagatatcgccgaactggcgggcgtttccaaagcgaccgccagcctggtgctgaacgggcgtggcaaggagctgcgcgtggcgcaggaaacgcgcgagcgcgtgctggcgattgcccgcgagcagcactatcagccgagcatccacgcccgctcgctgcgcgacaaccgtagccacaccatcggcctggtggtgccggaaatcaccaactacggctttgcggtcttttcccatgagctggagatgctgtgccgcgaagcaggcgtccagctgctgatctcctgtaccgatgaaaaccccggtcaggagagcatggtggtcaataacatgattgcccgccaggttgacggtctgatcgtcgcctcctgtatgcacaacgatgccgactacctgaagctcagcgaacagctgccggtggtgctgtttgaccgctgtcctaatgaaagcgcgctgccgctggtgatgaccgattcgattaccccaacgacggagctgatttcccgcatcgcgcctcagcatagcgatgagttctggtttttaggcggtcagccgcgtctgtcgccctcccgcgatcgtctggccgggtttacgcagggtctggcccaggcgggtattgaattgcgcccggagtgggtgatcaacggcaactaccatcccagctccggctatgagatgttcgccgccctctgcgcgcgcctgggaaggccgcctaaggcgctatttaccgccgcctgcgggctgctggaaggggtactgcgctatatgagccagcaccatttactcgactccgacatccacctggcgagctttgacgatcactatctctacgattcgctgtcgctgcgtattgataccgtacagcaggataaccgccagctggcctggcactgctacgatttaatcagtcagctgatcgagggcaacacgcctgaaccgctacagcgctacctgccggcgacgctgcagtttcggcatcggtga

SEQ ID NO: 173218 - DNA, 1401 bp, Klebsiella oxytoca
atgtcacttccatcacggctgcctgcgattttgcaggccgttatgcagggccagccgcgcgcgctggccgatagtcactatccgcgctggcaccatgcgccggttaccgggctgatgaacgaccccaacggctttgtcgaatttgccggacgctatcacctgttttatcagtggaacccgctcgcctgcgatcataaatttaagtgttgggggcactggagctccgccgatttactgcactggcagcatgagccgattgcgctgatgccggacgaagagtatgaccgtaacggctgctactccggcagcgcggtggataacaacggtacgctcaccctgtgctataccggcaacgtgaagtttgccgatggcggccgaaccgcctggcagtgcctggcaacggaaaacgccgacggcaccttccgcaaaattggcccagtccagcccctgccggagggctacaccggccacgtacgcgacccgaaagtctggcggcacgaaggacgctggtacatggtactgggcgcgcaggatcggcaaaagcgcggcaaggtgctgctgttcagctccgcagacctccatcagtggacgagtgagggcgaaatcgccggctacggcctcaatggcctcgacgacgccggctatatgtgggagtgcccggatctgtttccgctcggcgaccagcatattctgatctgctgcccgcaggggatggctcgcgaagaagagcgcttcctcaatacctatccggcggtatggatggccggtggtttcgactacgaccgcgccgctttcagccaccgcgagctgcacgaactggacgccgggtttgagttttatgccccgcaaaccatgcacacccgcgatggccgccgtctgctggtcggctggatgggcgtgccggacggcgaagagatgcttcagccgactcttgccaacggctggatccatcagatgacctgcctgcgtgagctggagttgatcgacggtcagctctaccagcgtccgctgcgcgagctgaccgccttgcgcggcgaagcgcacggctggccggggaacgccctgccgctggcgccgatggaaatcgccctgcaaaccgcccggaacgatgcgttaagcctcgacttcggcggcgcgttgacccttgagcgcgatacccgcgggattcgcctggcgcgacgcagcctcgccggcgacgagatgcactatcgttactggcgcggcgaggtccgttcgctgcggattttcatcgaccggtcgagcgtggagattttcatcaacgacggcgaaggggtgatgagcagccgctgcttcccggcttatccggcgcagctgattttctccggcagcgcgccggacgcattctgctactggccgctgcgaacatgcatggtagaataa

SEQ ID NO: 173219 - DNA, 1371 bp, Klebsiella oxytoca
atggattttgaacagatttcccgctcgctgcttccgcttctgggaggcaaggaaaatatcgccagcgccgcgcactgcgccacgcgcctgcgcctggtgctggttgatgacgcgctggctgaccagcaggccatcggcaaaattgaaggggttaagggctgctttcgtaatgccgggcagatgcagattattttcggcaccggggtggtgaataaagtctatgccgcttttattcaggcggcaggtattagcgagtccagtaaatcggaagccgccgacatcgcggcgaaaaagcttaacccgttccagcgcatcgcccgcctgctgtcaaacatcttcgtgccgattatcccggccatcgtcgcttccggtctgctgatgggcctgctgggaatggtcaaaacctacggctgggttgacccaggcaacgccatctacatcatgctggatatgtgcagctcggcggcgtttatcattctaccgattctgattggctttaccgccgcccgcgaattcggcggtaacccctatctcggcgcaacgctcggcggcattctgacccacccggcgctgacgaacgcctggggagtcgccgccggtttccataccatgaacttcttcggcctcgaaatcgccatgatcggctatcagggtacggtgttcccggtgctgctggcggtctggtttatgagcatcgttgaaaagcagctgcgccgcgcgatccccgatgccctggacctgatactgacgccgttcctgacggtgattatttccggttttatcgccctgctgattatcggcccggccggtcgcgcgctcggcgacggtatttcgtttgtcctcagcaccctgattagccacgccggctggctagctggtctgctgtttggcggtctctattcggttatcgtcattaccggtattcaccacagcttccacgccatcgaagccggactcctcggcaatccctccatcggcgtcaacttcctgctgccgatttgggcgatggctaacgtcgctcagggtggcgcctgcctggcggtgtggttcaaaaccaaagacgcaaaaattaaagccatcacgctgccctcagcgttttccgccatgctgggcatcaccgaggcggcgatttttggtatcaacctgcgctttgtgaagccgtttatcgcggcgctgatcggcggcgcggcgggcggcgcgtgggtggtatccatgcacgtctacatgaccgcggtaggcctgacggcgatccccggcatggccatcgtgcaggccagctcgctgctgaactacattatcggaatggttatcgcctttggcgtcgcctttacggtttccctggtgctgaaatacaaaacggacgctgaataa

SEQ ID NO: 173220 - DNA, 1518 bp, Klebsiella oxytoca
atgtatagaaaaagcacacttgcggttcttatcgctttgctaaccggcgccgcctcagcccacgcgcaaacggacctcagcaccattgaagcccggctcatcgcactggaaaagcgcctgcaggaagcggaaaacagggcgcaaacggcggaaaaccgcgccgagtcggcggagaaaaaagtccagcagctcaccgcgcaacagcaaaaaaaccaggacacgactcaggaagtggctcagcgtaccgccaaacttgagaaaaaggccgatgagaaaagcggctttgagtttcacggctacgcccgctccggcgtaataatgaatgattccggcgccagcaccaaatccggagcctacatgacgccagcgggggaaaccggcggagcaatcggccgtctgggaaaccaggccgatacctatgttgaaatgaaccttgaacataagcagaccctggataatggggccaccacccgcttcaaagtgatggtcgccgacgggcaaaccacttataacgactggacggcaagcaccagcgatctgaacgttcgtcaggcctttgtcgaactgggtaacctgcctacgttcgccgggccgtttaaaggctccaccctgtgggccgggaaacgttttgaccgcgacaactttgatattcactggatcgactctgacgtcgtgtttctcgccggtaccggcggcggtatctacgacgtgaagtggaacgacagcctgcgcagtaatttctccctttacgggcgtaacttcggcgacatcgatgattccagcaacagcgtgcagaactatatcctcaccatgaaccacttcgccggtccgctgcagatgatggtcagcggtctgcgggcgaaagataacgacgagcgtaaagataccaacggcaatctggtgaaaggcgatgcggcaaataccggcgtacacgcgctgctcggcctgcataacgacagtttctacggcctgcgcgacggtagcagcaaaaccgccctactctacggtcacggcctgggcgcagaggttaaaggtatcggctctgacggcgcccttcgttcgggagccgacacatggcgcattgccagctacggtaccacgccgatcggcaaaaactggtctatcgccccggcgatcctggcgcaaagcagcaaagatcgctatgtcgatggcgatagctaccagtgggcaacattcaacatgcgcctgatccaggagatcaatcagaacttcgccctcgcctacgaaggcagctaccagtatatggatctcaaacccgaaggttataacgatcgtcatgcggtgaacggtagcttctacaagctcaccttcgctccaacctttaaggtcggcagcatcggtgatttcttcagtcgtccggagattcgtttctacacctcctggatggactggagcaaaaaactgaataattacgccagcgatgacgcgctgggcagcaacggttttaactcgggcggcgaatggtcgttcggtatgcagatggaaacctggttctga

SEQ ID NO: 173221 - DNA, 924 bp, Klebsiella oxytoca
atgaatgcaaaagtttgggttctgggcgacgcggtggtggacctgctgccggagagcgaaggccgcctgctgcagtgccccggcggcgcgccggctaacgtagcggtaggcgtcgcccgccttggcggaaacagcgggtttatcggacgcgtcggcgacgatccgtttggccgctttatgcgtcataccctgcaacaggagcaggtcgacgtcagccatatgcacctcgacggccagcaccgtacctccaccgtggtagtcgaccttgacgatcagggggaacgcacctttacctttatggtgcgccccagcgcggacctgttcctcaccgaagaagacctgccgccgtttgccgccgggcagtggctgcacgtctgctctattgcgctcagcgccgagcccagccgcagtaccaccttcgcggcaatggagcgcattaaatatgccggcggtcgggtcagctttgaccccaatatccgcccggatctctggcaggatcaggaactgctgcacgcctgcctcgatcgcgctttgcggatggccaacgtggtgaagctatcggaagaggagctggtattcatcagcggcagtgatgatttagcgcatggaatcgccagcctaaccgagcgctatcagccggaattgctgctggtgacccagggtaaggcgggcgtgcttgccgcctttcagcagcagtttacccatttcagctccaggcccgttgtcagcgtggacaccaccggcgcgggagacgcatttgtcgccggactgctcgccagccttgccgccaacgggatgccgacggatatcgccgcgctggaaccgaccctcacgctggcgcaaacctgcggcgccctggcgacaacggcgaaaggcgcgatgaccgccctgccttatcagcgcgatcttaatcgccagttttaa

SEQ ID NO: 173222 - DNA, 390 bp, Klebsiella oxytoca
atgaaaaaagcaatgattgcgttatctgcgattctggtagcagctcctgtttttgctgcaacgacacacgcaaccgatgataccgtcgcggcggcccacgaaggggcgaacaccgcgaaggaaaaactgcacgaggcccagcaccagggtgaagagcagcagctgaaagccaaacatgcggcagaaggcaaaagcgatagcgtaggcagtgaagtcagcgaaggcgcgcagaaaacctggaacaaaaccaaagaagggactgagaaaggctggaacgccactaaagaaggcaccgaaaaaggctggaataagaccaaagaggtcagcaaagaaggctgggataaaaccaagcagggtgccgaagagctgaaaacaaaagtcactgaataa

SEQ ID NO: 173223 - DNA, 498 bp, Klebsiella oxytoca
atgaaaaagattctttcactggcaattattttatcgtgtgcttttacttccgcctcatgggcggatggccctggcggcaacagccacggtcagcagcaggtctggcagcaagacgccgaccgcggcggcccggggggcaaccgccagcagggggcgcaggccaacaaccatcagggcaataatcatcaggggaacggtgataaccgtggcccggatcgcggcgataaagggcgcgggggccaggcgcatgatagtcgacctcaggcgcgtcatgagcaggatcactttgcgtggaacgggcacgatttccgcaaaggtcagccggctccggaacgtttccgcggtaatgattatcggattaacgactggaacgatcgcggattaccggcaccaccgcgcgggcagcactggtcgtatattgacggcaactatgtgctgattgccgccgccaccgggattattacgtctatcctgattaacggcgcgctgaataactaa

SEQ ID NO: 173224 - DNA, 726 bp, Klebsiella oxytoca
atgatgaagagcgcccttatctgcttgctgggcatgctttctgccgcgccgctttatgccgggatcatgcctgccgccaccaggatggtctatacggaaggacagcgcgaaaaaacgctgatgctggcaaataccaatgcctatccggtgattattcaaagctggatcgacgatggtgcgggccatcctgattttgaacaggcgccgtttgtcatcctccccgccgttttccgtctggaacccggagagcggcaggggctgcgcattatatataaccaggatcccttgccgacggatcgtgagtcggtgttctggattaatctctatgagatccctccgctggagggaaaaaagtcgcaggatgctcgcctgacgctggcaatgaatacccagttaaaactcttctggcggccgaaggcccttgcaacttcgcttgaagagtcaatagcaaagctgaactttaggctgcggcaggaaaatggcggttggggaatagaatgtgataatccttctcctctcaacgtttcatttacctctattactctgttaaacggtggtcaggaaaaaggggtcaaagcgcagatggatatgatgacaaaagcctatagccgtcgcatctatccgttggaggcattcgctaacccacccacaggccaaaaaatccgctttcgttatttaaatgatgacggcgcttctgttgaacacaccgtcttacttaagccctaa

SEQ ID NO: 173225 - DNA, 1332 bp, Klebsiella oxytoca
atgaaaaatatcattaagctgggtatcactctgatgctactcctggctgccgcgccaggctggagccgatgcaccaaaaccagcgcgccacaaacggaagatgggcgaacggcaatcattccatttggaaaaattaacctcactgatgaatattttatgccggtgggatcattactggccagcatcgtcgttcctcccactaactatacctatggcggagcaacagcctctacggtgctctgggagtgtgatgaggcagatctttccggtatttacttcctggtggcgaccaacggtgacgatcgggttggcggttactatgatattggcggtcccgacgggctaagcgatgtctatgcgacgtggttcgcctacgttggcatccgtcagacaatgggcggcgtcaccttaacccgctactggaagaaattaccgctctccagctggaataccacttctaatggtaagatccaaattcgtctgcaggatataccgccgctgcaggccgagttgtatcgggtcagcacgctgccgggcaaatccgccagttccgcctattgtggcaacaacaatgataatggtagaggtattgcctttggtaaagccgtaggagcgatttatacctgtacgcagccgaacagctatattcagcttgctggcgacgcctcagtctctttttcctttagtcatgacaaagtaggtgaggacagcgcatcaaaatttgatttctggggcgcagataatggatttggttacggcatgcgtacgggcagcgccatttacagcgttcccacgtgcgtcgcccgtagcgccacgcccatcgtgatgctgccgacaatttcggtcccggaactggaagcgggaatgaaagccacctcctccttttcagtacaagttgaatgcagtgataccgttcagtccggcattggcgacacccaaacagcaatgggtttccaggtttctgaaggtgcatacagcgcagcgcagtctctcgggctggttaacggcagcggcggcgtcagcgcgctggtatccgacaactacttttccgcagatatggctaagggcgtaggcattacgcttgcccatagcaacaagcctggcgaagagcttatttttgttggccagcccggtttttccagcttaacgccgggaggcaataatgcgggctggtacccggtcatgcagggcgcaacccaggccggaagcgttaaaagcggttatacctattacacttactcactcattgccagcctgaaaaagctaaacgggcaaagcatcacgccgggtaaagtctacgctacagcttatgtactggtgaaaatgcaatga

SEQ ID NO: 173226 - DNA, 2529 bp, Klebsiella oxytoca
gtgaaatacactcttgttttatgttctgtaatagcatcaatctccggatcgtacgcagcggatagcactccggaaaatgcattgtccgactcatctgcggccgatgattatattttcgagcctgaattatttcgcggtggaagattcagccagtcggctctcgcacagctggtgaagaaaaatagcatcgctccggggaaatacagagtcgatgtctctgtaaatagccactttgtcgataatattgaagttgaattcatcaaactcaatgacgattcggtttctccttgcttacctgagacctttttcaaaagtgcgggtattaaacttacgccgccaaccgccgccaattcatcatcagccccccgctgctattttttaaagcaggtagtaaaaggcggtagcgtggatatgaacgttgcgcagctacgtcttaatctcagcgtcccccagacagaaatggacagagcgcctcgcgggtacgttgacccggaagagctggattcggggacttcagtcggtttcgtaaactatatcagcaactattatcatgtttcctattccggaaagaatagcggcaatcaggactcggcctgggcttcgctaagtggcgggatcaatcttggaaaatggcagtatcggcagttatccaatttaaactggagccgcgatggcggtagtacctggaaaaatatccgtagcttcctgcagagacctctacccgaatatggcagccaactcacggcgggcgagctggtcacggcaggtcgtttcttttccggtctgaactaccgcggcttcagccttgctacagatgaccggatgctgcctgattctcaacgcggctacgctcctgttattcgtggcgttgccgtcactaacgccaaagtatccgtccgtcaaaatggtcaggaaatctaccagacaacggtcgctccgggagcgtttgaaattacagacctctatccgacgagctatagcggcgatctcgacgttgaggtgagcgaagcggacggatcggtcagccgcttcagcgtccccttctccgccgtaccggaatcgatgagggcgggcatatcccgctacaacttcgagctggggaaaacccgcgataccggcgaggaatcgctattcggcgacataacctggcagcgaggcctcagtaacgccatcactatgaacagcggtttgcgcatcgcagactcctaccaggcaatcatgttcggcggcgtttacggtagctggctgggggccctgggcatggacctcacctggtcgcatgcaaaggtgcccgatagcggctataccgaaggctggatgacgcacctttcctggagcaaaacgtttcaggagacggatacgacggtctcccttgccggataccgctattcgaccagcggctatcgcgaccttagcgatgtgctcagcctgcgcgatagcacacattatggcgatagctggcaatcgtccacctacagccagcgttcccgattcgatatttcattgagccaaagcattggccagcttggcagcctgtatttgtcgggttcgacgcaggattaccgtgatggccgcaatcgagatacgcagttacagtttggctatagcaacagttttcacggcatcagcaccaacctgtccgtcggccgtcagcgtatgggcagctatggcgataacggtagcatgcaaaccatcacctcgctctcattctcaataccgctgggcacctccagcacgcgagcgccgacattaagcacctcctggactcattcgaccgatggcggcgatcagtatcaaagttcgctgaacggggtgattgatgaacagcaaacggccagctatggcctgaatatcagtcgcgatcagcagtaccgcaacaccgtcttcagcggcaacctgcaaaaacggttctcggataccaccattggagtgaacgcttcgaaaggcgacgggtactggcaggcatccggcagcgcccagggcgcactggctattcactccggcggcctcactttcggcccgtatctgggcgacacttttgccctcgttgaagcgaaaggcgcggcgggagcgaaagtgcttaacgctcaacaagtgacgattgataaccagggttatgcgctggtcccttcgttgacgccatatcgctacaaccgggtcacgctggatccgcaaaatatggacggtagcgccgagctggtggatagcgaaaaacgtgttgcccctctggcaggctccgtcagcaaagtggtttttcgcacccgtagcggtacagccttgttaattaaagcccgattagccagcggcgaatcattgccgccgggttcggatgtcctggatgagggcggcaacgtcatcggtatggcgggccagggaggacaaatatacgtgcgtagcgaaaaaagccaggggcactttgtcgtccgttggggagataagtcagaagaacgctgcacgctgccttttgatatttctggcgcgcagccagagctgccgatggtcagattatcctcagtctgttcacgttaa

SEQ ID NO: 173227 - DNA, 711 bp, Klebsiella oxytoca
atgcgcatttatttctcattagtagcaatgcttcttttatgcctgagtcatcatgtctgtgctagcgtagtgatgaccgggacgcgtattatttaccctgctcaggctagcaataaatctatccagctaaaaaatccggaccagcaaccttatattgttcaggttcaggtcgacgatggcagtgaaaagaaaccagctgatgaagaagatagcaacttcctgctgacgcccaatatatttcgcatggagccgggcagcgcgcaaacggttcttctaaagtatattggcaatagtctaccgcaaaataaagaatcaattttttatatgaatttcacccaacttccggcgacaaaatcggaaaaaagtgggagtaatcagctcgttttagccatcaccaatcgggttaaaattttttatcgccctcagggaatagaaggaaccccgggagagacggcgcagaaaatgaccttttcgcttagcggcaaaaaaataaaagtcactaattctgctgggtactttgccgttgtccgtcgcgccagtttagtgattaacggtcgcgaaattaagctagctgataggcaaatggtcgcgccgcaatcatccgcagagtggttaccttcagacccggtgtccggcctcaagggcgcacgtctgcggttagttttggtcaatgattacggcatagatgtcatcaacgagcgcaccttatag

SEQ ID NO: 173228 - DNA, 558 bp, Klebsiella oxytoca
atgactaatcagttcaagaagatagcaattatcgctgctttcggtatgttgccttgcgcagcttttgctaccccaaccgttacctttcaaggggaagtcaccgaccagacctgttctgtcagcattaacgggcaaaccagctctgtcgtcatgctgcctaccgtagccacaactgacttcggccctacccttgccaatggacaaacggctggactgaccccattcaccgtctccatcagcgattgtactgcgccggcgaccgatattaacattgccacgaaattccttggctatgatgtggataccggctccggcgttctgggcaaccgcgcaaccagcgatgccgccgtcggatttggtattcagttaacggcttcaagcgatggttcaaatccggtagtgctctctggcccaacggctgttaacggactggtactgaaagcaaccaaaactgaagcaagctacgagttcggtgcacgttattatgtcgttaaagcgacaggcgctaccccgggtaaaattacctctgtagccgaatatacgctgagctacttctaa

SEQ ID NO: 173229 - DNA, 1179 bp, Klebsiella oxytoca
atgaccgactgtgtaattcccgaaattaaagccactgaagaagaaatgattgcgatccgtcattatttacacgccaatccggaattaagtctggaagagtttaataccagcgagctggtggccggaaaactgaccgagtggggctatacggtaacccgcgggctggcgaaaaccggggtggtcggaaccttgagcaaaggcgattctccacgcactatcggcctgcgcgccgacatggacgcgctgccgattttcgaagcgaccgatctcccgtgggctagcaccgttgccgggaaaatgcacgcctgcggccatgacggtcataccaccattctgctggcggcggcgaagtatatcgcctctccggcctgtcagttcaacggcacggttcacctgatattccagcctgccgaagaagctatcggcggcgcggatttaatgattaaagacggcctgtttgagcgctttccctgcgagcgcatcttcggcctgcacaatatgccgggcctgccggtagggaaagttggcttttacgccggtaattttatggcctcggcggatacggtaaaaattaccattaccggctacggcggccacggcgcgcaccccgagcgcaccgtcgatccgattgtcaccggcgcggcgctggtgatgaatctgcaaagcatcgttgcgcgtaacgtaccgccgggcgaaaccgcggtagtgagcatcggcactttccaggcgggcattgcatcgaacgtcattccggagaacgtggtgatggagctgagcgtgcgggcgatgaagccggaaatccgcgacctgctgattaaacgtatcaaggagcttgctgattttaccgccaaaagctacggcgccagcagcgaggtagaggtctttgactcttatccggtactgaccaacagcgttgaagagaccgaattcgccaaagcgctggcgctggaagtctttggcgaggagggcgtgctggaatccatctcgccgatgaacgccagcgaagattttgcctttatgctccagcagcgccccggctgctacttcctgctgggcaatggcgagaaaggcgggaagggtagctgtatggtgcataaccctggctatgactttaatgacgatattatttccaccggcgcgacgctgtttgcccggttagttgaaacacactgccgttga

SEQ ID NO: 173230 - DNA, 777 bp, Klebsiella oxytoca
atgaaaaaatctcttctgctgtgggtcgcgctgatggcctcaacctcagccctggccgcagaaaataaggaaattcgctttggcgtcgacccgaccttcgcgccgtttgaatggaaagatccgcagggtaagctgcagggttttgatattgacctcggcaacgcgatttgcgcacagctgcaggcgaagtgcgtgtgggtggaaagcaatttcgacggtattatcccggcgctgaaagcgcgtaagttcgatgcgatcctctccggcatgtatatgaccgagaaacgcaaagagcagattggctttagcgacaagctgtacaacggcccggtattccttgtcgcgcgtaaaaacaccctggccggaaacaccgtcgagcagttgaaaggcaaaaccatcggcgtcgagcagggatcggcgcaggagacttacgttaatcagcactggcgtccggcaggaatcaatatcgtcgcctatcagggggcggatcgcgtggttcaggatctggagtccgggcgtattgacggcgcggtgctttccggcatgatggccgactacagcttcctgcagcagccgcaggggaaagattttgccttcgttggcggacacctgaaggacgacaagctgttcggcgccggcgcggcgattggcctgcgcaaagaggacgatgctctgcgccaggagattaacggcgcgattgccactattcttgccgacggcacttataaaaagctcgccgggaaatattttagctttgacgtctattccgggacataa

SEQ ID NO: 173231 - DNA, 954 bp, Klebsiella oxytoca
atgatcacacgtcccctgggcaaaaccggattttccatcgccccgctggtgtttggcggtaacgtttttggctggaccaccgatgaaaaaaccagttttgccattcttgatgcgtttatagaccacggcttcgatgctatcgacacggcggatgtctactcccgctgggcggatggcaaccggggcggcgagtctgaaaccattatcggccgctggctacaggcgcggccaggcatgcgcgagaaggtgaagatcttcaccaaagtgggttccgatttaggccttcctggccataaagggttgaaaaaagcctggatccagcaggcggtagacgattcgctccgtcgcctgaacactgattatattgacctctattttgcccactggccggacccggaaacgccggttgccgaaacgctcgaagccttccacgccctgcagcaggcgggtaaaatccgcgcgatgggcgcctcaaaccttgacgcgcagcagctgtcgagcgcgctggaggtgtcgcgtaaaagcggcctgccgtcctggcaggtactgcagccggaatacaatctttatcatcgctcggcttttgaaggcgcgctctgcgacttgtgcgtcagccgcgagatcggcgtggtgacctactacagcctggcgtccggcttcctgaccggtaaataccgccagcagtccgatctggcgcaaagccagcgcggcagccgcatcggtaaataccttaatcctcgcgggctgcgtattattgataccctggatgaggtcgcggagcaaaatggcgctaaacctgccgaagtcgctctggcctggctgatgacccgcgaaggcgtgacggcgcctatcgccagcgccaccagcattgcacaagtagagagctttgcccgcgccgccgcgctgagcctgagtgcggaacagctggcgcgcctggacaccgccagcgcgtag

SEQ ID NO: 173232 - DNA, 1083 bp, Klebsiella oxytoca
atgaaatgcactctcccggcgctggcgctggctatttctgctgtcttaagcggctgcgccgccacctataccgttccggcttctcaacacgtggctgaaaaaagcgcggttacccccgcacagccgctgaagcgcgagctggcggaggggctgtatgaaatggcgctcagcccgaaaggcgatgcgctatacgtggccagcgctgaaggctttaaagatgtgcagggcggggcggtctataagctggacccgacgaccctgaaaaccctcggtatgacccacacagacctgaaaaactttgccgtacagcttagtccggatggcagtacgctgtacgtgaccaactcgctggacggcggcattagcgccattgataccgccagcggcaaagtcaaaaaacgcctgctgttcagcgagcgtaacaaagagggattcccgtacggcgcgcggcagatcctgttgctcaataacacgctctacgtgggcgcggtggccgatccggcacaaatctgggtcgtcgatgccgacacgctgaagctgaaaacgcggattaaaaataccggcaaatggatgaccggcctgcactactctgcgcaaaccggacgtctctatgcggcaaacggcagcggcgaggtgttggtgattaacccacgcaacaaccgtatcgagcagcgctggaagccgctgggcgcaaagccagccctgctgctgaatatggccgaagatagcgccaccggccgcctgttcgtcaccgacaactcgcaagcgaaaaccacgctggtgcttgatatccataccggtaagctgattaagcagctggaagtgggcgattcgctggcggtgcagttcaatccaaaacgcaacgagatttatatttcccagcgtgaatccggcaaagtaatcagcctggatggcagcagctacgcgttaaaaaaatcatgggatattccggctaaccccaacagcctgctgatctccgccgacgggcaaacattgtttgtcaccgtcaaacagccgttcaataaagatcattcgacgaaagggccggacagcgttgtccgcattgacctgaccgcaaaataa

SEQ ID NO: 173233 - DNA, 2202 bp, Klebsiella oxytoca
atgcgtagctcctgctctcaggccttcccactgcgaaaaacgctgctggcgttaaccgttggcgcgatcacccattcagccgctgcggtagaaaacgacgccggcgaacgtcagaaaaacgaagaaaccatggtcgttcaggcgacgcccgacagccgctttagagccggcggcgacctggtggtgcccgcctatctcgacggccaggtcgccaacggcggccgcctcggaatgctcggcgaacaaaacgcgatggacgttccgttcagcattatcggctatacctcgaagctgattcaggatcagcaggcgaaaaccatcaccgacgtagtgagtaacgatgccggggttcagccggtgcagggctacggtaactacgctgagacctaccgcattcgcggccttaaatttgacggcgacgatatgaccctgagcgggctggcgggcgtggtgccgcgtcaggtagtggataccgccatgcttgagcgggtggaaatttttaaaggcgccaacgccctgctgaacggcgcagccagttccggcgtcggcggcatgatcaaccttgaacccaagcgcgcggaagatatcccgaccgctcgcgtgggcgtggactatacctcaggttctcaggtcggcggctcgctggatttgggtcgccgctttggcgatgataaccagttcggcgcgcgggtgaacctggtgcaccgcgaaggcgagacggcggtggagagtgataaacgcagaaccacgctggcttctattggtctcgattatcgcggcgaacgcatgcgcagctcgtttgactttggctatcagaaaaaaaccttccacggcggcccgatggggatcaacatttcgggcgtcgattttattccgcgcctgccggataacacccacaactacacgcaaaaatgggcttacagcgatatcgaaaatgagtttggtatgctgaggatggaatacgacattgtcgataaatggaccgcctatgcctctttaggcgcgcagcacgcccatgaaatcggcttatatagcgcgtcgaagctcatcgaccgggcgggcaacgccacggcggggcgcctggataccaaccgctatattgataccgccagcggtatggccggggtacgcggcgagttcgccaccggttttgtatcgcacaaagtcaacgtcggctattcggcgaaaacccaaaacgataaaaccgcatggcggatgtcgaaggcggcggataacccgctggtgaatatctacgatactcagcaggttgcgcctccggcctattcttcatccgacggtaattattacgatccgctgaccagcggccgtacccgttcccagggctggctgctgagcgacaccctcggcgtgctggatgatacgctactgttcaccgctggcgcgcgtcatcaaaaagtggtggtacgtaactacaacaaaaccaccggcctgcaaagcgatgcgtatgacgacagccgctggatgccaacctatggagtggtctacaagccgtggcaggttatctctctatacgccaaccataccgaagccctgcagccgggcagcaacgcgccgaactccgccgctaactatggggaaagcgtcggaattattcactccaaacagaacgaagtcgggatgaaggcggattttggccgcattggcggctcgctggcgctgtttgaaattaaaatgccgtcagcattcctcgatagccagaaacgctatggccttaacggcgagcagcgtaatcgcggcgtggaatttaacgttttcggcgaaccgctgtacggtctgcgccttaacgccagcgcgacctggctgaaagccgaactgtcgaaaaccaaggatggtatcaacgacggtaaaacagcgatcggcgtaccggggttctacgcggtgcttggggcagagtatgacatcaagcccatcgacggtctgaccgccaccgcgcgcctcaaccattccggttcgcagtatgccgaccaggcgaatagcaagaagattgatagctacaccacccttgatctcggcgtgcgctatcgcctggcgcttaacgagaaccagaaccagatgacggtgcgtgcgggggtggataacgtgacggatgagaactactggtccggcgcggatgacagcggaacctatctgttccgtggcgaaccacggacgttcaaggtttcggtcggctacgagttctaa

SEQ ID NO: 173234 - DNA, 1377 bp, Klebsiella oxytoca
gtgaaagacgcgtcaacgccgtcggatgccgtagaggaaagcggcccgacgcttcaccgcggtttacagaaccgacatattcagcttatcgcccttggcggcgccatcggtaccggcctgtttctcggcatcgggccagccattcaaatggcgggaccggccgtactgctcggctatgccgtcgccggtatcatcgcatttctgatcatgcgccagcttggcgaaatggtcgtcgaagaaccggtttctggttcctttgcccactttgcttataagtactgggggccgttcgccggctttctttccggctggaactactgggtaatgttcgtgctggtcgggatggcggaactgaccgccgccgggatctatatgcagtactggctgccggacgtgccgacgtggatctgggccgccgcttttttcatcattatcaacgccgtcaacctggtgaacgtgcgtctgtacggcgaagcggagttctggtttgcgctgatcaaggtgctggcgattatcggcatgatcggctttggcctgtggatgctgttcggcggccacggcggcaacaaagcgggcattgataatctgtggaaacacggcggtttcttcgccaccggctggcacggcctgatcatgtcgctggcggtcattatgttctccttcggcgggctggagcttatcggcattaccgcggcggaagcccataatccggaaaagagcatcccgaaagcggttaaccaggtggtataccgtatcctgctgttttatatcggctcgctggtggttctgctggcgctctatccgtgggtggaaattaaatccgacagcagcccgttcgtgatgatctttcataatctggacagtaacgtggtggcttcagcgctaaacttcgttattctggtagcgtcgctgtcggtctataacagcggcgtttattccaatagccggatgctgttcggactgtcggtacagggtaatgcgccgaagtttctcgcccgcgtcagcaagcgcggcgtgccggttaactccctgctgctatcgggagtcattacttcgctggtggtgctgcttaactacctgctgccgcaaaaagctctcggtctgctgatggcgctggtggtagcgacgctgctgctgaactggattatgatctgtctggcgcacctgaagttccgcgccgcccagcggcgcaaagggcgcgaatcgaagtttaaagccctgctgtcgcccgccagcaactatatctgtatcgcctttcttgggctgatcctggtgctgatgtgcacgattgacggtatgcgcctgtcggcgattctgctgccggtctggatcctgttcctgtttgtggcctttaaaaccctgcgccgttcggcgtag

SEQ ID NO: 173235 - DNA, 1242 bp, Klebsiella oxytoca
atggtcacaacaaccgaaggtcgtgaaacaccccgcgtagcccaccgttttctggtgccgcggctgtcgttaatgatgtttatgcagttttttatctggggaagctggtcggtgacgctggggttggtgatgacccgctatgagatgtcgctgctgattggcgatgccttctccgccgggccgattgcctctattctctcaccgtttgtgctggggatgctggtcgatcgctttttcgcttcgcagaaggtgatggcggtgatgcatctggccggagcggttattctgtggtttgtcccgcaggcgctggtggcgcaaaacggcgcgctgctgatcggcctgctgttcggctataccctgtgctatatgccgacgctggcgctgaccaacaatatcgctttccacagcctggcgaacgtcgataaaaccttcccggtggtgcgcgtcttcggcactatcggctggatcatcgccggtatctttatcggcgtcaccggtatctctgataccaccggcatttttaccctggcggcgctctgctcggtggcgctggccgtttatagtctgacgctgccgcataccccggctccggcgaaggggacgccggtacagtttcgcgacctgctgtgcgccgacgctttcgcgctgctaaaaacgcgccacttcctcattttctccctctgcgcgacgctgatttcgattccgctcgggacctactacgcctacaccgcctcttatctggcggatgccggggtggcggacgtcagcaccgcgatgtctttcggtcagatgtcagaaatcttctttatgctggtgatcccgctgctgttccgccgcctgggggttaaatacatgctgctgatcggcatggcggcgtggttcgtacgctacgccttctttgcccttggcgtcagcgaagaggggcggttcctgctctatctcggcatcctgctgcacggcgtctgctacgactttttctttgtagtcggctttatttataccgatcgcgtggccggtgagaaggtcaaaggccaggcgcagagcatgattgttatgttcacctatggcatcggtatgctgctgggatcgcagatctccggcgcgctgtataaccatctggtcgccggccagagcgtgccgcaggcgtgggtgaccttctggtggatcccggcggtggccgctgcggttatcgcgctgattttccttttctctttccagtacaacgagaaagagcagcgttaa

SEQ ID NO: 173236 - DNA, 1029 bp, Klebsiella oxytoca
atgaaaaccattaaaggaccgggcatttttctggcgcagtttatcggcccgcaggcgccgtttaataccctggagggcgtggcgcagtgggccgcaggtttgggctatcaggcattgcagatcccctgcaaccatccggcgattttcgacgttgaacgcgccgccgcaagtcagagctactgcgatgaggtgagcggcatactggcggaacagggcctggcgatcagcgagctgtccactcatcttgagggacagctggtggccgtccatccggcttataataaggcctttgacgcgtttgcgcccgccgcgctgcgcggtaacccgcaggcgcgccagcagtgggcggtcgagaaagtgcgccaggcggcggtggcctcggcgcgtctggggctgaaggcgcacgccaccttttccggcgcgctggcgtggccttatttttatccgtggccgccgcataatcagccgcttcttgatgaggccttcgatgaactggcccggcgctggcggccgctgctggacgtttttgacgagcagggcgtggatgtctgctacgaaatccatcccggcgaagacctgcatgatggcgtgacatttgagcgtttcctgcagcgggtcgataaccatccgcgctgcaatatgctctatgaccccagccatctacatcttcagcagatggactacctgggttacatcgatatctatcattcgcggatcaaagcgtttcacgtcaaagatgccgaattccgccgcagcgggcgcagcggtgtctacggcggctatcagaactggcagcaacgggcggggcgttttcgttcgctgggtgacggacagatcgatttcaaaacgattttcagcaaactcaccgagtatgattttgacggctgggcggtgctggagtgggagtgctgcctgaaggatgcggaggttggcgcgcgcgaaggcagcgagtttatccgccgccatatcatcccggtctccgggcgggcgtttgatgattttgccgcaggcaaggagggaggagaatga

SEQ ID NO: 173237 - DNA, 1152 bp, Klebsiella oxytoca
atgattcaggtcggcattattggctccgggtttatcgggccggtgcatctggaagcgctgcgtcgggtaggcgatatcgaggtggtggcattgtgcgacggttcactggaagtggcgcagcagaaggcgcgccagctcaatgtggcgcacgcctacggtagcgtcgaggcgctgctggcgcatcccggattgcaggtggtgcataactgtacgccgaaccacctgcatgcgcggattaaccgacaaatcctctccgccggtctgcacgttttttcagagaaaccgctctgcatgaccaccgaggaggcccgcgagctggtggcgctggcggaaagcgccggggtggttcatggggtcagctttgtgtatcgccagtttgccatggtgcagcaggcggcggcgatgatgcgcaacggcgacgtcgggaggctgtttgcggcgcacggcagctatttgcaggactggatgctgctggagagtgactataactggcgcgtggattcggcgcagggcggggcctcgcgggcgatggccgacattggttcccactggtgcgatacggtgcagtttatgaccggccaacgcattgtggaggtgatggcggatctgtctatcgtctggccgacgcgccaggcgcccgtggccggcgacgcgacgttcagccagcatcgcgatggtaccgcgtatgaagcgcggctcgtcgataccgaagatttggggtcggtcctgtttcgcttcgacgatggcagcaaggggagctttatcgtttcgcaggtcagcgccgggagaaaaaacggcctgacggtggagatcggcggcagccgctgttcgctggcctgggatcaggaggtgccgcagcggctgtggattggtcatcgccagcggccaaaccaactgctcagcgacgatccgagtctgatgctcggcgaggccgccgccagcgcccatttccccggcgggcataatgaaggctggcccgatgcgtttaaaaatatgatgctgagcttttatcaggcggtgcgcgccggtcgaatgccgccggcatcgtcgcggcgtttcgcttcgttctacgagggggcggacgtgatgtacatcattgcggcgatagtgaaaagccatcagcagcagcgctgggtgaaggtggaaagatag

SEQ ID NO: 173238 - DNA, 417 bp, Klebsiella oxytoca
atgaaacttcaaatagcgcttatcgcgctcggctgttcgctcaccgccctttccggttgtacctcctcaaaatcttcaccggaacgccacgcttactattttgtctcacaccgcaacgatttcgtcggcggtaacttcgccactaaccgtcaggaaaactaccgcttaaatctgccgacctttaccgaaatctatgcccgtggccagcaggacaaaaaatcgggaatgagcgaaagcgatgcccgtcgtaccgccgacgctatcaggcagcaggtggctgagggcacaaaaacccagcacgcgttcaccggtaacgccagcgataaatgggacaacgaaatggaaaataaggatgccgtattgttcggtaacgaactggccgggacgtatcttgatggctattttggcgtgaaataa

SEQ ID NO: 173239 - DNA, 750 bp, Klebsiella oxytoca
atgagtaaaaaactttcggcaaaaatcgcgttagtcaccggcggcacctcgggtatcggcctggcatcagcccgggagctggcctcgcagggagcgacagtctatatcaccggtcgccgtcaggaagagcttgatgcggcggtcgcgttaatcggtcccgccgccagcgggatccgcgccgatgcctcgatattaagcgacctcgatagggtgttttcgaccattgccagtgaatcagggcgactggatgtgctttttgccaatgcgggcggcggcgatatgatgccgctgggcgccataacggaagagcacttcgatcgcattttcgctaccaacgtgcgcggcgtgctgttcaccgtccagaagtccttgccgctgttgacccagggggcttccatcatcctcaccggctcgaccgcggcggtgaaaggcaccgcgaacttcagcgtgtacagcgccagtaaggccgccgtgcgtaacctggcccgctcatgggcgctggacctgaaggcgcgcggtatccgcgtgaatgtggtcagcccggggcccgtccgtacgcccggcctgggaggacttgtcgcggaagagcagcgccagggactctttgatatgctggccgccgacgtcccgctgggccgcattggcgagcccgaggaggtcgctaaaaccgtcgcttttctggcgtcagacgacgcgagctttattaacgccgctgaaatctacgttgatggcgggctggcgcagatctaa

SEQ ID NO: 173240 - DNA, 930 bp, Klebsiella oxytoca
atggatcggttttcagcccttaaagtttttacgcgcgttgtcgaagccaacagttttacccgggccgcagactccctgaatatgcccaatgccaccctgagtaaagcgattcaacagcttgaatcgcatcttggcgtgtgcctgctgcagcgcacgacccgacgcattaccgtcacgccggaagggcgtgaatactatgaaaaagcggtgcggattctgaaagaactggatgaggtggatgcctcatttcgcgctgcccgcaataaaccaaaagggtatctgcgcgtcgcggtaggcggctccaccgctcgcgacgtgctgatcccgctgttggctgattttatggcaacctatccggatattcgtatcgacctggcggttgccgacagcccctcggaccttatcagcggcaatatcgactgcgcgatcagaggcggtccgctggacgactcgacgctgatcgcgcgcaaaatcggcgaagcgacgatcgtgacctgcgccacgcctggctatttcagactttatggtgttccagcgtatcccgatgagttgaagaacggacatcggctggtcggctatttatctcccgccagcggaagagccttcccgttccgctttctggctaacggcatcgcgcaagagatcaaaacggaacatcaccttggcgtaaatgagagcaacgcgcatattgcggcagcggaggctgggctggggattgttcagaccttctcatattcgctgagaaatgcgctggcgaacgggttactggtggaaatattgaataaatggcgtccggctccttatcccttccacgtggtttatgcgcagaatcgccatgtcacatcccggctgcgcgtatttatcgactggctggcggagacattcccggcggcggtgaaggggtcattgcccacaagaaccaaagaatga

SEQ ID NO: 173241 - DNA, 636 bp, Klebsiella oxytoca
atgccggcaggtgaccatgagattaaatgtatggcgtgtggtttaaactgccctattgaagcggaagataaaatggagcgatccctttgcggagagaggaaattttctgtatggccagataaaaactattattttaagcgagcggttaatgatttggttttccgtgaaattacctgttttctgcctgaaggaatggtggtggtggatttctccctcgacaatattttgtattttctgcatgaggagtgggctgaaaaactgcaggagaccgggctgaaagttattttactcgcggataagagcatgctgcctatggctaatttttggatgttgcgctccgggttattatggtcggtggtagaggtcaacgatagcttaagcagcttaatcaagaaaataaaacgcatcatgctggggcgaaatcttcgctgccggcgcacaccgtcgctgacggagcatgaaatgaagacgctgcgcttgctggcggacgggtactccagtcaggatatcgcccgcatcatggcgtgcgatacccgcagcgtctaccgctttcaatactctttatgcaaaaagtttggcgggctcaaccgcctgcgcgagctgcgcttcaggcataatatccccgctctggattag

SEQ ID NO: 173242 - DNA, 684 bp, Klebsiella oxytoca
atgatgaaaaatatccttgtcatcggattatgcgggctgtgtattcagcccgcttccgcggtgtactttgactctattatctatgatatggatggcagtaaagattttatctcccggccaatagtcaatgatacaaaaaacaacaatttgtataccatatcggcttataaaatctcccgtccgggcaacggagatgaaagacccgttccaggccaggataaagacctggtctggtcgccgctgcagttcatcgtgcaggccaatggccaggaatattttaaactctattaccgtgggcctaaagatgacgttgagcgctattatcgggtgatctttaaggagacgcccgtcacagttttcccctggcgtcaggatcagaaaaaactgaatatagtcccttcggtatcgatgagtacgattctcatcgtgcgcccgcgtaagacgcgattccagtatgaaattaatgaagccacaggcaccattaaaaatactggcaatacctattttagagtcattctgcagaaaggctgcaatggtgacgatgaaagttcaacgcaattttatatgctgccaggggagagctggacaggccccgaggcgaagaacagcaacaggaaatatattgtcgcattaggccgctatcatcagttaggcaagggctgttttatgaattcgccgggctaa

SEQ ID NO: 173243 - DNA, 1620 bp, Klebsiella oxytoca
atgtctattaaaccccaggccatcatgctgctggccggctggctactggccgcgccggctatggcgctcaccgcaagcagcagcgggagcggcagcaacacctatatgtttatcgacaatgatgtcgatgacgaatatttcatcaccaccagctccctcgacccgcgcttcaccggagccaacgtctggacaaaatatccgactaaccagcgtagtctgggatatataacctacgtaggctgggcttacgccaaccgctacttcgacctgtggatcgagaattcgcccattaaccagccgtttctcgggatccgttgcatgtctacgggcgcaaactgcccggcgtctggctatattactcccgatgtcatcgataaagacggcttctatcacgcgatgtccggcaacaccgtagcaaacggttactacggtgcgggagcgctaagccagtcggcctatgagtattttcgcgatcggccggtggggaccatcgattctttgcagcttaatctttgctacatgaataccaataccgattatgactttgcctccggcgttcgctgtaaagatctccccagcgggggaacatggcgctactacacgttcaacctcgaaaaggtctcgcatctgaagttaaacagtaccggtgctctggcagaagtgtggattgccagcgatggcacgccaagcgtcaacctcggctcggatttgtgtcaaatgggtgtggtcgggagcgcttcggggatcatctgtaaaatggtgtcttacaattttcaggagactaaaactctcaccaccttacttgatttccggatggtgattgacacggcgatgctgggattttctccttctacgtctgacgtaaagtacagcggtgatggggcaagctggaccaattttggtacggtcagcacctataacaaggttttcaaaccgtcaggcgagtacgtgtacgtattcctgtccaacgcctttttccaaaaagtcctcaaggcaggaacggatttaaccaacaaggatgctctgtttaccttctattttgataactccgtcaccccacaatcgggttattatcagttcacgccatcaacattaattaacatcatcccgcgggaatacggcatcagcattgttgccagcgacgggcgttcgcatccacaagcatccggcaagattggtagcgaagagcccatcacctttgaatataaagtcaccacctccgcgtcgcgtcaggccgacagtattaccgcccaggtgattggcgactccgtcaacatgtatggtttgccgttctgcctgtttacctcagcggacgagacgctaaaggtgccggtcccggcctacctcgaatggacatccgctaccggtaaagcggtaaaaatccgcaacagctgcggcgaagatcctgtcgatatgaccaacgccgtttgggtacagacggcctggaacgccaacgtcaacgatggtttcttttttaccaccacgctgaaactgctgtttccgatggatgacccacattcacaattcaccaccaatggtcatgactggatggggaccgtcagcgccaccggcgatgtaaaagtgaccgccacgtggattggcgtcgagcgggggggatga

SEQ ID NO: 173244 - DNA, 2538 bp, Klebsiella oxytoca
atggataatcttggttatgtcaaagggacgttgttcgctgggttattaattacggtaaaccagggttgggcagctaatgctacagcgccagtcaaagtcagtaactatgttattccttcggtatttgctaacgcgttatatcagggcatgtcggtccctgtttttattcgttatgaaggcgataatagtacccaacgcagccagcaaaaaatcgctgatgccatccttaccatcaaggataatgagtttcgcctgaaccagatcgccctcagcgatctccctgagcgaactgaattatcgccgcagataaaatcgctgattaacgagatgcaggacaaaagcatcggcgacggtcagcgcgtttatatcaacaaagacgcctcactttcactcgatacgcgttccttttatcttgagctgacggttaaccgggcagccatgcaggccgctattttgccgcgtaccaacgtacttggagaatccactgcgcaggacctctccagcgtactgaattactccatgggaagctattacaacaaatatgagaataccgatagcgccagcagctacctgacgctggacaatacctggtcgttgcgcgagcaccatctgaactttaacggttccctctacggtataggtaccagcaaccagcagagcaaattgtatcgctcgatgtacgaacgtgactatcagggacgccgcttcgccatggggatggtggatacctggaatctgcaatcgatcgccagcatgagcgccctgaactccagccgcatttacggcatcagctatggcaataaaagcagttcacaaacgcaggacaacacgcttgccctggtgcccgtcacggtgttcctcccggccgccggtgaagtgcacgtgtaccgtgacggtaaactgctcagcattcaaaacttctcgatgggcagctacgagctcgatacgtcgcgcctgccgtttggtatctacaacgttgatatacaggtggtcgttaacgggcgcgtggtcagcagccggacggcgaacatcaataaaacgttcgctcgaaaatccagcgttaccggcgatctctcatggcaaaccttcgcgggcagcctcgaatacaacaagatggactatcgccacaactacaacatcaattatggcacacggaatacgtggatagccggagtcgccgcggcaaccaaccaaccctggctttccggcgtgaatctgaaaaccacgctctatggttttgacaataacggcgtcaatgaaacggaagcgaacgttattttcaacaacgcgttcagctttaaccagcaggggctgctcgctaccgacggcagctggcagagtacctccaccttcaacatgagtttaccggacgggtacggcaacctgtgggggtcgcgccagtacagttccatcggtaacgcgctaccgatgcagcagaacgactactttaccgtcggcgccaacgctaacctgcgcaaaattgcgccgttcctcggtacgctgagcgtcagccgcaccaataacaaatataccgggagcacctataccaacgtcgattacgatcaatccttgttagctaatcgctacgcaaccgtcacgctacgcgccggtattcagaactatcagtacaacaaccatgaaaatctgcgcgataagtacgtcaatattgatgtctctatccccttctccacctggctcagcaccggagtgtccagccagaacggaaacatgctggcgaacgccacgctgcgcaaaagctttgacaaccgcgccattacccaggtgggggcgtcggtttcgaaacagattaaacagaataaaaatgacgatagtcgctatcgttccgacgattacgccgccaatggttacgtcagctatgacaccaaatataacgccggcaccgtctccgtcagccgctcatcgcagcacagttcaaaccacagcctgagttcgcagggcagcgtggcctggacgcaaaaaaatatctatgcaggaaaaggtacccaaaccgcaggcctggtggtgaataccaatttcagcggcaagggccggatgatggcgcagatcaacggccagaactacccgctgaccggcaaaagcaatttcatcagtcttccgccctacgcggaatataaagtggagctgatgaacgacaaaaattcggaagacagcgtcgacatcgttaacggtcgtcgtaacaaagtggtgctctaccccggcaacgtcagcgtgattaacccggaagtcaaacagctggtcaccgtctttggccgggtgaaagatcgccgcggcggatactacgccaacgccgatattcataaccacattggtaaaacgcgcaccgacgaactcggtgagttcgccatggacgtcgataagcgctttccggtgatcaccctggtggataaattcggcggcatctgcgaagtggatctggatctgacagaggcgaaaggcgccgtatgggtcggtgagatcccttgtgagatccaacaacaaacggcatcagtgactggagatgttaagaatgtctattaa

SEQ ID NO: 173245 - DNA, 678 bp, Klebsiella oxytoca
atgaaactgaatccattattactctctctcttcttattcaccgtgacgccctcctcccatgcaataaacgtcggagacgtcacctcaataatggggccggatgcctcgacgctggcaaaagaaatcattaatactaccgatacggcgcgttacgttagcgtcaacgtggagcgtatctcatcgccgatggccggcggcaaggttatcccgatggcgagcagatcggaattattgtcaacgccagccagtctgatattacccggaaatgcgaaagagaactttcgttttttttacaaagggccacaggataatcaggagcgttattaccgcatatcctggaccgatgagccggtgaccgagtttgaagccagtaaaaagaaaaaacagggtgaggcaacgacctctgccattattggtaccattctggtggtcgcgccgcgcgaagaaagattcgactatcgtcgagataatgacacggtaaccaataccggtaacgcttcattccgcgttatctcctacggaccctgtcgtgataaagcgaaggatgaggggcaaggctgtcgtgaacgctattatgtcatgcctggtatcagcgtaaaaataaagcataccgatctcaccaacaaaaaaacgcgaagtggaatatggcacggtgagcaatatataaatgtaaactga

SEQ ID NO: 173246 - DNA, 579 bp, Klebsiella oxytoca
atgaaaaaaatcgtattagcgggtgttgtggctgcggctcttatctctaccaatgcaatggctaacgtgaccacttccgccactgccagctgggatgctagcgcaactaaagacaccaccagcgcgctggttgtcactccgctgaaatccctgaacttccagtacgctgaagggattaaagcgtttaacgcccagaaaggcgcttttgacatcaccatccagggccagtctggcgcgactgacttcacgctgacctctcaaatcgtcagcaacaccctgagccgtaccactgacgcctctactctggccgttggtgtgagctggaacggcaacgcgctgaacaaaaccacgccggtaacgatgattgatgcgggcaacaatatctccgcgggtctggatgcgctggcagtcgccaccgccttcgcaggcgccgatcgcgtcagcacccagggtaacttcgatttcactatcgactccgcgacttctgacggcagcaccgccgctgagttcaaagatttaaccgacggttactggagcggcgacgttcgcgttcagttcaacgcggaatggactatctaa

SEQ ID NO: 173247 - DNA, 618 bp, Klebsiella oxytoca
atgcttcctcagaaatatgagaaggtatactgcataagctgtcagtatcagtgcgaaatctatccacgacctacgataaaatcgattaattgcattgaaactcactattgcgtatggcctgataaaaatatctatttaaaaaatggtgtgcattgttttttaattaacaagcattacaacttctctaattctggctttatttttgttgatttttctcgctacaacatcagattattcaccaatgataaatggattgaatatctgatcaagacagggctgcgggtagttttgattgccgacagattagcgcagccgctggcgctgtactggaaacaccgctgtcagcagataatttcgattatcaataccagcgatacccgagatgagattgaaaagaaaatacagctttcgtttctcggtcaacgagatgctcgaggctaccgtcaaaaactcagcgatcaagaggtattggtactcgaccttttactcgcagagaagtcggttaaagagatagcaaaagaattgcagatggcagaaaagagaatctacgcaatcaagctcagcttgcagaataagatgggaggcagagggaagttaaacattattctatctggataa

SEQ ID NO: 173248 - DNA, 312 bp, Klebsiella oxytoca
atgcagcccggtggaaagcctgaaatcggggaaaccccggaagcggcgctgatccgcgagctcaaagaggagctcaactttagcgtttcacctgaagaactggttccggtcggccgtttcaccgatacggcggcaaacgagccgggccatacggtctctgcggatatctttcagatagccaccaacagagcgaactttacgccgacggccgaaatagaagaagttatctggtatacgccaggtcaggatcggcatattaagcttgctcctcttaccgagaatcacctgcttcctctgctgaaaggggcgtaa

SEQ ID NO: 173249 - DNA, 981 bp, Klebsiella oxytoca
atgtcaattcagaaaatcgctcgcctggcgggcgtctcggtggcgacggtatcgcgggtattgaataacagcgataccgttaaagcgaagaatcgcgaacgtgtgctgcaggcgatcaaagagagtaactaccagcctaatctgctggcccgccagctgcgaacggcccgcagcaatatgattctggtgatggtctctaatatcgctaaccccttttgcgccgaggtggtcaagggtattgaagaagaggcggaaaagaacggctaccggatcctgctgtgtaattccggctcggatttggcccgttctacttctggcctgcagctgctctccggcaaaatggtcgacggcatcatcaccatgaacgcgctctccagcctgccggaactgaccaccatgatcggcgacgcaccttgggtgcagtgcgcggaatatgccgataacggcagcatctcctgcgtgggcatcaacgatgtcgacgcggcgcagggcgccgtttcccggctggttgacggcgggcgaaaacgcattgccttaatcaaccacgatctcagctatcgctactcgcgcctgcgcgagcgcggctacaaaagcgtgctgcacgttcgcgaactggcgtatcaacaggtcacctacgccagcgacctgagcgccgccgccggtacccgggggatggaaacgctgctggcgcagaaagagaaaccggatgcggtatttgcggtctcagattcgctggcggcgggcgcgctgcgggctatcgctcaggccggattgcgggtgccggaagatattgcggtaatcggttttgatggtaccgaactggccgaagtggtatcgccgcagttgaccaccgtggaacagccttcgcgcgagattggccgtaccgccgtgacgctactgatgaagagaatcgataatcccgacgctgcggtcgagcgggtgatgatggactggcgcgtgatcccccgcgccagcacctga

SEQ ID NO: 173250 - DNA, 1245 bp, Klebsiella oxytoca
atgcaggaattaatatcgcacatcgccgcattaggcatcaaaattacccccaccacctcactcattattatcttcggcattatttttctgacggcgattgtcgttcaccttattctgcacaaagtggtgctgcgcaccttcgaaaagcgggcgcaggccagcagccacctatggttgcaaattattacccagaacaaattatttcatcgtctggccttcaccctgcaggggattatcgtcaacgtgcaggcggtgctatggttgcaaaaaggcagcgaggcggcggaaatactcactacctgcgcgcagctgtgggtgatgatctacgcgatgctgtccttcttttcgctgctggacgtggtgttcaatttatcgcagaaattcgccaccgcttctcaactgccgcttaaagggatatttcagggaattaagctggtctgcgcgattattgtcggcattctggttatctccttactgattggccagtcgccggcgattctgattagcggcctcggcgcgatggccgcggtactgatgctggtgtttaaagacccgattctcggcctggtggcaggtattcagctctccgccaacgatatgctcaagctcggcgactggctggagatgccgaaatatggcgccgacggcgcggtgatcgacatcggcctgaccacggtgaaggtgcgcaactgggataataccatcaccactattcccacctggtcgctggtttccgactcgtttaaaaactggagcggtatgtcggcatccggcggtcgccggattaagcgcagcctgaatatcgataccaccagcattcattttctcgatgaacaggagcagcagcgcttaattcaggcccggctgctgaagccgtatatggattcgcgtcatcaggaaattagcctgtggaaccagcagaacgccaccgaccagtcggtgctaaaccagcgcaaaatgaccaatatcggcaccttccgcgcttatttgcaggagtatttacgcaaccattcgcgcatccgtaaggacatgacgctgatggtgcgccagctggctccggacaccagcggcctgccgattgagatttactgcttcaccaacaccgtggtgtgggcggagtatgagagcattcaggcggatattttcgaccacgtttttgccgtggttgatgagttcggcctgcggattcaccagtcccccaccggcaacgatattcgttcgctggcgggcgcggtatccgggtaa

SEQ ID NO: 173251 - DNA, 1428 bp, Klebsiella oxytoca
atgaattcgtctgctgtttcacccggccgcgccggtttattccttctgttgaccggccagatgctgccgctgatcgacacctcgatcgccaacgtcgcgctggactccatcacccaatcgctgaacgccagcgccacccagctggagctgattgtcgcgctgtacggcgtcgcctttgccgtctgcctggcgatgggcagcaaacttggcgataactatggccgccgccgtctgtttatgtggggcgtggcgatttttggcgtcgcctccctgctgtgcggaatggcaaactctatcaccacgctgctggcggcgcgcacggtccagggcgccggcgcggcgctaatcgtgccgcagatcctcgccacgctgcatatcaccctcaaaggcaacgcccacgcccgggccatcagcctgtacggcggcattggcggtatcgcctttatcgtcggtcagatgggcggcggctggctggtctcggcggatatcgccggtttaggctggcggaatgccttctttattaatgtgccgatctgcctgctggtgctggcctttagtccgcgatacgtcccggagacccggcgcgaagcgcattcgcgcatcgactggcagggcaccttcagccttgcgctgatcctctgctgcctgctgtttccgatggcgctggggccggagctgcactggccgtggacgctgcagctgatgttagctgcggtgctgccgctgctggtctggatgcgggccagcgcgctgagcaaacagcagcgcggcgagcagccgctattgccgcctcgcctgctgaagctcaccagcattcgctttggcatggccatcgccctgctctttttcagcgcctggtccggatttatgttctgtatggcgttgaccatgcaggccggtctgggaatggcgccgtggcagtccgggaatagctttatcgcgctcggcgtggcctacttcatctccgcgctgtacgcgccgaagctgattgcccgctacagcatgggacgcattttgctgactggcctgtcggtgcagattgtcggcctgctgctgctgtgcgcgaccttttatcgcctagctacccacaccagcaccctggcgctggtcccctccacggcgcttatcggctacgggcaggcgctgatcgtgaatagcttttatcgcatcgggatgcgcgacatcagcgcttctgacgccggggccgggagcgcaattctcagcaccctgcagcaggcgacgctgggcctgggcccggcaattctcgggtcgctattcttaacccttgcccagcgcagcggcggcgactatccccgggcgctgatcgatttcctggcggtggaagtggtgatgatgctggtgctgggcgccatcgcgctgtggctacgccgacaccttaacgtccgtccggcggtagcgacgccataa

SEQ ID NO: 173252 - DNA, 867 bp, Klebsiella oxytoca
atgacgaccatgccgcaacgtgaatcgacgatcgccgcgcccgatgatgcccgtaaacaactgggggcatttctgcgcgcccggcgtgagagcctcgatccgcagcgcctggggttgccgcgcgttggccgacgacgcacgccgggtctgcggcgggaagaggtggcgatgctggcggaggtcggcgtcacctggtacacctggctggagcaggggcgggacgttaatccgtccgaggccgtgctggtgtcggtggcgaacgcgctgcagtgcagcccgctggagacccggcacctgtttgtcctggccggactgacgccgccggaagccgcgcaggtcacggtatgcgaaggcatcagccccggcacccggcggatgcttgatagcctgatgccgcagcccgccagtattcagaagccgagcttcgatattgtggcctggaacgacagcttctgccgcctgatgggtatcgatttcgccaccattccggaagaggatcgcaactgtatttatctgtatctgaccaatgaaacctggcgcagccgtattgaaaatcgcgatgtgctggcgacgtttgtctcctattttcgcgcggcgatggcggagcaccgcggcgatccgctgtgggagaataagctggcgcgcttttttgccgcgtcggcggagtttgagtccctctggcatcagcgctatgaggtgcgcggggtggaaaatcaggtgaaaaactttaaccatccgcagctcggacgcttcagcctgcagcagatgtactggtactcggccccgcgtaacggctcgcgcctgctggtctatttgccgatggatgaaatgggcgaacgggcgctggcgtggctggataaacactaa

SEQ ID NO: 173253 - DNA, 1038 bp, Klebsiella oxytoca
atgaatattacccgtaaagagcagcgcattattcagcgcgcgctaaaggcgtggcaggccagcggcgatttagcccctgaggatagccagcggctggcgcaaacgctgcgcgtctctcccttcgactggcagcggctgagccgctatgcgttctggaccgcgctggcctgcgtgctggtcgcgctgggcagcctgtttgccgacagcgccctgattgagcttctgctgagcctgttcagccgctcggcgctgacgcgaatcatcctgcccgcgctgctggcggtagcctgctacgcctggggttttcgccgccagcggcgggaaacgcagtggcactacagcactgaggcgatcctctttctggggggtatttttaccgccgtggcgctgtggcagcttggcgaacgtctggataccggcagcggtcatatcgcgccgctgttcctggccggatgcctgatttacggcgcgattggcttttttgctcgctccgggctggtgtggctcttttttctgctgtcgctgggcaactggttcggtgcagaaaccggctacgtttcgggctggggcgcctactggctgggcatgaactacccgatccgcttcgtgctgttcggcggcgcgctgcttgcgctctgctacggcgcgcaacacgctttgcgccagcgccagctgtttaccgtcagtaaagcgatggggctgatctatctgtttatcgccctgtggatcctgtcgatttttggcaactatgacctggatagctggtccagcatagcgcaaaggcagctgctgccgtgggggctgctgttcgccgtggcggcggggatctgtatctatatcagcctgaaaaccgacgacggcatgctgcgcggcttcggtctgacgttcctggcgatcaacctctatacccgtttcttcgagttcttctgggatggcatgcacaaagtcgcatttttcctgatcctcgcagtctcgctggcggtaattggccgctatgcggagcgcatctggcatgcgggaagggtaacccatgaataa

SEQ ID NO: 173254 - DNA, 2730 bp, Klebsiella oxytoca
atgaataaggagtcgatttttcgccagctagaacaacggatcgtcgggcgaccgctgaccgcggaagcgcttggcgagtttaatgcgatggcgattgccgatagcctgaagcaaaaacgcagtatcatcagccatcatctgaataatctccatcgcgagcagcgggtggtcaaagtaaatggtcgcccggtgctgtttttacccattgccgcgctgcgcgaccaccaccgcctcgcggttcgacacggcgaatacgcttcccttcaggccctgtgcgctgagcgccaggatagtctggcgcagctgataggcgctcagggcagcctgcaggaagctttgcggcagtgcaaggccgccatcagctaccccggcgcaggtctaccgcttctgctgcgcggtcccaccggcacggggaaaagtttccttgcgcgccagctctggcgttatgcgatggaacagggcgttttgcctgctgatgcgccttttaccgtgtttaactgcgctgagtacgcgaataatccagagctgctgacctcgaaattattcgggcacgcgaagggcgcttttaccggtgcggataaatcagtccccggtcttatcgagaccagcaacggcggggtactgtttattgatgaggttcatcgtctgccccccgaaggacaggagaagctgttccattttatggataacggtagctggcggcggctgggggagagcagcgaggagcgcagcgccacggtacggctgatttttgcttcaacggaggatctggaaaagcacttcctggcgacttttattcgtcgtattccggtgatcgtcaaaatcctgccgatcgccgagcgtggacagtatgaaagactggcgtttatccatcacttttttcgccgtgaagcgcagcgattacatcacgatctggcgctggacggcgaaatcatcagccagctgatgcgcgaaacgctcgagggtaacgtcggcggactagagaatttgatccgcaatatttgcgccagcgcctggacatttggcgagcgggatagcgatcttttacagataaaagcgggtttactgcccgaccggttgctggcggatgcgcctttttctcttcagcaaaatagcgaacgggtcatgatttaccgcgatggcgacgcgcagcctttgttttccggtcgtcatcatgagtatcaacggctgacggaaaatatttgcagcctgtgcgaggaactcgggaaggacaatatcagcgcaaggacctttgaaaagctcatttatcaaaacgtgacgctctatctcgatgcgttgatgaatcaggagagcgcggtctctcttcaggacaagcgactgcgctttattgaggatgtgggcaaggcgatcgccgccaattacgatctccagctgaatgccgaattcgcctatcttactggccgctacctgaccagcctgcctcttgctccgcgcagcgttgccgagcccgcgcgtctggtgatgcagcggtggctggagtcctcagcggggctggcgcagcgtgtcgcgggcaaactactggatgtcgtcaataacaaatacgatctgctcatcgatacgcttgaccgcctggcggttgccgctatcgtcagcaatgcgattgatgcgaccagcggcggaaaagtgaaagcggtgattatcgcccacggctattcgaccgccagcagcattgcgggggtcgccaatcgcctgattggcgagaagatctaccaggcgatggacatgccgatggaggtggcgttcagcgacgtcagccgcgccgtggttgattatctccagcataccgatacccgagccggagtcatggtgcttatcgatatgggctataccaaagagattgccgatgcgcttttgtcggtgattaacggcccgctggtggtggtggataacgtcacgacgcgcatggcgctgaacgtcgccagcgagatcgcgctggggaaaaatatcgaacatattgccgaagagatcgtgccgctcaatcagtcgcgctgggatgtcttctggccgacagaaaaaaaagagcgtgctctgctggtgacctgcattaccggaatcggtactgcgtttaaatttaaaaatctgatggagaagagcctgctcagcgactttgatattaacattatcgcctgcgagtatacgcgcttaaaaaatagccgcacggcgatatccttgctccaccagtatgaagtgattgcggttgtgggtacgcacgacccacagctggcgggggtgccatgggtaggtattgaagagctgctgggcgagcaggggcatcggcatctcagtcagctcttaagcggctatctcaatgagaagcaaattgcgctgattaataaaaatatggttcgtgagttttcgctgcataacgtcgtcaactccttgacgatactgaatgccggaaaaacgatgagccatattgagactattattgcagagtggcaaaacacgcttggctttaattttaataataatttaattattagcctgtatgtgcatctcagctgcatgattgagcgtctggtaatgcgtaatgaaattacccattataaaaatcttgagcaattttctcgccagcacggagaatttattgctatggtgaaccactcgtttcagcgcctgaaaatactctataacgtgacgctgccggtagcggaaattggttatattcacgatatttttgaattacgcgttgacgattttcgctggtaa

SEQ ID NO: 173255 - DNA, 987 bp, Klebsiella oxytoca
atgtctatagctcagaaaaacgcccaccatattattcgcgatattttaaccaggcaacgtattgaacgcgtgtggtttgttggctgcgggggttcgttgaccggcttctggccggggaaatattttctcgattgtgaagcaaaaaagctggccgtcggctatgtgaccagtaatgaatttgtccacgcgacgccgcaagcattaggggaaaatagcgtggtgatccttgcctctcagcagggcaacaccgctgaaacggtcgaagccgcccgcatcgcgcgtcaaaaaggcgcggctacgattggactggtatatacccccggcacgccgctgtgcgaacacagcgattacactatcgaatactgctgggctcgctatcccgaaactgtcgatccgacacagcaaaaagcggcgtacagcctgtggctggcgctggagatcctggcgcaaacagaaggatacgaccattacgctgagatggtcagcgcctttgccagttttgaatccgtggtgcgcggcgctcagcagcaggtgcaagcggatgcgcagcattttgccgaagcctggaaaagtgaaaaggtcatttatatgatgggcagcggtccttcgttcggtgccgcgcatcaggaatccatctgtattctgttggagatgcagtggattaactccgccagcatccatagcggcgagtatttccacggcccctttgagattaccgaaccgggaacgccgttcattttattaaaaagcagcggccgcacccgtccgctggacgatcgcgcgatccgctttatcgaacgctatcagggaaaactgcagattattgacgtggaaaaagtgggaattgatgcgcttcacgccagcgtgcgcgaatatttctgcggcctgctgcacaactgcgttcttgatgtgtacaacctggcgctggccaccgcccgcaaccatcctctgaccacccgccgctatatgtggaaagtcgaatattaa

SEQ ID NO: 173256 - DNA, 1062 bp, Klebsiella oxytoca
atgcacgtagaagactatatgaatgaaacccccgctcgcctgctcgctatgctaacgcagacgcgggaagatctctggcaagcggcgaaagcgctggcggatcgcgggatctctcgaatcatcctgaccggttccggtacgtcttaccacggcgcgctgaccgcgcggtcgtttatgcagcagtggtgcggcatcccggtcgatgtatactggcccttcctgctggacgagatggcactttccctcagcggcaaagcgctggtcatcggcatttctcagggaggcggcagcctctccactctcgccgcaatggagcgcgcccgggcagccgggcaccttaccgcttccatggccggggaagcgccagctgccatcgaccaggcggcagatttgatcctgacggtcccctgtggagaagagcgcgccggcgccaaaaccaaaggttatcactgcaccatactcaacctgatactgcttgcgcttgccgtcgccagccgccagcagcgcctgagcgatgaggagcgcaaggcgctactcgtccgcatggagaggacgttcaatcatatgccgacgctcattgaggcctcgcaggcgtgggttctcaatcacgcccggccgcttatcgacagcgcagatattcgcctgaccggcccggcagaactgtttggcaccgttcaggaaggcgcgctaaagatgcttgaaacgctgcgctgcccggtggccggctatgaatttgaggaattcatccacgggatctataacgccttcgatgagcgttcaaccctgattatgctcgatccgcatcccgatgagcgccaggatcgtctggcggaaatactgtctggttggacgccgcatatttatcgcattggcccgcatgttgacaataacggtaagaacatgccctttacgtttattaacgatccagactttgcaatctttgaatatattattccattgcaaatggtttgcgccaggctaccgccagtgaagggtgtcgatcccgcaatacctaaggatccgcagttccaccagaaaatgaaaagtaaaaaacttaattaa

SEQ ID NO: 173257 - DNA, 855 bp, Klebsiella oxytoca
atgagtgaaatgacgcaggccctgtcaggcgccgcccagccgcaaagcgatgacgcaagccgggtcaccgctcgggatttacgcagcgtgttctggcgctcctttacgctgcagggctcgtggaactacgagcgccagcagcatatgggctacgccttcgcaatgtcgccggccctgaagcgtatctatcaggacccgacggaactggggcgcgccctgcagcgccatctggtgctgtttaacaccacgccgcacctctccacctttatcttcggcttgtcgatcgctatggaagaggagaatcagcgcaatcccgaatttaatgaagaatcgataaacgcgattaaaaccagcctgatggggccgctggcgggtatcggtgactccatattctgggggtcattgaaggtgattgccgccgggatggggatttatttcgcccagcagggcagcctcctgggaccgataatggcgttgttagtttataacctaccgcatctgttgtgccgctggtatgggctgaagctcggctatcgggctggcaccacctggctgatgcggatttaccaaagcggactcatggatcgggtcacctatatcgcgtcaatcgttggcctgatggtcgtcggcgcgatgaccgccagtatgatagatatcaccaccccgctcagcttcactgccgggcagacgaccatgaaggcacaggagtttatcgacaaaatacttccttcgctgctgcctctgcttttcacccttgggatgtacaagctgatccgtaagggagtcaacatcaactggatcctgttaggcaccatcgcgtttggcatggcggccagcgcgttaggcctgctttaa

SEQ ID NO: 173258 - DNA, 744 bp, Klebsiella oxytoca
atgttgctcaccgcaacgttactcggactgattgccgccctggggatcctcgatggccgcctgcttggggtatcgatgatcgaccggccgctggtgatgtgcgccctcaccggtctggtctgcggcaatctgcatgaggggattctgattggcgctacgctggagcttatttttctcggcaacgtcgccatcggcgccgctcacccacccgatatcgtgaccggctccgtactggcgaccgcattttcgatcatgtccggccgcggtccggaggctgcactcaccatcgccatccccgtctcaatgctggcgcaaacgctgggcattctggtacgcgtggtgaacgcccgcttcggtcatctggcggaccgctatgcggcgcaaggtaatacccggatggtcggcctgatgcacctcggcggtccgacgctgctctattttttaaacggatttctgccggtttttttcgccatcctgctcggctcttcggcggttagctggttccttgaggcgattccgccggtgatcaccaacggattgatcgtcgccagtaagatcctgccggcgctcggcttcgccctgctgatcagcatgatgctcagcagcaaacttatgccgtacctcggtctgggctttctgatagcggcatataccaaactggatatcatcgccatcgcgctattcgccgtggtgttggcttttatcatcagccagtttcttaatcttaagcagcaggagagctaa

SEQ ID NO: 173259 - DNA, 471 bp, Klebsiella oxytoca
atgattaaactcgtgcgcattgattatcggctgctgcacggccaggtggtttttgcctggacccgagcgctggatatcgaccatatcatcgtcgctaacgccaaagccgcggcggatgccttcattacgatgtcgcttaacctggccaagccggcgggcgtcacgctggacatcgccaccgttgaacaggcggcggaaaagcttaacggcggcaagttggatcataaaaaagtcatggtggtccttggcaatactgctgaaaccctcgcgctggtagaaaaagtcccgggaattaacgccattaactacggcggtctgccgcagaaggagggcgcaagacaattcggcaaggccatctatctgaccgaagaggaaatcgccgatagcagagcgctgaaagagaaaggcattcggctggagatgcgtcaggtacccgcccactcggccgagctcctcaacgaacaactttaa

SEQ ID NO: 173260 - DNA, 435 bp, Klebsiella oxytoca
gtgaaacatatctatgtggccagccacggccattttgctcgcggactggtgaacagtttgtcgctgctgattggcgacgaacacggcgttatcccggtctgcgcctatgacgaagatatcgtgaccaccgaacagctggagcaaaccctggagcatctcatcgtccaggcgaatggtgatgaagtggtgatctttaccgacctgcttggcggcagtatcaacaatagcgccgtgagcgtcttgatgcgccatcgtaacgttttcgtggtcgccggcatcaatctgactctgctgctggagtttctgctgtgcgaagaagccactaccgaggccgcgattgtctacgccaccggcgcggcgcgtgaatccattgttttcatcaaccctctactaacacaaccatcctctgacccacagggagaatctcatgattaa

SEQ ID NO: 173261 - DNA, 654 bp, Klebsiella oxytoca
atggatatcgtatcggttgccttaaagcgctactccaccaaggcatttgacgccaccaaaaagctaactgccgagcaggcggaaaacctgaaaacgctgctgcagtacagcccgtcaagcaccaactcccagccgtggcattttatcgttgccagcagcgatgaaggcaaagcgcgcgtcgccaaagcggcgagcggcacctacgtgtttaacgaacgtaaaattctcgacgcatcgcacgtggtggtgttctgcgccaaaaccgcaatggacgacgcctggcttgagcgcgtggtcgatcaggaagaggccgatggccgcttcgccaacgccgaagccaaagcggcaaaccataaaggccgcaccttcttcgccgatatgcaccgcaaagatttgcatgacgacgaccagtggatggcgaagcaggtgtatctgaacgtcggcaacttcctgctgggcgtggcggcaatgggcctggacgccgtaccgattgaaggcgtcgatttcgcaattctcgatgccgaatttgacctgaaggccaagggctacaccagcctggtcgtggtgccggtcggccatcatagcgttgaagattttaacgcctccctgccgaaatcacgcctgccgcaggcgacgacgattaccgagatttaa

SEQ ID NO: 173262 - DNA, 369 bp, Klebsiella oxytoca
atggatcaccgctcgctgcatgaccacgcgcaccgtattgcgctggagcttccctttaccgagcactgctggccgttcggcccggagtacgatgtgtttaaagtcggcgggcggatttttatgctcaccgcaacggtacgcggccgcgcgctggtcaacctgaagtgcgatccgcaaaaatcgctgcttcatcaggccatttaccgcagcatcgagcccggctatcacatgaacaaaaagcactggatcaccgtggttcccggcgaggatatcagcgtggacctgctggcggagctgattgatgattcgtggaatctgatcgtcgataaactgagcaaaaaagagcagcagcggctgcgcccggggtga

SEQ ID NO: 173263 - DNA, 582 bp, Klebsiella oxytoca
gtggctcgtcctaagagtgaagataaaaagcaagcgttactggaggccgcaaccgccgcctttgcccagtcgggaatcgccgcctcaacctccgctatcgcccgcagcgccggggtagccgaggggacgctgtttcgctactttgccaccaaggacgatctgcttaacgagctttatctctctatcaaatcggggttagtacaggtcatggtggccagtcttaaaccgaacgaatcccgtccgaaagagaatgcccgcaatatctggaacagctatatcgactggggtatgcgcaaaccgatggagcataaagccatacgccgcatgtccctgagcgaacggattaccgatgaaacgcgtacccgggttaaagagatgtttcccgagctcaacgagatatgccagctttcggttaagccaatttttcttagcgatgcctatcgcacctttggcgatgcgctgtttctgtcgctggcggaaaccacgattgagtacgccagcaacgatccgcagcgtgccccggagctcattgcgctaggctttgaggcaatgtggcaggcgttacatgaggatacgcgctga

SEQ ID NO: 173264 - DNA, 1101 bp, Klebsiella oxytoca
atgaaccgtgtcattttcagcgtggtcgccatcatgttattagcgtcagcaacaactttgccgtttgtgttaaatgccggatttggccaggcgccgcagggcgcgcagctcagcctggtggaacagtcgccgcactatcatgacggccagtttcacaatcagctcccgacgccgggttttaccgggcaaaaaaatatgctggccgcgtggtgggagtttctcgtcgccaggcgcgagaacgccagaccggcccagccgctgccgttggtgaacaccgatctggcgggcctgccgtcagggcaggacgcgatggtctggctcggtcactcctcctggtatctgcagctggcgggcaaacgcatcctgattgatcccgtatttagcaactatgccgcacccttctcttttattaataaggcctttaccggggattacccatggcacgctgagggaatgccggagatcgacctgctgatcatctcgcacgatcactatgatcatctcgattacgccaccatcaaagccctgatgccgaaggtcaagcgcgtgataacgccgctgggcgtggggtcgcacctgcgctactggggaatggagagcgcgataatcagcgaggcggactggaatcaggcgctgcaggtgagcgatgagctgacggtacacgtcctgcccgcgcgccacttttccggccgcggcctcaagcgcaaccagaccctatgggccagctttatgttcgttaccccgcagcagaaaatttactacagcggcgacagcggctacggcccgcactttaaagccattggcgaacagtttggcgaagtggatttagcgatcatggaaaacggtcagtatgaccaggactggaagtacatccacatgatgccggaagagacggcgcaggccgctgacgatattcatgcacgcgcggtgctgccgggccatgccgggcgcttcgtgctggcaaaacacacgtgggacgatccgtataaacgactggcggaggccagcacagggcgaccgtggcgactgctgacgcctatgctgggtgagccggtttgggtcgctgataaaacgcaatcatttaacgcctggtggcgctaa

SEQ ID NO: 173265 - DNA, 342 bp, Klebsiella oxytoca
atgactatttccgctcaggtcattgatactatcgtcgagtggattgatgaaaatttgcatcaaccgctacgtattgacgatattgcgcgccatgccggttattcgaagtggcatttacaacgactgtttttacagtacaaaggggagagtctggggcgctatatccgcgagcgtaagctgctgctggcggcgcgcgatctgcgcgataccgatcagcgggtttacgatatttgcctgaaatacggctttgactcgcagcaaacttttacccgcatcttcacccgtacgtttaaccagccgccgggtgcctaccgtaaagaaaatcacagccgcgcgcactga

SEQ ID NO: 173266 - DNA, 2145 bp, Klebsiella oxytoca
atgtttaaatataataagataacagcattatggactgcgactctggcggtatcttcgatcgggaatcaggcgctggcggcggaggaaacgcttgtcgtcaccgcgggcagtagcgaagatcctacagcgccgcttaagggaatagtggccaccaggacgctatccgcgacaaaaaccgccgcagagatcgtcaaaacgccgcagtcagtatcggtggttacccgcgatcaaatgcgcgcgctggacgtcacctcggtatcccaggcgctgcgctatagcgcgggcgtttttaccgaatatcgcggttcatctaaccgcaacgacgaggttttcgttcgcggctttagctatgtgcccaagtttctcgatggcctgagctacggcgcgacggcctcctcgcaaaccggtactttcgacccgtggctgctggaacgcgtcgagctggtacgcggcccggcctcggtgctgtttggccaggtaaaccccggcgggctgatcgccatgaccagcaaacgccctgtcagccagccgattcatgaactgcagttccgcaccggcaatcatcatcttgccgaaggcgctttcgattttggcggcccgctgagcgatgatggccgtctgctctatcgtctgaacgggatcgcccgtacccagaatagccaggttgaagattataaagagacgcggatggccatcgcccccgccctcacctggtatcctgatgacgccacgcgcatgacgttattaaccagctatcagaaagacccggatgccggttaccgtaacttcctgccgcgctacggtacggtggaaagcgtcgacggcagctatattccgcgtgattttaacgtcagcgatcccagctacaatcagtcgtggcgggaacaaacgatgattggctatgaatttgagcaccagccagacgatacctttactctgcgccagaacgcccgctacgccaccatcaaacagaagtatcgctacctggtttattccagtagccccgccaacagctcggtactctcccgccgcgcccagcatgaaacgcgccagaccgatgagtttggcattgataaccagctcgaagcaaagtttgccagcggccaggtggcccatacggtgattggcggtctggattacaaaaccagtaaagataagcagtatcttggccgggccggaggctcgcagtacgatctcgactggcgcagcccgacctacggcgttagcgtcgatgaaagcgccttcagccccgccactaatgaacagcaaaatctcgatcaggctggggtctatgttcaggatcagctgagctggcagaactgggaactgttagtttccgggcgctatgactgggcggaagtacgcaccaccgattttaccgatgccagcagcacccagcagaatgataataagttcacctggcgcaccggcctgctgtacgcctttgatttcggtctttccccctatatcagctacagcacctcctttgaacctaacctgcaaaccaaccgcgcgcctggcgttggaccgttcgatcccagcgaaggcaagcaggtggaagtcggcgtgaaataccagcctgacccaaacgcgctaatcacccttgcgctgtatgatttaacgcaaagtaacgtcgccacctacaacagcgccgccggatggtttgagaatagcggtaaagtgcgttccaaaggggttgaggccgaagcgcacgcgacgctctttgagaatctcaatctgatcgcttcatacacttataccgatgcagaaaccgtcaacactaccgttgtcggtaccgaagggaaaacgccagcgcgtattccgacccatatggcttcagccttcaccagctataccctgccggacggcgcgctgaaaagcctgactgcgggagtgggcgtacgctatatcggtaccagctatggcgatgcgaaaaacacctttaaggttccggcagtagatctgtatgacgccatggtcagctatgaattgggcgagctaaactcgagcctgaaaggcgcgcaggtacagttcaacgtaaacaacatcgcggataccagatatgtggcctcctgcgccagcgatagcgcctgcttctacggcattggtcggacggtgacggcaacggtcagctacgcctggtaa

SEQ ID NO: 173267 - DNA, 1623 bp, Klebsiella oxytoca
atgaaaacggcatggagcggtctgctgctggggttaagtgctttactggcggcggcgatgaactgtgaatccccttcgttacagggagagctggaggggaagttcgacgccagcggtgaggtctgttttgacttgcccaggctaggagagaactacgtcgcggcgacgctctccggcgttaccgatgcccgactgctggatgaacataaccgccgtctgcgcacgctgctggcgggcggcccggcggatggcgagcaaaccctactgttttctctgccggtaaaccgcgcctcctcgctggtgctccacggtgaagaaggagcccgctggcgctttcagtggcagatgcgggaaaccaccgcgctggccaaaatccagacgctggacccggtcagcccgcgcctgcagctgctgaagaaggaactggcggcgggaggctcaacggcgactttctggcgggagcgcgaactggagggaaccccaatggtggaatcggtggacgccagccataagcgggtgaccttcttgtggcgcggagcgagccgcaacgtgtttattctgggttcgccggcgggggatcacgatccgctgtttcgtctcggtgattctgacgtctggtttcgtagctacgtcgtacctgccgataccttaatgcagtataagctcgccccggatgtgccgcaggtagccggcggcgcgcgcgagcagcggcgggctattctggtcagcgcccaggccgacccgctaaacccgaatagcgtcaatgccgcccacgaccgctggagccgttactccctgctggctcttaaccccgcgcgtttttgctcggcgccgcggatggcgcagccgctacgctacgggacgctgacccgccatcagctgcgcagcgactttttgcaaaacgcgcgtgaagtcatgatttatcgcccacgtttgccgcagcccgcgcgctggaccctgctgctctttgacggtaaaacttaccaggacgaataccgcttcgccaacgtgctggacgccctgatcgccagccacaggctaccgccgattaacgtggtgtttatcgatagcctcgatcatccgcggcgggcaaaggagctgccgccaaatccgcactttgccgattttatggcccatgagctgctgccctggctgaaccgccaggggctcagcctgacccggcaaaaaaccgtggttgcaggatccagctacggcgggctggccgcgtcctgggtggcgctgcgctatccccggcagtttggcaacgtactgagcctgtccgggtcgtactggtgggcgccgaaaggggaagaggccagctggctgacccgacagtatcagcactcgccgcgctatccggtccgtttctggctacaggcgggaagatttgagacccgcgggccggacggcggtatttatgccaatacgcttgagttcgggcgggtactgagcgagaaggggtatacggtgagctttcatccctcctcgagcggccacgattatgtcgcctggtgcgaaggcctgatcaacggtatgcgcgacctgagcggattagcgctcaagagagaaccagcgacgccagacccagcgcagcgccagatactcgatggcgcccagcgctaa

SEQ ID NO: 173268 - DNA, 249 bp, Klebsiella oxytoca
atgaaacatccgctagaaacgctcatgagtgccgccggcattctcctgctggctttactctcctgtctgctgctgccggcgccctcgctgggtctgacgctggcgcagaagctggtggcgacgttccatctgatggatctcaaccagctttatacgctgatcttttgcctgtggtttttagcgctgggcgccatcgagtatctggcgctgcgctgggtctggcgtcgctggttctctcttgagcgctaa

SEQ ID NO: 173269 - DNA, 2724 bp, Klebsiella oxytoca
ttgaccaaaatgatcaaaactaataataccaccccctcaggggatgtcgcgccacgccgggcatatcagcagacggttgatgcggtgctggcgcagaaaaaaagccatgtcgacgggctcagcgccgctgaagccgccgagcgtttgcagaccttcggcccgaacgccttgccggagaaaaaaggcaagccagcctggctgcgcttccttgcccactttaacgacgtcctgattttcgtcctgctggccgccgccgcgctcaccgcggttatggggcactgggtcgatacccttgtcattcttggcgtcacggtgatcaacgccctgatcggccatatccaggagagcaatgccgaaaaatcgctacagggcatccgcaatatgctctccagcgacgcgcgcgtgcagcgcagcggtaaacacgaaaccatcccgacccgcgacctggtgccgggcgatattgtgattctgcgcgcgggcgaccgcgtgccggccgatatgcgcctgattgagagccataatctgcgggttgaagaagccattctgaccggcgagtcgacggtggtggataaaaccaccgacgcgctggaaggcgaactgccgctgggcgaccgtaccaatatgctcttctccggcacgaccatcagcgccggcggcggcgttggcgtggtgaccgcaaccggccaggataccgaactcggccacatcaaccagatgatggcgggcattgaaaagcaccgtacgccgctgctggtgcagatggataagctcggtaaagcgatcttcgttatcatcctggcgatgatggctgcgctgttcgtcttcagcctggcgctgcgcgatattcctctcggcgagctgctgctctccctgattagcctggcggtggccgccgtgccggaaggcttaccggcgattatctcgattattctctctctgggcgtacaggcaatggcgcgtcagcgggcgataatccgcaaactgccgacggtggaaaccctgggcgccatgaccgtggtgtgctcggataaaaccggcaccctgacgatgaacgagatgaccgttaaagcgatcatcaccgccgactgctgctaccgcgtcgaaggcgacagctacgagcctcagggtaacatctgcctggaaggcagcaacgagccggtgcagattaaaccgggcagcgtgctggaaacctatttgcgcaccatcgatctgtgtaacgacagccagatgattcaggacgagcgcggcctgtggggcattaccggcgggccaaccgaaggcgcgctgaaggtgctggcggcgaaagcgcggctggagcccgtcgatgcccgcctggtcgcgaaaatcccgttcgactcgcagtacaagtacatggcgacccaccagaaaatgggcgacgtcgagcaggtgctgattaccggcgcgccggacgtgatttttgccctgtgccgccagcagatgagcaagcagggggcggtgccgtttgagccgcagtactgggaagaggagatggcgcgctttgcccgccagggcctgcgtatggtcgccgccgcctacaaaccggctgacgtcggcagcaccacgctgacccacgacgatctgcgcgaagggctggtgttcctcggcattgccggaatgatggacccgccgcgtccggaagcgattgacgctatccacgcctgccagaacgcggggatccgcgtgaagatgattactggcgaccacccgcagacggcgatgagcattggccagatgttggggatcaccaacagcagccaggcgatgaccggctaccagctggagcacatggatgacgccgagctggcgaaagccgccgtggagttcgatatctttgcccgcaccagcccggagcacaagctgcgcctggtgaaagcgctgcaggataacggtgaagtggttggcatgaccggcgatggcgtcaatgacgctccggcgctgcgtcaggccgacgtcgggatcgccatgggcattaagggcactgaggtgaccaaagaggccgccgatatggtcctgaccgatgacaactttgccactattgccagctcggtcaaagaggggcgccgggtatacgataacctgaaaaagaccattctgttcatcatgccgaccaacctggcgcaggggctgttgattatcatcgccctgctggcggggaacattatcccgctgacgccggtactgattttgtggatgaacatggccacctccgccacgctctcctttggcctcgcgtttgaagccgccgagcgcaacgccatgaaccgaccgccgcgtaaaactggccagcacgtcatggatgccttcgccgtctggcgcgtcgccttcgtcggcacgatgatcgccgtcgccgcctttattcttgaagcctggctggcgccgcgcggccacagcccggagtttatccgcaccgtcctgctgcagatgctggtcaccgcgcagtgggtctacatgattaactgccgcagcagcgacagcttctcgctgaatatggggcttctgcgtaacaaaggcatctggctggtgagcggcgtgctgctgctgatgcagctggtcatcatctacgtaccggtgatgcagacgatgtttggcaccgaagggctgccgctgcgctactggttcatcaccctggtcatcggtatcgcgatgttcctggtggtggaagttgagaagcgcctgactcgtcgtttccgcaaagccgcgtag

SEQ ID NO: 173270 - DNA, 1083 bp, Klebsiella oxytoca
atgaacaagatcatccgctccgccctgctggcctgcggcctggcaggctacgcgcttatcgccgccgccgcgccggccattccggtgcgcgttgccaccgttgaacaagcgccgcatgccgatgaacggcaaatatccggccgcgttgaggccattcacgccgtcgacgttcgcgcccgtaccgaaggggcgatcgtgcagcgccatttccaggacgggcagtacgtcaaaaaaggcgagccgctatttacgctggatgacgcccagccgaaagccgcgctggcgctcgcgcaggccgaactgaaaagcgcgcaggcttccctgcgccaggcccagcagctgttgagccgctatcagcagctgaaaaataaccattctatcagccgtcatgacgtggataccgcgcagatgcagcgcgatgtcgccgccgccgccgtagagcaggcgcaggcgcgcattaccgcccagcagataacgctcggctatacccgcattacctcgccggtgagcgggcgcgtcggccatagtccttttcacgtcggcagcctggtcaatcccgccagcggcgtgctggttgaagtggtccagctcgatccgattcgcgtggcgttctcgctcgatgaatccgcctttttcgcgaaagcagggcagcacacggatatcgccgcgatgaagcaggcgtggctggcgcaggtggagttggatggacggcgtgaagacggcgtcctgacctccgttgataaccgtattgatagccgcaccgccagcgtggcgctgcgcgctgaatttgctaacccgcagcaccgtttactgccgggcggcaacgtcacggttttcttccgcccgcagcaacttaaggagagcccgatgatcccggcctctgcgctacagcaggatgcactgggcttttactgctgggtcgtaacggcgaacaacaccgtgacgatgcgccgtttagcgcccgccggtcagcatggccagagcttcgtggtggcggatggcctgaaagcgggagagcgcgtagtgacggaaggtgcccagcgcctgcgtgacggcgcggccattcagttgctgagtgaataa

SEQ ID NO: 173271 - DNA, 3093 bp, Klebsiella oxytoca
atgctgacattttttatccgacgcccgcgctttgcgatggtgattgccctgctgatgacctttgtcggcgcggtctcgctaaagctgatcccggtcgagcagtatccgcagattactccgccggtcatcaacgttagcgccagctggcctggcgccagcgcggcggacgtagcggaagctattgccgcgccgctggagacccagctcaacggcgtcgatcatatgctgtacatggagtccaccagttccgatgaggggacctacagcctgagcctgacctttgctgccggaaccgacgccgatttagccgcaatcgacgtgcagaaccgcgtgtcgcaggcggtggcgcagctgcctgccgacgtgcagcagaacggcgtacaggtgcgaaagcgggcgacaaacctgctgatgggggtgagtctctactctccgctcggcaccctgtcgccgctgtttgtcagcaactacgccagcacccaggtgcgcgaggcgctggcgcgtcttcccggcgtcggggaagtgcagatgttcggcgcgcgcgactacagcatgcgcatctggctgcgccccgaccgcatgaacgcgctgaatatcacgaccgacgatattgcccttgcgctgcgcgagcagaacgtgcagggcgcggcggggcaggtaggcacgccgccggtgtttaacggccagcagcaaacgctgaccatcaacggtattgggcgattaagcgatgccgccggtttcggacaaattgtggttcgcagcggcgaacgcggccagctggtacgcctgtccgacgtggcgactattgaactgggcgctcgcagctacagctccggcgcgcagctcaacggcaaagactccgcctatctcggcatctacccgacgcccaccgctaactcgctgcaggtcgctactgcggtacgcgccgagctgacccggctgcatgcgcgcttcccggcggatctcacctgggaggtgaagtttgatactacccgctttgttgcggcgacgatcaaagagatcggcgtgtcgctggcgctgaccctgctggcggtggtggtggtggtctccctgttcctgcagagctggcgggcgacgctgatagtcgcgctggccatcccggtgtcgcttatcggtaccttcgcggtgctctacgcgctgggctacagcgccaataccctgagtctgtttgcgattatcctcgccctgacgatggtggtagatgacgctatcgtggtggtggagaatgtggaaacaaaaatggcggaggggctggatcgcggcgccgcaaccgccgaagcgctgcggcaaatcgccgggccggtgatcgccacgaccctggtgctgctggcggtgttcgtgccggtggcaatgctgccggggatcgttggcgagctgtatcgccagtttgcggtcaccttatcgacggcggtgacgctgtcgagcgtggtggcgctgaccctgacgcctgcgctgtgcgcgctgctgctgcgtccgcgtccggagcggcctgccgccatctggcgcggctttaaccgcggcctggatacggtgcgggacggctacgggcgtctggtcgggggcatgaatcgccgtccctggctggcgctggcggcgacggtagccgcggcagggctggtggtattgagctttaccacaatgccgaaaggctttctgccgcaggaagatcagggttatttctttgccagcgtgcagctgccagaagccgcctcgctggagcgtaccgaggcggtgatggcccaggcgcgggagctgctgttgaggaacccggcggttgaggatgtgattcaggtgtccggttttaatattctcaacggcaccagcgcctcgaacggcgggtttatctccgtgatgctgaaagagtggcatcagcggccgccgctggacgcggtgatggaaaaactacagggccagctgctggggctgccggaagcgacgattatggcttttgcgccgccgacgctgccggggctgggcaacgcctccggatttgatttacgcattatggcgcaggctggacaatcgccggcggagctggagcaggtcacccatcagatcctgcgaatggccaaccagcatccgcagcttagccgggtctttaccacctggagcagcaatgtgccgcagctgacgctcaccgtcgatcgcgaccaggcggcccggttgaacgtaccggtggcaagaattttcagcagcctgcagaccgcgtttggcggcacccgcgccggcgatttcagcatcaataatcgtgtctaccacgtggtgatgcaaaatgagatgcagtggcgcgagcgggccgagcagattagcgagctttacgtgcgtagcgacagcggcgagcgggtgcgtctgagtaatctggtgacgattacgccaacggttggcgcgccgtttattcagcaatataaccagttcccgtcggtatcaataagcggttcggcggctgaaggcgtcagcagtcgggcggcgatggcggtgatggagcagattttacaatcgaatctgccgcacggttatgactatgcctggagcggcatctcgtggcaggagcagcagaccggtaaccaggcggtatggatcgtgctggcggcggtggcgatggcgtggctgtttctcgtcgcccagtatgagagctggacgctgccggcgagcgtgatgctgtcggtgctgttcgctatcggcgggtccctgctgtggctatggtgggccggttatgccaacgatgtgtacgtgcagatagggctggtgctactgatcgcgctggcggcgaaaaacgcgattttgatcgtcgagtttgcccgggcgaagcgtgaagaggggatgtcgatcgtcgacgccgcccgcgaaggggctacccgtcgcttccgcgcggtgatgatgacggcggtctcctttatcatcgggattgtgccgatgatgctcgccaccggcgccggggcgcagagccggcggatcatcggtaccacggtgttcagcggcatgctggtggcgacggcgatcggcattctgtttattccgtcgctgtacgtgctgttccagcgcctgcgcgagtgggcgcaccgccggatgtag

SEQ ID NO: 173272 - DNA, 2115 bp, Klebsiella oxytoca
atggctcgtacaacacccatcgcacgctaccgtaacatcggtatcagtgcgcacatcgacgccggtaaaactactactaccgaacgtattctgttctacaccggtgtaaaccacaaaatcggtgaagttcatgacggcgctgccaccatggactggatggagcaggagcaagagcgtggtattactatcacctccgcagcgactactgcattctggtcaggtatggctaagcagtatgaaccgcatcgcgtaaacatcatcgacaccccggggcacgttgacttcactatcgaagtagaacgttccatgcgtgtgcttgatggtgcagtaatggtttactgcgcagttggtggtgttcagcctcagtctgaaaccgtatggcgtcaggcaaacaaatataaagttccgcgcattgcgttcgttaacaaaatggaccgtatgggtgcgaacttcctgaaagttgttggtcagatcaaaacccgtctgggcgcgaaccctgttccgctgcagctggcgattggcgctgaagaagcgttcaccggtgttgttgacctggtgaaaatgaaagccatcaactggaacgaagaagatgcaggcgtaaccttcacctacgaagatattccggcagacatgcaggaactggccgaagaatggcaccagaacctgatcgagtccgctgctgaagcttctgaagagctgatggaaaaatacctgggtggcgaagaactgactgaagaagagattaaaactgctctgcgtcagcgcgttctgaacaacgaaatcatcctggtaacctgtggttctgcgttcaagaacaaaggcgtacaggcgatgctggatgcggtaattgactacctgccatccccggtcgacgttcctgcgatcaacggtatcctggacgatggtaaagatactcctgctgagcgtcacgctagcgatgatgagccgtttgctgctctggcattcaaaatcgctaccgacccgttcgtgggtaacctgaccttcttccgcgtgtactctggtgtggttaactctggtgataccatcctgaactccgtgaaagctgctcgtgagcgtttcggtcgtatcgtacagatgcacgctaacaaacgtgaagagatcaaagaagttcgcgcgggcgatatcgctgctgctatcggtctgaaagacgttactacgggtgatactctgtgtgatcctaacgcgccgatcattctggagcgtatggaattccctgagccggtaatctctatcgccgttgaaccgaaaaccaaagctgaccaggaaaaaatgggtctggctctgggccgtctggctaaagaagacccgtctttccgcgtatggactgatgaagaatctaaccagactatcatcgccggtatgggtgagctgcacctcgacatcatcgttgaccgtatgaaacgtgaattcaacgttgaagcgaacgtcggtaaacctcaggttgcttaccgtgaagcgattcgcgcgaaagttaccgatatcgaaggtaaacacgctaaacagtctggtggtcgcggtcagtatggtcacgtcgttatcgacatgtacccgctggagccgggctctaacccgaaaggttacgagttcatcaacgacattaaaggtggtgtaattcctggtgaatacatcccggccgttgataaaggcatccaggagcagctgaaagctggccctctggctggttatccggtagttgatctgggcgtgcgtctgcacttcggttcttaccacgacgttgactcctctgaactggcgtttaaactggccgcttctattgccttcaaagatggctttaagaaagcgaaaccagttctgcttgagccgatcatgaaggttgaagtagaaactccggaagagaacactggtgacgttatcggtgaccttagccgtcgtcgcggtatgctgcgcggtcaggaatccaacgtgactggcgttgtgatccacgctgaagttccgctgtctgaaatgttcggatatgcaactcagctgcgttctctgaccaaaggtcgtgcttcttactccatggagttcctgaagtatgatgatgcgccgaacaacgttgctcaggccgtaatcgaagcccgtggtaaataa

SEQ ID NO: 173273 - DNA, 471 bp, Klebsiella oxytoca
atgccacgtcgtcgcgtcattggtcagcgtaaaatcctgccggatcctaagttcggatcagaactgctggctaaatttgtaaatatcctgatggtagatggtaaaaaatctactgcagaagcaatcgtatacagcgcgctggagaccctggctcagcgctctggtaaaaatgaactggaagcattcgaagtcgctctcgacaacgttcgcccgactgtcgaagttaagtcccgccgcgttggtggttctacttatcaggttccagttgaagtccgtccggttcgtcgtaatgctctggcaatgcgttggatcgttgaagctgctcgtaaacgtggtgataaatccatggctctgcgtctggcgaacgaactttctgatgctgcagacaacaaaggtactgcagttaagaaacgtgaagacgttcaccgtatggcagaagccaacaaggcgttcgcacactaccgttggtaa

SEQ ID NO: 173274 - DNA, 375 bp, Klebsiella oxytoca
atggcaacaattaaccagctggtacgcaaaccacgcgcgcgcaaagttgcaaagagcaacgtgccggcgctggaagcctgcccgcagaaacgtggcgtatgtactcgtgtatataccaccactcctaagaaaccgaactccgcactgcgtaaagtttgccgtgtgcgtctgactaacggtttcgaagtcacctcctacatcggtggtgaaggtcacaacctgcaggagcactccgtgatcctgatccgtggcggtcgtgttaaagaccttccgggtgttcgttaccacaccgttcgtggtgcgcttgactgctccggcgttaaagaccgtaagcaagctcgctccaagtatggcgtgaagcgtcctaaggcttaa

SEQ ID NO: 173275 - DNA, 288 bp, Klebsiella oxytoca
atgctccacacattaagcacatccccctggcacgccgacattgcggctatgctccgtttgataaaaaaaggtgacgagctgctgctgctgtcggacggcgttaccgccgctgtcgcgcaaggccgcttccttgaaatcctgcaatctgcccccatatccctctacgctctgcaagacgatatcgaagcccgcgggctggctggtcaaattgcggacagtgtcgtcagggttagctatactgatttcgtcagactttcagtcaaacatgccggtcagttgtcctggtaa

SEQ ID NO: 173276 - DNA, 360 bp, Klebsiella oxytoca
atgaaacgcatagcctttattttttcgtccgcaccccatggctcagcatcgggcagggaagggctggatgccctgctggcgacatccgcactgacggaagagattggcgtcttcttcgtcggggatggcgtatttcagctccttccggagcagcggccagccgcagtgctggcgcgcgattatatctctacctttaaactcctgtcgctatacgatattgaacagtgctggatttgcgcggtttcagcgcgcgagcgcggcctgacttccgccacgccgtgggtcgtggacggtgaatggctggagccagaggctctgcgcgcccggctggacgattttaacgtgatactgcgtttctga

SEQ ID NO: 173277 - DNA, 387 bp, Klebsiella oxytoca
atgcgttttgccattacggtgacggggccggcttatggtacgcagcaggccagcagcgcactgcagtttgcccgagccgtgttgcaggaaggccacgaattgctcagtatctttttctatcgtgaaggcgtctacaatgcgaatcagctaactgcccccgccagcgatgagtttgatctggtccgggcctggcaggcattacatgatgaacacggcgtctccttacatatctgtgtagccgcagctttacgccgtggcataaccgatgcacaggaggcgcagcagctgagtttgccagcgcataatttgcagccgggctttacgctgagtggattaggtgcgttggcggaagctgccttaacctgcgaccggatggtgcagttttga

SEQ ID NO: 173278 - DNA, 723 bp, Klebsiella oxytoca
atgtccaggtcgcttttaaccaacgagaccagcgagcttgatttgctggatcaacgtccttttgaccagaccgacttcgatatccttaaatcctatgaagcggtagtggacgggttagcgatgctcatcggttcccactgtgaaatcgtactgcactcattgcaggacttaaaatgttccgctattcgtatcgccaacggtgaacataccggccgtcagatcggctcgccaattaccgaccttgcgttgcgcatgttgcacgatatgactggggccgatagcagcgtttccaaatgctattttactcgcgccaaaagcggcgtactgatgaaatcagtgaccatcgctatccgcaaccgtgaccatcgggttattggcctgctgtgcatcaacatgaaccttgacgtgccgttctcgcaaataatgagcacctttattccgccagaaacgacagaagtcaattcacaggtcaactttgcttcatcggttgacgacctggttgcacagacgcttgagttcactattgaagaggtgaatgccgaccgcaacgtttctaacaacgccaaaaatcgtcagatcgttctgaacctctatgagaaagggatctttgatatcaaagacgccattaatcaggtagcggatcggctgaacatctctaagcacacggtatatctctatattcgtcagttcaaaagcggagatttccaggggctggataaataa

SEQ ID NO: 173279 - DNA, 837 bp, Klebsiella oxytoca
atgaaatcactgtttaaagtaacgctgctggcgaccacaatggccgtcgccctgaatgcaccgctgacctttgctgctgaaactgtgaccaaagcagccaccgaagcgaaagcggcacctgcaacggacagcaaatcggcattcaaaaatgacgatcagaaatctgcatatgcgctgggtgcatcgctgggacgttacatggaaaactccctgaaagaacaagaaaaactgggcatcaaattagataaagctcagctgattgccggcgttcaggacgcttttgccgataagagcaagctgtccgatcaggagatcgaacagactctgcaggcgtttgaaactcgcgtaaaaaccgctgcccagcagaaaatggaaaaagatgctgctgagaatgaggcaaaaggtaaagcttatcgcgatgcctatgcgaaaaagcagggtgtgaaaaaagcgaattccggtctgctgtacaaagtagagaaagcgggtacgggcgaagcgccgaaagacagcgataccgttgttgttaactacaaaggtacgctgatcgatggtaaagagtttgataactcttacacccgtggcgaaccgctgtccttccgtctggacggcgtaatccctggctggactgaaggcctgaagaacatcaagaaaggcggtaaaattcagctggtcattccaccggatctggcttacggcaaaaccggcgtaccgggtatcccggctaactccactctggtatttgatgtagagctgttggacatcaaaccggctccgaaagcggacgccaagcctgaagctgcggccgaagcgccagccgctgacgcgaagaagtaa

SEQ ID NO: 173280 - DNA, 219 bp, Klebsiella oxytoca
atgcacgatagcactttagagactcgccttgcagagctggagagcagactggcgtttcaggaaatcaccattgaagacctcaacaagaccgtcaccgcccacgagatagaaatggccaggatgcgcgaacatatgcgcctgatggtggaaaagctgaaagctactcagccctcgcatatggcttcacaggcagaagaaacgcctccaccgcactattaa

SEQ ID NO: 173281 - DNA, 588 bp, Klebsiella oxytoca
atgaaagtagcaaaagacctggtggtcagcctggcctatcaggtacgtacagaagacggtgtgttggttgatgagtctccggtaagcgcgccgctggactacctgcatggtcacggttccctgatttccggcctggaaagcgcgctggatggtcacgaagtgggcgacaaatttgacgtagaagtcggcgctaatgacgcgtacggccagtacgacgaaaacctggtacagcgcgttcctaaagacgtgtttatgggcgttgacgagctgcaggttggcatgcgcttcctcgcggaaaccgatcagggcccggtaccggtagaaatcaccgaagtgggtgacgaacacgttgttgttgacggtaaccacatgctggctggccagaatctgaagttcaacgttgaagttgtcgcgcttcgcgaagcaacggcggaagagctggaacacggtcatgtacatggcgctcacggccacgatcacggtcacgaccacgatcatgacggttgctgcggtggccacggtcacggccatgaccacgaacatggcaaaggcggctgcggcggtaacggcggctgcggttgccactaa

SEQ ID NO: 173282 - DNA, 201 bp, Klebsiella oxytoca
atggctgtgcgtaaacgttttattgccggggcgaaatgcccggcgtgccaggctcaggattcgctggcgatgtggcgtgagaataatgtcgatatagttgagtgcgttaagtgtggacaccagatgcgagaggcggataaagaggtccgcgagcatgttcgcaaagaagagcaagtgataggcatttttcatctggactag

SEQ ID NO: 173283 - DNA, 1806 bp, Klebsiella oxytoca
atggcgggagctgatttactgctggccggggtgttatttctgtttgccgcggtggtggcggtaccgctggcggcgaggctgggtattggcgccgtgctggggtatctgctggccggtatcgccattggcccctgggggttagggtttatcagcgatgttgatgaaatccttcacttctcagaattaggcgtcgtctttctgatgtttattattgggctggagctgaatccgtccaagctctggcggctaagaagctcaattttcggcgtaggcgccgcgcaggtcgctttcagcgcgctcattcttggcggcttgctcatgcttagcgacttctcatggcgcgcagcggtggtgggcggacttgggctggcgatgtcttcaaccgcgatggcgctgcagctgatgcgtgagaaaggcatgagccgcagcgagtccgggcaactgggattctccgtactgctgtttcaggatctggccgttatcccggccctggcggtggtgcccctgcttgccggttcaggtgacgaccactttaattggctcaccatcgggatgaaggtcctggcctttggcggaatgctggttggcggccgttttctgctgaggccggtgtttcgttttatcgccggatccggcgtgcgggaggtcttcaccgcagcgacgctgctgctggttcttgcatcggctttatttatggatgcgctcggtttgtcgatggcgctggggacctttatcgccggcgttctgctggccgagagtgagtatcgccacgaactggaaatcgctattgagccctttaaagggctcctgctcgggctgttttttatttccgttggcatggcgctgaaccttggcgtgctctatacccacctgctatgggtagcggccagcgtcgcaatactggtgtcggtaaaaggcgtcgtgctgtatctccttgcgcgggtgtacggcctgcgtagcgcagaacgggtgcagtttgccggagtgctgagccaggggggagaattcgcttttgtgctgttctcattacctgcctcgatgcgcctttttcagaacgatcaaatggctctactgctggtgacggtgacattgtcgatgatgaccacgccgctgttgatgaagctaatcgacaaaatactctctcaccgattcaatcaatccgaagaggagggcgaggctccgtgggtcgaagatgataaaccgcaggtcattatcgttggttttgggcgctttggtcaggtgattggccgcctgctgatggctaacaaaatgcgtattacggtgctggagcgcgatatcagcgcggtcaatctgatgcgccaatatggctataaggtctactttggcgatgcgacgcagctggagctcctgcgctcggcaggagccgaagaggcgcagtcgatcgtcattacctgcaatgagccggaagataccatgaagctggtcgagatgtgtcaacaacactttccacatcttcatattctggcgcgagcgcgaggacgcgtcgaggcgcatgaactgctgcaggcgggagtggcgcagttttctcgtgaaaccttctccagcgcgctcgagctagggcgtaaagcgcttatctcgctaggcatgcaccctcatcaggcgcagcgcgcgcagctgcattttcggcgtcttgatatgcgaatgttgcgtgagttaatgccggttcatagtgatactctgcagatatcccgcgtgcgggaagccaggcgcgagctggaggaaatttttcagcgtgagatgcaaaaagagagcagacagttagacggctgggatgaatttgaataa

SEQ ID NO: 173284 - DNA, 561 bp, Klebsiella oxytoca
atgtctcagacagcgaaggttttgctgctgtatgcccacccagaatctcaggattccgtggccaaccgggttttgcttgaaccggccttacagttgtcgaatgttaccgtgcacgatctttacgcgcactatccggatttttttatcgatatcgcccatgagcaggatctcctgcgccagcatgaggtgattgtttttcagcatccgctttatacctggagctgtccggcgctgatgaaagagtggctggatagggtgctcagccgtggttttgccagcggggcgggagggaaccagctggcgggaaagtactggcgtagcgtgattaccaccggggagccggagagcgcctatcgacgcgatgcccatcgctatccaataaatgacattcttcgccctttcgaactgaccgccggcatgtgccgcatgcactggataagcccgattatcgtctactgggcgcggcggcaatcgcctgacgatctgaaaagccgcgctcgtgcctaccgcgactggctggctaatcctgtaacggctggaggtacaaatggcgggagctga

SEQ ID NO: 173285 - DNA, 1905 bp, Klebsiella oxytoca
atgattgttttctcctcgttacaaattcgtcgcggcgtacgcgtcctgctggacaacgccagcgccaccatcaacccagggcaaaaagtcggcctggtgggtaaaaacggctgcggtaaatccacgctgctttcgcttttgaaaaacgagattagcgccgacggcggctcgatgacttttcccggtagctggcagttggcctgggttaaccaggaaacgccggcccttcctcagccggctatagactatgttattgacggcgatcgcgaattccgcaagctggaggcggatttgcacgcggccaacgaacgaaatgacggacatgccattgcgacggtccacggtaagctggatgccatcgatgcctggaccataagatcccgcgcggccagcctgctgcacggcctcggtttcagcaatgaacagcttgagaggccggtgagcgacttttccggcggctggcgcatgcgtcttaacctcgcccaggcgcttatttgccgttccgatctgctactgcttgatgaaccgactaaccacctcgacctcgacgcggtaatctggctggagaagtggcttaaaagctacagcggcacgctgatcctgatctcccacgatcgcgacttccttgacccaatcgtcgacaaaattattcatatcgaacagcaaacgatgttcgaatataccggcaactacagctctttcgaagtgcagcgcgcaacccgcctttctcaacaacaagcgatgtatgagagccagcagcagcgcgtggcccatctgcagagctatatcgatcgtttccgcgcgaaagcgaccaaagccaagcaggcgcaaagccgtatcaaaatgctcgagcgtatggagctcatcgcccctgcccacgttgataatccgttccactttagcttccgtgcgccggaaagcctgcccaatccactgctgaagatggaaaaagtcagcgccggctatggcgagcgcgtcattctcgattcgatcaagctgaatctggttccagggtcgcgcatcggtctgctggggcgtaacggagcgggtaaatccacgctgattaagctgctggccggcgagctacagccgctgcgcggtgaaattggcctggcgaaaggcatcaagcttggctactttgctcagcaccagcttgaattcctgcgcgcggacgaatccccgctccagcatcttgcccgcctggcgccgcaggagctggagcagaaactgcgcgactatctgggcggtttcgggttccagagcgacaaagtcaacgaagagacaaagcgtttctccggcggcgagaaggcgcgcctggtgctggcgctgatcgtctggcaacgccctaacctgctgctgcttgatgaaccgaccaaccacctcgatctcgacatgcgccaggcgctaactgaagcgttaattgattttgaaggcgccctggtggtggtctcccacgaccgtcatctgattcgttccactaccgacgatctttatctggtgcacgatagcaaagtcgaacctttcgacggcgatctcgaagactaccagcagtggttgagcgactcgcaaaagctggaaagccaggcatcggaagaaccgaaagaaaacggcaacagcgcccaggcgcgtaaagatcagaaacgccgcgaagccgagctgcgtacgcaaacccagccgctgcgtaaagagattatccgtctggaaaaagagatggagaagctcaacgcccagctggcgcaggcggaagagaagctcggcgacagcggcctgtacgatcaaagccgtaaagcagagcttaccgaatgtttacagcagcaggccagcgcaaagtccggcctcgaagagtgtgaaatggcctggctggatgcgcaggaacagctggagcagatgctgcaggagggctag

SEQ ID NO: 173286 - DNA, 1023 bp, Klebsiella oxytoca
atggttgatatcactcctacagaaatgacgcccccggaaaacgactcgcagcagtttcatccgatgcgcggcgtaggcaatcgtcatttgcaaaccatgttgccgcggctaatccgtcgcaaactccgtttcactccccactggcagcgtcttgaactgccggatggcgactttgtcgatctggcctggagtgaagatccttctcaggcacgccataaacccagactggtggtatttcatggcctggagggcagcctgcacagcccttacgcacacggacttatccatgcggcaatgcagcgcggctggctgggcgtggtgatgcattttcgcggctgtagcggcgaacccaaccgaaataaccgcatctaccattcgggcgaaacggaagacggctcctggtttctgcgctggctccagcgcgaatacggttcggcaccgaccgcagcggtaggttattcgctcgggggcaatatgctgggctgcctgctggcaaaagaaggcgacgatattccggtcgatgccgcggtaatcgtctcggctccgtttatgctggaagcctgtagctatcatatggataaaggtttctcacgggtttatcagcgctatttgcttaatctgctaaaagccaacgccgcacgtaagctaaaagcctatcctggctctctgcccgtcgatttacgtcagctaaaaagcatgcgccgtatccgcgaatttgacgacagcatcaccgcgaggatccacggttttgccgatgcgctggactattatcgccagtgcagcgccatgccgcgcttaagcgatatcacgaagcccacgctgattattcacgcaaaagacgacccttttatggaccatcactcgataccgccgcaggaacaattgccagcgaatgtcgagtatcagctgacggagcacggcgggcacgttgggttcgtcggcggtaccttgcgtaagccagagatgtggcttgaaagacgtattccggattggctaacccgctggttaggaggaaaattatga

SEQ ID NO: 173287 - DNA, 219 bp, Klebsiella oxytoca
atgatcataccctggcaagagctcgctcccgaaacgctggatagcctgatcgaaagttttgtcttgcgcgaaggcaccgattatggtgaacatgaacgttcgctggttgataaagtctctgatgtaaaacagcagctaaaaagcggagaggccgtgctggtatggtcagagctgcacgagacggtcaacatcatgccccgcaagcagtttcacggctaa

SEQ ID NO: 173288 - DNA, 870 bp, Klebsiella oxytoca
atgtctgccaaacatccggtgattgccgtcacgggctccagcggcgcgggtaccacaaccaccagcctcgctttccgcaaaatcttcgcccagctgaatctgcatgccgccgaagtcgaaggggatagctttcaccgctacacccgcccggaaatggacatggcgatccgcaaagcgcgggatcagggcaaacatatcagctatttcggcccagaggccaacgactttggcctgctggaacagacgttttctgagtatgggctaagcggcaaaggccagtcgcgcaagtatttgcatacctatgacgaagccgtgccgtggaaccaggttccggggaccttcacgccctggcagccgctgcccgagccgactgacgtcctcttttacgaaggcctgcacggcggcgtcgtgacgccgcagcacaacgtcgcaaaccatgtcgaccttctggtcggcgtggtgcccatcgtcaatcttgagtggatccagaagcttatccgcgacaccagcgaacgcggccactctcgggaggcggtgatggactcggtggtccgctcgatggaggactacatcaactttatcaccccgcagttttcgcgcacccatctcaacttccagcgcgtccccacggtggatacgtccaatccctttgcggccaaagccatcccttccctggatgaaagcttcgtggtgattcatttccgcaacctgaaaaatatcgattttccgtggcttctggcgatgcttcagggttcgtttatctcacatatgaacacgctggtggtaccgggcggaaaaatggggctggcgatggagctgattatggcgccgctggttgaacggctgatggaaggcaagaaaataagctag

SEQ ID NO: 173289 - DNA, 405 bp, Klebsiella oxytoca
atgcaagcgcgagtgaagtgggttgaagggttaaccttcatcggtgagtcggcttctggccaccagattctgatggacggtaattccggggataaagcgcccagcccgatggaaatggtgctgatggcggcaggcgggtgcagcgcgattgacgtggtttccattttgcagaaggggcgtcataacgtcaccaactgcgaagttaagctgacctcggagcgtcgcgaagaggcgccgcgtctgtttacccatatcaatctgcactttatcgtgaccggtaaggagttgaaagacgcggccgtttcccgcgccgttgacctgtcggcggaaaaatactgctcggtggcgctgatgcttgagaaggcggtaaacattactcactcttatgaagtgatcgaaggataa

SEQ ID NO: 173290 - DNA, 633 bp, Klebsiella oxytoca
atggtgcttggcaaaccgcaaacagaccctacccttgaatggttcttgtctcattgccacattcataagtacccatcaaagagcacgctgatccaccagggtgaaaaagcagaaacgttgtactacatcgttaagggctccgtggctgtactcatcaaggatgaagaaggtaaagagatgatcctctcttacctcaaccagggcgatttcatcggtgaattaggcctgtttgaagaaggtcaggagcgtagcgcctgggtacgtgcgaaaaccgcatgtgaagtggccgaaatctcctacaaaaaattccgtcagttgatccaggttaacccggatatcctgatgcgtctctcttcgcagatggcgcgccgtctgcaggttacgtcggaaaaagtgggcaacctcgctttcctcgacgtgactggtcgtatcgcccagacgctgctgaacctggcaaaacagccggatgcgatgacccacccggacggtatgcaaattaaaattacccgccaggaaatcggtcagattgtcggatgctctcgcgaaaccgttggccgcatcctgaaaatgctggaagatcaaaacctgatctcggcacacggtaaaactatcgtcgtctacggtacccgttaa

SEQ ID NO: 173291 - DNA, 2079 bp, Klebsiella oxytoca
atgtggcgcaggctgatttaccacccggaagtcaactatgcactgcggcaaacgctggtgttgtgtctgccggttgcgatagggcttctgttcggtcatctacagcaggggctgctgttttctcttgttcccgcctgctgcaacgttgccgggctggatacaccgcataagcgtttctttaaacgcctgattatcggcggctgcctgtttgccggcagtagcctgatcgttcaactccttctgcagcgagaaatacctttgccgctgatcctcacgggtctggcgctcatcctcggcgtcacggccgaaatcagctcgctgcacgcaaggctgctgcccgcctcgcttatcgcggctatatttacgctcagtctcgcgggcaacatgccgatttgggagccgctgctgatctacgcgctcgggacgttatggtatggcgtttttaactggatctggttctggctttggcgcgaacagccgctgcgcgaatccttaagtctgctgtatcgcgagctggccaattattgcgaggccaaatacagtctgcttacccagcatacggacccctcaacatcgttgccgccgctgcttaatcgacagcaaaaggtggtagatctgataacccagtgctatcagcagatgcatatgttggcggccaaccagcgcagcgatcataaacgcctgctgcgcgcattccaggttggactggacctgcaggagcatatttccgtcagccttcatcagccggaagaggtgcaaaaactggtggagcgcagccatgcggaagcggtgattcgctggaacgcgcaaaccgttgccgcccgcctgcgggtgctggcggacgatctcctttaccatcgttatcctcagcgctttcagatggataaacagatcggtgcgctggaaaaaatcgcctggcagcatcccgataacccggtcgggcagttttgcgcctggcatttcagccgtattgcccgggttctgcgcacccagcggccgctgtacgcgcgtaacctgatggcggataaaacccgtcgcctgccgctgctgcctgccctgaaaaactatctgtcgcttaagtcgccggccttacgaaatgcggcgcgtatcagcgtgatgctgagcgtcgccagcctgatgggcagcgcgctaaacctgccaaaaccctactggatcctgatgacggttctgttcgtgacgcaaaacggctacggcgccacccgagtacgcatcgtccaccgggctgcaggaaccattgccgggctggtcattgccggactgacgctgcactttcacgtccctgaaggctatacgctgaccgcgatgctctttatcacgctgttaagctatctgattatccgcaagaactacggctgggcgatggtcggatttacggtaacggcagtgtataccctgcagctactcaccctgaacggcgaacagtttatcgttgccaggctgattgatacgctgattggctgcctgatcgccttcgggggtatggtctggctatggccgcaatggcaaagcggcctgctgcgcaaaaatgcccacgatgcgctggaagccgatcaggatgctatcaggctgatcctcagcgacgaccatcaggccccggcgctggcctatcagcgaatgcgcgtcaaccaggcgcataacgcgctgtttaactcgctgaatcaggcaatgcaggaacccggttttaactcgcactatctggaagatatgaagctgtgggttacccacagccagtttattgtcgagcatatcaacgccatgaccaccctggcgcgcgagcacaatatgctcacgccagatctggcgcaacgttatctggagtcctgcgagattgcgctccagcgctgccagcagcggctggattccgatgggccgggcagcgcaggggatgtgaatatcatggaggcgcaggatgcggaggttcctcgcggcccgctcagtacaatggagcagcatctgcagcgcatcctcgggcatctgaacaccatgcacacgatttcatcggtggcatggcgtcagcgtccgcatcatggcatctggctgcgcgccactaagcgctga

SEQ ID NO: 173292 - DNA, 1221 bp, Klebsiella oxytoca
atggcaactgaacaaccggcgatcacccgcgcgacattcgatgaggttattttgccaatttatgcaccggcggaatttattccggtgaagggcaaaggaagccgggtatgggatcagcaggggaaagagtacgttgatttcgccgggggtattgccgtgactgcgctcggacattgccatccggcgctggtggcggcactccatgaacagggtgaaaagctgtggcataccagcaacgtttttaccaacgaaccggccctgcgcctggggcgtaagctggttgatgcgacgttcgccgatcgcgtcgtgtttatgaactccggaaccgaagccaacgaaacggcttttaagctggcgcgccactataccgttactcgccatagtccgtacaaaaccaaaattatcgccttccataacgcattccacggtcgatcgctgtttaccgtctccgtcggcgggcagccgaaatattccgatggttttgggcctaaaccggccgatatcgttcacgtgccgtttaacgatttacacgcggtgaaagccgtgatggacgatcatacctgcgcggtggtggtcgagccgattcagggagaaggcggcgtgaccgcagcgacgccggaatttctgcaaggcttgcgcgatctgtgcgaccagcatcaggctttgctggtctttgatgaagttcagtgcggtatggggcgcacgggctcgctgtttgcttatatgcactatggcgtaacgccggatattctgaccagcgctaaggcgctgggcggcggtttccctatcagcgcgatgctgaccacccatgacatcgccagcgcgttccacgccggttctcatggttcgacctacggcggtaaccccctggcctgcgcggtgggcggagcggcgttcgatctgattaacacaccggaagtgctggacggcgtcaccgcgaagcgcgagctgtttgttgagcaccttcagcaaattgacgcgcggttcgatctgttcagcgatatccgcggcatgggactgcttatcggcgccgagcttaagccgcagtatcacgggaaagcgcgcgatttcctctacgccgccgcagaggctggtgtcatggtgctcaatgccggaccggacgtgatgcgctttgtaccgtcgctggtgattgatgatagcgatattgctgaaggcatgacgcgctttgcccaggctgttgagcgggtgctcagcgcttag

SEQ ID NO: 173293 - DNA, 564 bp, Klebsiella oxytoca
atgatcctgcttatcgataactacgattcttttacctggaatctgtaccagtatttctgcgaacttggggcagaagtgcaggtcaggcgtaatgacgagctgacgttagcggaaattgttgcgctggcgcccgcgaaaatcgttatttcgccggggccctgcacgccgaatgagtccgggatttcgctggcggttattcgccacttctccggcaagacgccaatcttaggcgtttgcctgggccaccaggcgatagcccaggttttcggcgccgcgatcgtgcgggcggccaaagtcatgcacgggaaaacgtcccccattagccatcgtggccagggggtatttcgtggcctcaataatccgctaaccgtgacccgctaccactccctgctgattgacccgctaacgctgcctgaatgctttgaggtgaccgctcgcagcgaggagggtgagatcatgggcattcgccaccgcgaattcgaccttgagggcgtgcaatttcatccggagagcattctcagcgaacagggccaccagctgctggcaaacttcctcaatcggtga

SEQ ID NO: 173294 - DNA, 603 bp, Klebsiella oxytoca
atgagcgataaatttggtgagggccgggatccttatctttactccggtctgcaggtcatgcgtaaccgcttaggtatccgccaggcacagcgccttgagcaggcggcgtgggagctgaccgcgctacgcgcggcaaccatcgaactcgggccactggtgcgcggcttgcctcatctctgcgcgattcatcgccagctctatcaggatattttcgactgggcgggacaactgcgtgaagtggatatctatcagggcgacacccggttctgccatttcgcctatatcgaaaaagaggggaacacgctctttcaggccctggaagaggaaggctatctggtggggcttgctcaggataaattcattgaacgtctcgctcattactactgcgaaattaacgtcctgcatcctttccgaatcggcaacggcctggcgcaacgcattttctttgaacaactggctattcatgctggctatacgctggactggcgtgatattgccgtcgatgtatggaaccaggccaaccagagtggcgcaatgggcgacctttctccactgcagacgatatttcgtaaagtggtaagcgaagctgcggaaactgagtag

SEQ ID NO: 173295 - DNA, 168 bp, Klebsiella oxytoca
atgaaaaagctcaccgaaaaacagaaatcccgactctgggaggatcgacgcaacgtgaattttcaggccagccggcggctggagggcgtcgatattccgctaatcaaccttactcccgaagaagccctggcgcgtattgcggcgttaaggagccactatgagcgataa

SEQ ID NO: 173296 - DNA, 570 bp, Klebsiella oxytoca
atgctcaaatcaactctcgcggcggtggctgccgttttcgccatttcagcattttccccggccatggcggcaaagggggatcctcatgtgttgctgaccacgtctgcgggcaatattgagcttgagctgaatagccagaaagcgcccatctcggttgataacttcctcaagtacgtgaacagcggtttttataacaacaccacttttcaccgtgtgatcccgggctttatggtgcagggcggcggctttaacgaacagatgcagcagaaacagcctaatccgccgattaaaaatgaagccgacaacggtctgcgcaacacgcgcggcaccatcgccatggcgcgtactgccgatcaggacagcgcaaccagccagttctttatcaatattgcggataacgccttcctcgatcatggccagcgtgatttcggctatgcggtgtttggtaaagtagtcaaaggcatggacgtcgcggataaaatttctcaggtgccgactcacaacgttgggccgtatcaaaatgttccgtccaaacctatcgttattctttccgcaaaagtactgccgtaa

SEQ ID NO: 173297 - DNA, 1185 bp, Klebsiella oxytoca
atgactaacagcaatcgtatcaagctcacatggatcagcttcttctcctacgccctgaccggcgcgttggtgattgtcaccgggatggtgatgggaaacatcgcagattattttcatctgcccgtctccagcatgagcaacacctttacctttcttaatgccggtatcctgatctctatcttcctgaacgcttggctgatggaaattgttccgctgaaaacgcaactgcgctttggctttatcctgatgattctggccgtcgccggtttgatgttcagccatagcctggcgctgttttccgcctcgatgttcgtgcttgggctggtcagcgggatcaccatgtcgattggtaccttcttgattacccatatgtacgaaggtcgtcagcgcggcgcgcggctgctgttcaccgactccttcttcagcatggcggggatgatcttcccgatgctggccgcctatctgctggcgcgcagcatcgaatggtactgggtttatgcctgcatcggcctggtctacgtcgctattttcattctgaccttcggctgtgaattcccggtcctgggcaaaaaagccttgcaggatagccagccggtcgtgaaagaaaaatggggtatcggcgtgctgtttctctccatcgccgccctgtgctacatcctcggccagttgggtttcatctcctgggtaccggaatacgccaaaggcctgggcatgagccttggcgatgcgggtaagctggtaagcgatttctggatgtcgtacatgatcggcatgtggtcattcagcttcatcctgcgcttctttgacctgcagcgtattctgaccgtgctggcgggcgtggcgacggtgctgatgtatctgtttattaacggttcgccggagcatatgccgtggtttattctcaccctcggcttcttctccagcgccatctatacgtcgatcatcaccctggggtcactgcaaactaaagtgtcgtcgccgaagctggtgaacttcattctgacctgcggcaccgtgggtaccatgctgactttcgtcgttaccggccctatcgttgccgccagcggaccgctggcagcgctgcataccgctaacggcctctatgccgtggtctttgtgatgtgtctgatcctcggcttcgtctcccgccaccgccagaacaacgcggcagcggaatcgcactaa

SEQ ID NO: 173298 - DNA, 1323 bp, Klebsiella oxytoca
atgacagcagcgccgctttggttaattgagaacgttcgtctgcccgatcgcgaagggttatggcagatagcgatagacaaggggcgcttcggggatatcacccctatgggggaggcgcgcaaagagaattttgaagtgctgaatgcgcgcggcgggctggccatccccccttttattgaaccgcatattcacctcgatacgacccagaccgccggcgagccgaactggaatcagtccggtaccctgtttgaagggattgagcgatgggcggagcgtaaggcgctgttgagccatgaagacgtgaaagcccgcgcctggaagacgttgaaatggcaaattgccaacggtattcagtttgtgcgcacccacgtcgacgtttccgatccgacgctgaccgcgctcaaagccatgctggaggtgaagcaggaagtcgcgccgtgggtagatttgcagattgtcgccttcccacaagaggggattttatcctatcccaatggtgaggctctgctggaagaagccctgcggctgggcgccgatgtggtgggcgccatcccgcattttgaattcactcgcgaatatggcgtggagtccctgcacatcgcttttcgtctggcgaaaaagtatcagcggcctttagatatccactgtgatgaaatcgatgatgaacagtcgcgattcgttgagaccgtggcggccctggcgttaaaagaggggattgggccgagagtgaccgccagccataccaccgcgatgcactcctacaatggcgcttatacatcacgtctttttcgtttgctgaaactgtccggcattaacttcgtggctaacccgctggtcaatattcaccttcagggacggtttgacgactatccgaaacgccgcggcatcacgcgcgtgaaggagctgatggcggcgggcattaacgtctgctttggccatgacgatgtctttgatccctggtatccgctgggaaccggcaacatgctgcaggtgctgcacatggggctgcacgtttgtcagatgatgggctatcagcagattaacgatggactcaagctggtgacggaaaatagcgcgcgaacgtttggcctgagcgattacggtattgcgacggggaacacggcgaatctggtgattctccctgcggaaaacgggtttgaggctgtgcgttgtcaggttccggttcgttggtcaattcgccaggggagagttatcgctaccacgcagctggcgcaaacctgggtacagatggatcggggcggggaggagctgttctttacccgaaatagcccctttgccggaacaaaggggcctgaggcttag

SEQ ID NO: 173299 - DNA, 2544 bp, Klebsiella oxytoca
atgagcaaagtcagactcgctatcattggtaatggtatggtcggccaccgctttattgaggaccttcttgataaatccgacgccagcctgttcgatattaccgtcttctgtgaagaaccccgtatcgcctacgaccgcgtacacctctcctcctacttctctcaccatactgccgaagagctctctttggtacgggaaggtttctacgagaagcacggcgttaaggtactggtcggtgaacgcgccattaccatcaaccgccaggagaaggtcatccactccagcgcaggccgtaccgttttctatgacaagctgattatggcaaccggctcctatccgtggatcccgccgataaaaggttctgaaactcaggactgctttgtttatcgcactattgaagacctgaacgctattgaagcctgcgcccgtcgcagcaagcgcggcgccgtcgtcggcggcggtctgttaggcctggaagccgctggggcgctaaaaaacctcggcgttgaaacccacgtcattgaattcgcccccatgctgatggcggaacagctggatcagatgggcggcgaacagctgcgccgtaagattgaaagcatgggcgtgcgggtgcacaccagcaaaaataccaaagagattgtccaggaaggacgcgaagcgcgtaaaaccatgcgttttgccgacggcagcgagctggaagttgacttcatcgttttctctaccggtatccgcccgcgcgataagctggccacccagtgcggtctggaagtcgctccacgcggcggcattgtgatcaatgacgcctgtcagacttctgacccggatatctacgccatcggggaatgtgccagctggaataaccgcgtttatggcctggtcgccccgggctataaaatggcccaggttaccgttgaccatatcctgaaaacagaaaacgcctttgaaggcgcggatctgagcgccaagctaaagctgctgggcgttgacgtcggcgggattggcgacgctcacggacgcacgccaggcgcgcgcagctacgtttacctcgacgaaagcaaagaggtctacaaacgccttatcgtcagccctgacaacaagaccctgctcggcgcggtgctggtgggcgacaccagcgattacggcaatctgctgcagctggtgctcaatgcgatcgaactgccggaaaacccggactcgctgatcctcccggcgcatgcgggcagcggtaagccgtcaattggcgtggataaactgccggacagcgcacaaatttgctcctgctttgacgtcaccaaaggcgcattgattgccgctattaataaaggctgccacaccgtggcggcgctgaaagcagaaaccaaagccggcaccggctgcggcggctgtatcccgctggtgactcaggttctcaacgccgaactggcgaaacagggcatcgaagtcaacaataacctgtgcgagcactttgcgtactcccgtcaggaactgttccacctcatccgcgtggaaggcatcaaaacctttgaagagctgctggcaaaacacggtaaaggctacggctgtgaggtttgtaaaccgaccgttggctcgctgctggcctcctgctggaacgaatatattctgaaaccgcagcacaccccgctgcaggataccaacgacaacttcctggccaatatccagaaagacggcacctactccgttattccccgctctgccggcggtgaaatcaccccggaagggctggtggcggtaggccgtatcgctcgtgaatttaacctgtataccaagatcaccggttcccagcgtatcggcctgtttggcgcacaaaaagacgatctgccggaaatctggcgtcagctgatcgacgcgggcttcgaaaccggtcacgcatacgctaaggcgctgcgaatggcgaaaacctgcgtaggcagcacctggtgccgctacggcgtgggcgatagcgtcggcttcggcgtagagctggaaaaccgctacaaaggcatccgtacgccgcacaaaatgaagtttggcgtctccggctgtacccgcgaatgcgcggaagctcagggtaaagacgtcggcatcatcgccacggagaaaggctggaacctttacgtctgcggtaacggcggtatgaaaccccgccacgcggatctgctcgcagcggatctggatcgcgaaacattaatgaaatatctcgaccgcttcatgatgttctatatccgtaccgccgacaaactgacccgtaccgcaccgtggttagataacctggaaggcggcatcgattatctgaagtcggtcatcatcgacgacaagctgggactgaacgagcatctggaagaagagatggctcgcctgcgtgcagcggtagtctgcgagtggacagaaaccgttaactcgccagcggcccaggtacgcttcaaacactttatcaacagcgacaagcgcgaccctaacgtccaggtcgtgcctgagcgtgagcaacatcgcccggccacgccgtacgaacgtatcccggtaactctggtggaggaaaacgcatga

SEQ ID NO: 173300 - DNA, 327 bp, Klebsiella oxytoca
atgagccagtggaaaaatatctgcaaactcgatgacatcctgccggaaaccggcgtctgcgcgctgttaggcgataaacaagtggcgattttccgcccgtatcacggtgaccaggtgtttgcgattagcaatatcgatccgttcttcgagtccagcgtcctctctcgcggcctgatcgccgagcatcagggcgagctgtgggtggccagcccgctgaaaaagcagcgcttccgcctgcgtgacggcctgtgtatggaagatgaaagccattcggtagcgcactatgaagcccgagtgaaagacggcatcgtgcagttacgtggttaa

SEQ ID NO: 173301 - DNA, 807 bp, Klebsiella oxytoca
atgtttacggacacaataaacaagtgcgcggccaacgccgcccgcattgcgcgcctttcggccaataatccaatcagcttctgggtcagctcaatgatggcgggagcctatgtcggcctcggcatcattcttatttttaccctcggcaacctgctcgatcctgcggtccgcccgctggtgatgggcgccacctttggcattgcgttaacgctggtgattatcgccggctctgaattgttcaccggccacaccatgttccttacgctgggcgtgaaagcgggcaccatcagccagagtcagatgtgggcgattctgccccagacctggatgggtaatctgctgggttcggttttcgtggcgctgctgtattgctggggtagcggcagcctgctgccggtcgatagcagcctcgtgcataccgtcgcgctggcaaaaaccagccaatccgcgatggcgctctttttcaaaggcgcgctgtgtaactggctggtgtgtctggcgatctggatggcgattcgtaccgagggcgcggccaaatttatcgccatctggtggtgtctactggcgtttatcgcgtccggctatgagcactccgtcgccaacatgacgctttttgccctctcctggtttggccatcacagcgatgcgtatacccttgcgggaataggtcacaatttgttatgggtaacactcggcaatactttgtccggtgtcgtatttatgggattgggttattggtatgctacgccgaaatcggagcgccccgccccggaaaaaactaacgagactgagagtctggctcagtag

SEQ ID NO: 173302 - DNA, 1374 bp, Klebsiella oxytoca
gtggaccatttgcctatattttgccaattacgcgatcgtgactgtttgttagtcggcggcggcgatgtggctgaacgtaaagctcgcctgttactggacgctggcgccagattgacggttaatgccctggattttgtgccgcaattccaggtatgggccgatgcaaacatgctaaccctggtccagggcgagtttaatcctgcgctgctggataactgctggctggccatcgctgctaccgataacgaagcggttaatcaacaggtcagcgaatcagcggaagaaaggcgaatattttgcaacgtggtcgatgcgcctcagcaagccagctttattatgccgtcgattatcgaccgttcaccgctgatggttgccgtctcttccggcggcacctcgccggtgctggcgcgcctgctgcgcgaaaagctggagtcggttctgccattacatttaggccagctggcccactatgcaggtcagctgcgttcaagggtgaagaagcagtttgccaccgtcggcgagcgccgacgcttctgggagaagctgtttgttaacgacaggctggcgcagtcgctggccaacgaggaccgccaggccgtcgcggacgctacggagcagctgctgaccgagccgctggatcatcgcggcgaagtagtgctggtaggcgcaggtcctggcgacgccggactgctgaccctcaaaggccttcagcaaatacagcaggccgatgtagtggtttatgaccgcctggtctccgacgacatcatgaatctggtgcgccgcgatgccgatcgggtcttcgtgggaaaacgctcgggctaccactgcgtaccgcaggaagagattaaccagattctgctgcgcgaagcccagggtggaaaacgcgttgttcgcctgaaaggtggcgatccgtttatctttggtcgcggcggcgaagagctggaaactttgtgtcatgcgggtattcctttctcggtagtaccgggaattaccgcggcctctggctgttccgcctactccggcatccccctgactcaccgggattttgcccagggcgtgcgcctggtcaccggccaccttaagaccggcggcgaactggactgggaaaacctggcggtagagaaacagaccctggtgttctacatgggcctgaaccaggctccggcgatccgggaaaaactgattgcccacggcatggcggcggatatgcccgctgccatcgttgagaacggcacggcgataacccagaaggtggtcaccggtacgttagaacagctggatattctggcgaagcaaatggccagccccgcgctgattattgtcggtcgcgttgtcggcctgcgcgacaagctgaactggttctcaaatcactaa

SEQ ID NO: 173303 - DNA, 1005 bp, Klebsiella oxytoca
atgaccaagcccatcgtttttagtggcgcacagccctcaggtgaattgaccattggcaactatatgggtgcgctgcgtcagtgggtaaacatgcaggacgattaccactgcatttactgcatcgttgaccagcacgcgattaccgtccgtcaggatccgcagcagctgcgtaaggcgacgctggatacgcttgcgctgtatctggcgtgcggtatcgacccgaaaaaaagcaccatttttgttcagtcccacgtgcctgagcatgcgcagctgggctgggcgctgaactgctacacctatttcggcgaactgagccgtatgacccagtttaaagacaagtcatcgcgctatgcggaaaacattaacgccggtctgtttgactatccggtattgatggctgccgacattctgctgtatcagactaaccaggtcccggttggcgaagaccagaagcagcacctggaactgagccgcgatgtcgcccagcgtttcaacgctatctatggcgacgtgtttaaagttccggaaccgtttattcccaaatccggcgcgcgcgtgatgtcgctgctggagccgaccaaaaagatgtccaagtcagatgataaccgcaacaacgttatcggtctgctggaagacccgaaatcggtagtgaagaagatcaaacgcgcggtcaccgactccgacgagccgccggttgttcgctacgacatccagaacaaagcgggtgtttccaacctgctggatattctctctgcggttaccggtcagagcattccagagctggagcagcattttgaaggcaaaatgtacggtcatctgaagggcgaggtggcagaagccgtttccggtatgctgaccgaactgcaggagcgctatcaccgattccgcggtgatgaagccttccttaatcaggtcatgaaagagggcgcagagaaagccagcgctcgcgcttccgtgaccctgaaagcggtttacgaagcgattggtttcgtcgccaaaccctga

SEQ ID NO: 173304 - DNA, 750 bp, Klebsiella oxytoca
atggataagttacacaacattcgcggtgtggcgtttgatctcgacggaacgctggtggacagcgcgccgggattgaccgctgccgttgataacgccctgtatgcgctggaactcccgatggcgggcgaagagcgagtcgtgacctggattggtaacggcgctgacgtactcatccagcgggccctgacctgggctcgtcaggagcgcgcgacgctcagagcggcgcagggcaaaccttccgtcgatcatgatgatatcccgcaggctgagcaacaggccattttgcgcaagttgttcgatcgctactatggcgaagtggcggaagaggggagctttttgtttcctgccgttgccgatacgctgggcgcgctgcacgcaaaaggcctgccgctggcgctggtgaccaataagccaacgccgtttgtcgcgccaattctgtcgtcgctggatatcgccaaatattttaccgttgttatcggcggcgatgacgtaaaaaacaaaaaaccgcacccggaaccgctgctgatggtcgcggagaaactggggctggcgcccgcagagctgctgttcgttggcgactcgcgcaatgatattcaggccgcgaaggccgccggctgctgctctatcggattgacctacggctacaactacggcgagccgatttcgttgagtgagccggattatatctttgaccaatttaatgaactcttgcccgctttcgggctaccgtacagtgaaaatcaggaataa

SEQ ID NO: 173305 - DNA, 678 bp, Klebsiella oxytoca
atgaagcagtatttgattgccccttcgattctgtcggctgattttgcccgtctgggcgaggataccgccaatgcgttggctgcgggtgcggatgttgtgcactttgacgtgatggacaaccactacgtgccgaatctgaccattggtccgatggtgctgaaatcactgcgaaattacggtatcaccgcgccgattgatgtgcatttgatggtcaagccggttgaccgcatcatccctgattttgccgccgcgggcgccagcatcattactttccatccggaagcttccgaacacgttgaccgtacgctgcagcttatcaaagagcacggctgtaaagccggcctggtatttaacccggcgacctccctgagctacctcgattacgtgatggataagctggatgtcattctgttgatgtccgtcaaccctggctttggtggtcagtcctttattccgcataccctggataaactgcgtgaagttcgtcgtcgcattgatgaatccggctacgacatccgtctggaagtggatggcggtgtaaaagtgagcaacatcgctgagattgctgctgccggtgcggatatgtttgttgctggctcggctattttcgatcagccggactacaaaaaagtcgttgaacaaatgcgtagtgaattagcaaaggttagccatggataa

SEQ ID NO: 173306 - DNA, 828 bp, Klebsiella oxytoca
atgaaaaagaatcgcgcttttctgaaatgggcagggggcaaataccccctgcttgatgatattaaaaagcacttgccgcagggcgactgcttgattgagcctttcgtgggcgccgggtcggtatttcttaataccgacttttctcgttatatcctcgctgatatcaatagtgatttgatcgatctgtataacatcgtcaaactgcaaaccgatgagtatgttgcggcggcgcgagagatgtttacgcctgagaacaacgttgctgaacagtattatctatttcgcgacgagtttaaccagagtcaggagccgctgcgccgcgcggtgctgttcctgtatctgaaccgtcatggctacaatggtctgtgtcgctacaacctgcgcggggagttcaacgtgccctttggccgttataaaaagccctattttcccgaagctgaactgtatcatttcgcggagaaggcgcagcatgccgagtttcattgtgaatcttatgaagagtgcatgaagcgggcagatcaccgttccgttgtttactgcgatccgccctatgcgccgctgtcgtcaacggctaacttcacggcctatcatacgaatagctttagccaggagcagcaggagctgctggctaaaaaagcggaatcgctgatgaaaaagcgtattccagtgctgatttccaaccatcgcacgccgctcactcaggagtggtataaaaacgccgctgagacgcatattgtgaaggttcgacgcagcatcagcagtaacggtggtacacgtaagaaggtggacgagcttctggctctgtaccgtccgcccaagaccaaataa

SEQ ID NO: 173307 - DNA, 1311 bp, Klebsiella oxytoca
atggatgaattaaaaccagaagacgatatgaaagccgatcgcagcgatcgtcgtactggtcgttctcgtcagtcttcagagcgtgatgccgatccgcaaatcaattttgatgatgtcgatcttgatgatgctgacgatggtcgcccgacgcgcggcagcaaagcacgccgtgagcgcgatgaagagcagtatgaagagtacgaagaagaagtagagtctgacgaaggcgatgacgaagagcgtcaggttgagcgtcgtccgcgtaagcgtaagaaagcgccggcaaaaccggcctcccgtcagtacatcatgatgggcgtgggcatcctcgttctgctgctgctgatcgttggcgttggttccgcgctgaaatcaccatcctcatccaacgagcaaaccgcttccggcgagaagagcatcaacttgtccggagatcaggacaataatacccagccagcggcccaggactcctctgcggcaaacaacgcgcaatcgcaggatgtctctctgccgcccatcgcgtctaacccgactcaagggcaggcgacggctgaaccacaagggcagcagcgcgttgaggttcagggtgacctgaataacgcgctgacccagcagcaggggcaaattgatagcgcggtagccaactctactctgcctacagaacctgctaccgttgcgccgctgcgcaatggcgccgccccgcgtcaggccactaccgagcgtcagacggcggcagcgccgcgtccggctgagcgtaaacatacggttatcgaaccaaaaccgcaggccacggcgaaagcgccgacgcagccgaagcaggttccggttcagcctaagcgtacagaaagcgtcgcagctacggccccggcaaaaactcagccgaccactaagcctaccgctactgcacaggctaaaccggctgcgactaccgctcctgcggcgaccaccgcgacagcatctactgctccggctgcgactgcagctgccgctccggcagcaacagcggcgactacgggtaaaagcgctggtgatgttggttcgatgaagtctgcgccgtccggccactatacgctgcagctcagcagctcttctaactacaacaacctcaacagttgggcgaagaaagagaagctggagaaatatgttgtctacgagactacgcgtaacggtcagccctggtatgtgctggtgagcggtatttacgcttcaaaagatgaagcgaaacgtgccgttgctacgctgccagcagatgtacaggcgaaaaatccgtgggcaaaaccgctgcatcaggttcagtctgacctgaaataa

SEQ ID NO: 173308 - DNA, 1095 bp, Klebsiella oxytoca
atggagaggcttactgtaaccctcggggaacgtagttacccgattaccatcgcggctggtttgtttaacgatccagcttccttcctgccactgaaatcaggcgatcaggttatgctggtcaccaatgaaacgctggcgccgctttatctggataccgtacgctccgtacttgagcaagcgggagtaaaagtcgatagcgtgattcttcccgacggcgagcagtttaaaagcctggcggtgatggatactgtttttaccgcgctattgcaaaaaccacacggccgcgacacgacgctagtggcgctcggcggtggggtgatcggtgatttaaccggatttgccgccgccagctaccagcgtggcgtgcgctttattcaggttcctaccactctgctgtcgcaggtggactcttcggtgggcggcaaaacggccgtcaaccaccctctcggtaaaaacatgattggcgccttctggcagccagtttccgttgttgtcgatctcaactgtcttaaaacgctgccgaagcgtgagctctcttccggtctggctgaagtgatcaagtacggcgtgattcttgacggcgaatttttcgactggctggaaaataatattgatgcactgatggcgctggatgaaaaagcgatggcgtactgtattcgtcgctgttgtgagctgaaagctgaagttgtcgctgccgacgagcgcgaaaccgggttacgtgctttactcaatcttggccatacttttggtcatgctatcgaagctgaaatgggctacggtaattggttacatggtgaagcggttgctgccggcatggtgatggcggcgcatgcgtccgagcgtttggggcggtttaatccgcaggatacgcagcgaattatccatctgctgcaacgtgcaggcctgccggtgtgcgggccgcaggagatgacagctgacgcgtatttgccccacatgatgcgtgataaaaaagtactggcaggcgagatgcggctggtgctacccctcgcgatagggaagagcgagatacgcggcggagtaccgcatgatgttgttcttggcgcgattgctgatactcagcaggcgcaacaataa

SEQ ID NO: 173309 - DNA, 522 bp, Klebsiella oxytoca
atggcagagaaacgcaatatctttctggttgggcctatgggtgccggcaaaagcactattgggcgccagttagcccaacagctcaacatggaattttacgattccgatcaagaaattgagaaacgcactggcgcagatgtgggttgggtctttgatgtagaaggcgaagacggcttccgcgaccgtgaagaaaaaatcatcaatgagttgacggaaaaacagggaatcgtgctggcaaccggcggtggctctgtaaaatcccgtgaaacgcgtaaccgtctctccgcccgcggcgtggtggtgtacctggaaacaactatcgaaaagcagcttgcccgtacgcagcgcgataaaaagcgtcctttgttacaagttgatgcgccgcctcgcgaagttctggaagcgttggcagatgagcgcaatccactgtacgaagagattgctgatgtcactatccgcactgacgatcaaagcgcgaaagtggtagcaaaccagattattcatatgctggaaagcaattga

SEQ ID NO: 173310 - DNA, 1239 bp, Klebsiella oxytoca
atgcgatggataagcctgctgtttctgctcctgccgctgatgggcgacgcggcaaaaaaggatcttcccgtgtcgctggtcatcgatgatgccccggtggcccaggtactccagtcgttggcggagctaaagcaaaaaaatctcgtgatcgctcctgacgtcagcggctcggtatctcttcatctgaatgaggttccctggctgcaggcgttgcgatcggtgatcgacagcgccggtttgacccttacccagcaaggttcggttctctacgtacacacccaggcgtggcaaaaggcgcagcagatgaaccttgaggcggaaagagcaaagcgtctgcagaatctccctttgcaggggcatagcgtgacccttcgctatgctgatgcggaggatctggctaaagccggcgaaaaattgctgagcgctcgcggacatctgacggtcgataagcgaaccaaccgtctgttgattcgagatgatgcccggcaccttccggcgttaaaagcatgggcccaggagatggatgtacccgtaggtcaggtcgagctggcggcgcatatcgtttcaatgagcgaaaccagcctgcgggaactgggcgttaaatggagcctggcagaagcgagcatcccgccaggctcgggtaaattaaccaccttgagcagcaacctggcggtaggggatgccagtacaagggccgggtttaacatcggccgcatcagcgggcggcttctggagctggagctctccgcgcttgagcggaagcagcaggtagacatcatcgccagccctcgactgctggcttcgcatatgcagcccgccagcattaagcaaggaagcgagataccttatcaggtctccagcggcgaaagcggcgcaacctctgtggagtttaaagaggcggtgctggggatggaggtaacgccgacggtgttacatcaaaaccgcgtacgtttaaaactcagaattagcgaaaatacgccgggccaggtgctcaaacaggataatggcgaagtattggctattgataaacaagaaatagaaactcaggtagaggttaaaagcggcgagaccctggctttaggcggtatctttgcgcaaaaaaataaaacttctcgcgagggtattcctctccttagcgacatcccctggtttggccagctgtttcgccgcgacggcaaggataacgaacgacgtgaactggttgtcttcatcactccacgtattctggcagtgcattaa

SEQ ID NO: 173311 - DNA, 441 bp, Klebsiella oxytoca
atgcgggggagcattgaacgcttgctggcggagcgtaaaagtctgttagcgatacctctcctgctggttctgattgccgcaatcggccgctggctcatgctgccttcccagacagaaacgccagtggagctctcgccgcgcatacagatgcagtggcgaaaactgctgccgctggtgagcgcgctacgtgccgccggaatagatgacgcagcgacccagccattttctcccattgagctccctgtggctggggcggcgcttatcgcctggcggccgatgggcggtgggggcgagatgcagctggaggctgactggcaagcggtgcctgcgctcttttcctggcttgcccgctgcgggatgcgggctacggctttctctgtgcagccggaaaaacaggctctacggttgactttgcatctgggggcggaagatgcgccttaa

SEQ ID NO: 173312 - DNA, 540 bp, Klebsiella oxytoca
atgagccacatcgtcaactttcttccctggcgcgaaacgcggcgaaaacagcgcctgcgcataggcggcctgttgagcgtcggtttactgcttatcctgcttgcggcgctgcttgccccacggctcaacaaacggaccgctcactggctggcaaccgttaagctaaacgctgataaccagctttacagcgcattacagcagcgtgagcgcaccatgcgtcagcagctacagcacagggagcaacagcgcctgcgccgcctgcggcgcgaaaaaaccgccgcgtggcagccaaggctacaggagatagcggcgcgtatgccggaagatgcctggttaacccatctggaataccgccagaacgctctgtcgctgagcgggctaacgttgaatcttaaagggttagccgcgctggaaaaggcgctggcaaacattagcggttttcttccggcaaaggcaggggaaacgcaccgcgatagcgaagggcgctggctatttcacttttccatggttggagaggacgaacatgcgggggagcattga

SEQ ID NO: 173313 - DNA, 792 bp, Klebsiella oxytoca
atggcttttagaaactggcgcataggaatgcatattcagcaggaccatattgctattgtcgcgttgttgcatgagcgctcacgctgggcgctgcggcgctggtggaatatcccattaatgcccggcaccgtgcgtcaggggatggtagtggacgttgagtcgctggcccaccagttgcaaagctggcggcgggagctgcctttgcagcatcaagtctgcattgccttcccggcggcgcgaacgctgcagaagcagctcccgcgtccgcagatttcattaagagaaagcgagcaggcgacatggataaccagcgccatggcgcagcagctggaaatgcccgcctcttcgctgtgcgtcgattatgcccaatctgctgcggtcgatggctggcgggttaccgctgcgcagcgcttagacgtcaacgcgctatgccggctggcaacccgcctcaggttaagagtggtggggattgtcccggatgccagcgcgcttagcgcttttatcccctggctgccggttgaaacgcaggggctggcgtggcgcgacgaagcgagctggctttgggcaaccgccgagaactggggatactgtttgtgcagcgacgctccctcttttccccacatggtttcccgggtaaacgccggagcatttcgtctctgcacttcagcgccgtgcgacgggcagagctttgacgcctggagcgtcatcgatcgcctgcagccgcctctgccgagctgcggcgacagctataccgttgctctggggttggcgctgggagcgcgccagctatga

SEQ ID NO: 173314 - DNA, 2559 bp, Klebsiella oxytoca
gtgaagttcgtaaagtatctttttatccttgcagtctgttgcgtactgctgggagcaggctcgatttttggtctctataaatatatagagccgcagctccccgacgtcgcaacgctgaaggatgtgcgcctgcaaatcccgatgcaggtctatagcgcggatggcgagctgatcgcgcaatatggcgaaaaacgccgtattcccgtcacgctgcagcaaatgccgcctgagctgattaaagcgtttatcgccaccgaagatagccgtttttatgagcatcatggcgttgaccctgtcgggattttccgcgccgccagcgtcgcgatgttctccggtcacgcctcgcagggcgccagtacgattacccaacagctggcgcgtaacttcttcctgagccccgaaaaaacgttgatgcgtaaggtgaaagaggccttcctcgcgatccgcatcgagcagttactcaataaagatgaaattcttgagctgtacctgaacaaaatctatcttggctatcgcgcctacggcgtcggcgcggccgcgcaggtctactttggcaaatccgtcgatcagcttacgctgagcgagatggcggtgattgcaggcctgcctaaagcgccgtcaacctttaacccgctctattccatggatcgtgcaaccgcccgccgcaacgttgttctctcgcgtatgctgagcgaaggctacatcacgcaggcgcagtacgatcaggcgcgtagccagcctattgacgcaagctaccataccccggaaatcgccttctcctcgccgtatctcagcgaaatggtgcgtcaggagatggtcagccgctacggcgagcaggcttatgaagacggctatcgtgtctacaccaccatcacccgtaaaaatcagcaggcagcccagcaggcggtgcggaataacgtgctggattacgatatgcgccacggctatcgcgggccggaaaaggtgctgtggaaagtgggtgaaacgccgtgggataaccagaaaatcatcgataccctgaaaaaaaccccaggctccggaccgctctctccggcggttatcacttcggcaaatccgcaggaagccgtcgcgctactgagcagcggaacctcggtgtcgctgaatatggaaggcgtccgctgggcgcggcgctttatctccgatactcaacagggcgccacgccgcgtaaggtgaacgatgtcgtgcagaccggacaacaagtctgggttcgccaggtaggcaacagctggtggctggcgcaggtgccggacgtcaactcggcgctggtatcgatcaacccgcaaaacggggcgatcattgcgctggtcggcggtttcgatttcaaccaaagcaagttcaaccgcgccactcaagcgctgcgtcaggttggctctaacattaaaccgttcctctacaccgcggcgatggataaaggcctgaccctggcgagcatgctcaacgacgtgccgatttcccgctgggatgccggttccggctccgactggcggccgaaaaactccccgccgcagtatgcgggtcctatccgcctgcgccagggtttgggtcaatcaaagaacgtggtgatggtccgcgcgatgcgggctatgggcgtggattacgcggctgagtatctgcagcgcttcggcttcccggcgcagaacatcgtgcggaccgaatcactggccctgggctccgcatcgttcacgccgctgcaggttgcgcgcggctactcggttatggctaacggcggtttcctggttagcccttatttcatcagcaaaatcgagaacgatcagggcggcgtcatttttgaagagcggccaaaaattgcctgcccacagtgcaatattccggtgatttacggcgatacgccgaagtctgatgtgctggaaaataaagacgttgaggacgtagcgacctcgcaggatccgcaaaatcccggcgttcctccgcagccgcagctggcgcaggcaaaccagtctctggtcgcgcaaagtggcgctccggagtatgcgccgcacgtgatcaacacgccgctggcgttcctgattaaaagcgccctcaacaccaatatcttcggcgaacccggctggatgggtaccggctggcgagcaggccgcgacctgcagcgtcacgatatcggcggcaaaaccgggaccactaacagctcaaaagatgcgtggttctccggctatggccctggcgtggtgacatcggtatggattggctttgacgaccaccgtcgcgatctcggccgcaccaccgcctccggcgccatcaaaaatcagatatcgggctacgaaggtggcgccaaaagcgctcagccggcctgggatgattttatgaaaagggtgctggaaggcgtaccggaagagccgctcacgccgccgccgggcattattacggtcaacattgaccgcagcaccggtcagttagccagcggcgggaatagccgcgcagagtactttattgagggaactcaacctacccagcaggccgttcacgaagtgggcaccaccatcaccgatggcgggggcgagactcacgaactgttctga

SEQ ID NO: 173315 - DNA, 561 bp, Klebsiella oxytoca
atgagcaaatcattacaaaaacccaccattctcaacgttgaaacagtcgcgcgctcgcgcctttttaatgttgaaagcgtggaccttgagttcagcaacggggtgcgccgcgtatatgaacggatgcggccttctacccgtgaagccgtgatgattgtgccgattgtcgatgaccacataatcctcattcgcgaatacgctgttggtaccgagtcctatgagctgggcttttcgaaaggcctgatcgatcctggcgaaagcgttatggaagccgccaaccgcgaactgaaagaagaggtcggatttggcgcgcaaaagctgacgtttttgaaaaagctcagcatggctccgtcctatttctccagcaagatgaatatcctggtggcggaagatctgtatccggaatcgctgcctggcgatgagccagagccgctgccgcaggttcgctggccgctatcgcagctgatgacgctgcttgatgaagaagacttcaacgaagcccgtaacgtgagcgcgctgttcctgctgcgggaatggcttcaggctcaggggcgactttaa

SEQ ID NO: 173316 - DNA, 2130 bp, Klebsiella oxytoca
atgggcacctttctgatatttttgttagctctgctaatctgcgcattgcttatcgggtggtggtatcactcgcatgccagacgtcgccgcctgccgctgctgcacgcctttagcgatgccgctacgcgcaccctctccgatgaagagcgcagcgccgtagaaaaatacctcgaaagtctcagccgcaaccagcagttgccagcttcaggcgccagtaccgcgccgctaaacctgatgctgaacgaacagagcgataccgtttatagcgttacccgagcgatcactcgctacggcatcaccacggacgatctcaacaaatggcgctacttccttgattcagtagaaattcatctgcccccattctgggagcaacatattaatgacgagaacagcgtcgaattaatctccaccacgagcctaccgctggtgattgcgcttaacgggcagacgctgagcgactatccgcaggagtcccgtggtttcgcccttgaacaagccccggcgacccaggcatctatccgcggggaagagagcgaacaaattgagctgctcaacatccgcccggaaacgcccgaagagcacgcactgagccgccccgacggccttcgcgaagctattctggcagtcgccgcgttcctgctgttttattgtagcctgatcgcccccgacgtcttttcgccctggcttctcggcggcggtatactgctacttcttgccagcgtatggggaatctacgcgccgccgcgcaaaacgtcgctgcgggaaattcattgtttgcgcggtatgcctaaacgctgggggttgtttggtgaaaacacccaggagcataccaacaatatttctctcggcattattgacctcatctacccgcgccactggcaaccgtggatcgcgcaggaccttggccagcaaacggatatcgacatctatctcagccgccatgtagtccgccagggacgctatctgtcgctgcacgatgaggttaaaaacttcccgcttcaatactggcttcgtagcacgattatcgccctgggagcactactggttgttgtcatgctgtgggccagcgttccgctaaacatgccttttaaattcacgctgtcatggctaaaaggcgcacagaccatcgaagccactacggtcgcccagctggagaaatcgaaaattcgcattggcgatacgctgcgcctgaaaggctcgggaatgtgtaacattcacaccccgggcgcgtggacagcaaaagagaactcgccgtttatgccgttcgattgttcacaaatcgtctggaatgatgcgcctcccctgcccctgccggagtcagatatcgtcagtaaggccgccgcgctgatgcagaccgttcagcgccagctccaccccgaatccgatgacgattcgcgggtcagcccggcgctacgctccgctattcagaaatccggcatggtgctgttggatgactttggcgatatcgtcaccaaaaccaacgacctgtgctctgcgaaagacgattgcgttcgcctgaagaatgcgctggttaacctcggtaacacccgtaactgggaaacgctgaccaaacgcgccagcgcgggcaaactggacggggttaacgtgctgctgcgtccggtaagcgcggagtcgctggagaatctggttaccacctccaccgcgccgttcgtcagtcgggaaacctcacgtgccgctcaggcgctgaatagcccggcgcctggcggttttctgattgccagcgatgaaggcagcgacctggtcaatcagccctggccaagcaccggattatacgacttccctgcacaccagcagtggagtgaactacggcgcctggcgagcatgttgatgcacacgccgttccaggctgaaggtatcgtcaccagcctttataccgatgctaacggcacacagcatatcaacctgcaccgtatccctgaccgcactggcctgtggcgctacctcgggacaacgctgctgctgctggccatgctgggctgcacggcgtatcacggcatccaggcttttcgtcgctatcagcgccatcgccagcgccaggaagagatccagaaatactacgaaagctgcctgaatccggttctgctctcctcgccggacccgcaagaataa

SEQ ID NO: 173317 - DNA, 684 bp, Klebsiella oxytoca
atgcattttgatatcgcctggcaggaggttgataccgttctgctggatatggacggcacgctgctcgacctcgcttttgacaactacttctggcaaaaactggttcccgaaacctggggcgccgcgcgcgggctcaacctgcaggaagccagagacgcgatgcgccaggaatatcatgccgtgcaacatacgctaaactggtactgcctggactactggagcgagcgcctgggtttggatatttgtgcgatgaccagcgagcaggggccaagggcgacgctacgtgatgataccgtgccgttccttgaggcgcttaaaaccagcggtaagcgccggattttgctgactaacgcgcatccgcacaatctggcggtgaagctaaaacataccgggctggatgcgcaccttgatttattgctttccacccacacatttggttatccgaaagaagatcagcgtctgtggcacgctgtggctgaagagaccggcttcgacgcgcgtaatacgctcttcgtcgacgataacgaggcgattctggacgcggcggcggagtttggcatccgctattgcctgggcatcaccaacccagattccggactggcggaaaaaagctacgttcgtcatcccgggttgaatgactaccggcatctgatcccctcgctgaccctacaggagaggccatga

SEQ ID NO: 173318 - DNA, 402 bp, Klebsiella oxytoca
atgaaagaaaaacccgtcgcagccgtcaggctggacaaatggctgtgggcagcccgcatttataaaacccgagcgctggcgcgcgagatgattgaaggcggcaaggtacactacaacggacagcgtagtaagccgggaaaagtggtcgaactcaacgccaccctgacgatccgccagggcaatgatgaacgcactatcgtggtaaaagacattaccgaacagcgcagacctgccagcgaagccgtcgcgctctatgaagagacggcagagagcatcgagaaacgcgagaaaatggcgctggcgcgaaaaatgaacgcgctaactatgccgcatcccgacaggcgtccggataagaaagagcgccgcgacctgatgagatttaaacacggcgatagtgaataa

SEQ ID NO: 173319 - DNA, 879 bp, Klebsiella oxytoca
atgactcaacacgatcaattacaccgctatctgtttgaaaactatgccgtacgtggtgagctggtgacagtttctgaaacgttagaacagatcctgactaaccatagctatccgcagccggtgaaaaccgtgctcgcggaactgctggtcgccaccagcctgctgaccgcgacgctgaaattcgctggcgatatcaccgttcagctgcagggcgatggcccgctgtcgctggcggtgatcaacggcaacaaccagcagcagatgcgcggcgtagcccgcgtccagggcgagatcccggatggagcggatctgaaaactatggtcggtaacggatatctggtcatcaccatctctccggaagagggcgagcgctatcagggcgtggtcggccttgagggagacaccctggcagcctgcctggaagattacttccagcgttccgaacagctgccgacccggctgatcatccgcagcggcgagcacgaaggcaaaccgatggccggcggcatgctgctgcaggttctgccggcgcaagatgcgcaggcggctgattttgaacatctgagcacgctgaccgaaaccatcaaagctgaagagctgtttaccctgccagcgaacgatgtgctctggcgtttgtatcacgaagaggaagtcaccgtttacgaaccgcagaacgtcgagtttaagtgcacctgctctcgcgaacgctgcgccggcgcgctgaaaacgctgcccgatgaggagattgatagcatcctcgccgatgagggtgagatcgatatgcactgcgactactgcggaaatcattacatctttaatgcaatggatattgccgagatccgcaacaacgcctctccggccgacccgcagctccactaa

SEQ ID NO: 173320 - DNA, 1623 bp, Klebsiella oxytoca
atgcgcgttaataatggtttaaccccgcaggatctcaaggcttatggtatcaatgacgtccaggatatcgtccataaccccagctacgatactttgtatcaagaagagctcgcccccaatctggaaggttatgaacgtggcgtattaacaaatcttggtgcaatcgccgtagataccggtatttttaccggccgttctccaaaagataagtatatcgttcgtgacgacaccacccgcgatacggtgtggtgggctgataaaggcaaaggcaagaacgacaataaaccgctgtcagaggaaacgtggcagcacctgaaaggactggtcacccgccagctctccggcaaacgtctcttcatcgttgacgccttctgcggcgctaacgccgacacccgcctgagcgtccgctttattaccgaagtcgcctggcaggcgcatttcgtgaagaacatgtttattcgcccgagcgatgaagaactggcaaactttgagccggatttcatcgtgatgaacggcgccaaatgcaccaacccgcagtggaaagagcagggtctgaactccgaaaacttcgtcgcctttaacctgaccgagcgcatccagctgatcggcggtacctggtacggcggcgaaatgaaaaaagggatgttctcgatcatgaactacctgctgccgctgaagggcatcgcttccatgcactgctccgccaacgtcggggaaaaagaggatgtcgctatcttcttcgggctttccggtactggcaaaaccaccctttccaccgacccgaaacgccgcctgattggcgatgatgaacacggttgggacgacgacggggtatttaacttcgaaggcggctgctacgctaagacgattaagctttcagaagtcgcagaaccggatatctatcatgcgattcgccgcgatgctttgctggagaacgtggtcgtactggccgacggcaccatcgactttaacgacggttcgaagaccgaaaatacccgcgtctcctatccgatctaccatatcgaaaacatcgttaagccgatatccaaagcgggtcatgccactaaggttatcttcctgaccgccgacgcgtttggcgttctacctccggtttctcgcctgaccgccgaccagacccagtaccacttcctgtctggctttaccgccaagctggccggtaccgagcgcggcgtcacggagccgacgccaaccttctccgcctgcttcggcgccgcgttcctttcgctgcacccgacgcaatacgctgaagtgctggtaaaacgcatgcaggcctccggcgcgcaggcctatctggtcaacaccggctggaacggcaccggcaaacgtatctcgatcaaagatacccgcgccattatcgatgcgatccttgacggttcgctggacaatgccgaaaccttcacgctaccgatgtttgagctgcagatcccgaccgagcttccgggcgtggatactcatatcctcgatccgcgcaacacctacggatcgccggagcagtggcaggaaaaagcggagcagctggcgaaactgtttatcgagaacttcgagaagtacaccgatacgccagcgggcgctgcgctggtggccgcagggccaaaactctaa

SEQ ID NO: 173321 - DNA, 2094 bp, Klebsiella oxytoca
atggagagtaaacgccttgataacgctgccctggcggcggggataagcccaagctacatcaatgctcacggtaagccgcagtctattgctgcggcgaccaagcagcggctgcttgatgcgatgcatcgtacagcgactgccgtgaaggcgacggttgatccgctgcctgcggtgcaggtgttcacctatggcaaaaagatgtctctgccggtggcgggccagggggagtttcactggatcctcaccaccgaagaagggaaacagtatcagggccaggcgcgcggcggagaaaccctgccgctgccggcaaaattgccggaagggtatcacacgctgacgctgactcaggacggcgagcgcagccactgtcgggttatcgtcgcgcccgcgcgctgctatgaaccgcaggcgctgaaggatggtaagaagctgtggggaacctgcgtgcagctgtatacgctgcgctcggagaagaactggggaattggcgacttcggcgatttgcgcgctatgctgccggaaatcgctcgccgcggcggcgcgtttattgggcttaacccgattcacgcgctctacccggctaacccggagagcgccagcccgtacagcccctcttcacgccgttggctcaacgttatctatatcgacgtcaacgcggtagacgatttccgtcacagcaaagtggcgcaaaaatggtggcaatcatcggctacgcagcaagccttacaggccgcgcgccagaccgatgacgttgactataccgccgtgaccgctcttaagctcactgcgctgcgcatggcctggaaaggtttttccgcgcgcaatgatgagacgacggcggagttccgtcagtttgtgacccgtgagggcgaaagtctgtactggcaggcggcgtatgacgcgctgcacgcctggcaggttaagcaggatccgatgcgctggggctggcccgcgtggccgaaggcttaccaggataccgatagcccggaggttaaagcattctgtaccgagcatgccgacgaggtgaatttttacctgtggctgcaatggctcgcttacacccagttcgccgagtgctggcataccagccagaacgatgccatgccgatcggcctgtatcgcgatctggcggtcggcgttgcggaaggcggagcggaaacctggtgcgatcgcgagctgtactgtctgaaagcctccgtcggggcgccgccggacattctgggtccgctgggacagaactggggcctgccgccgatggacccgcatatcatggtggcgcgcgcctatgagccatttgtcgagctgctgcgcgctaatatgcaaaactgcggggcgctgcgtatcgatcacgtgatgtcggtgctgcgtctgtggtggatcccttacggtgagacggccgatcacggtgcttacgttcagtatccggtagacgatctgttgtcgattctggcgctggagagtaagcgtcaccgctgtatggtgatcggcgaggatctgggaaccgtaccggttgagatcgtcggtaagctgcgaaaaagcggcgtttactcttacaaagtgctctatttcgaaaatgaccacgagaagactttccgtgcgccgaaggcgtatccggagcaatcaatggctgtggcaacgacgcatgacctgccaacgctgcgcggctactgggaaagcggcgacctgacgctggggaaatcgcttggcctgtatccggatgaggtggtgctgcgcggactttatcaggatcgcgagctggcgaagcaggggctgctggatgctctgcaccgctacggctgtctgccgaagcgtaccgggcataaagcgtcgctgatggcgatgacctcaaccctgaatcgcggtatgcagcgctatattgccgacagcaacagcgcgctgctgggcctgcagccggaagattggctggagatggccgagccggtcaatattcccggcaccagcacggagtatccaaactggcgtcgcaagctctccaccacgctcgaggcgatgtttgccgatgagcaggtgaataagctgattaaggatctggataagcggcgtaagtcggcaagtaagaagaaatccgcctga

SEQ ID NO: 173322 - DNA, 2391 bp, Klebsiella oxytoca
atgtcacagacttcttttaacaaagctcagtttcaggctgcactgacgcgtcagtggcagcattttggtttacagtccgcttccgagatgacccagcgtcaatggtggcgcgccgtaagcggtgcgctgtccgagctgttgtcggctcagccggtagcgaaagcggccgcagggcagcgtcacgtaaactacatctcaatggagtttttgattggtcgcctgaccggcaacaatttgctcaaccttggctggtatcagcaggtcagcgatgagctacaggcgcatgacgttaacctgaccgacctgctggaagaggaaatcgacccgggcctgggcaacggtggcctcggccgtctggcggcatgtttcctggattcaatggcaaccgtgggtcagtcggccaccggctacggcctgaactatcagtacggtctgttccgccagtctttcgctgacgggcagcagatggaagcgccggatgactggggacgtagcaactacccgtggttccgccacaatgaagcgctggacgtacaggtgggcctcggcggtaaagtgactaaaaatggtgagtgggttccggcatttgtgattaccggcgaagcctgggatctgccggtgctgggctaccgcaacaacgtggctcagccgctgcgtctgtggcaggctaagcacgcgcatccgtttaacctgactaaattcaacgacggcgatttcctgcgtgccgaacagcagggcattgacgccgaaaaactgacgaaagtcctctacccgaacgataaccatcaggcgggtaaaaaactgcgtctgatgcagcagtacttccagtgcgcctgctcggttgccgatattctgcgtcgccatcatctggcaggtcgcaagctggcagagctggcggattatgaagttattcagctgaacgatactcacccgacgattgcgattccggagctgctgcgcgtgctgattgacgagcaccagctgagctgggacgacgcctgggcgattaccagcaaaacttttgcttacaccaaccacaccctgatgccggaagcgctggagtgctgggatgagaagctggtaaaagcgctgctgccgcgccacatgcagatcatcaaacagattaacgaccgctttaaaacgctggtggataaaacctggccgggcgacaagcaggtttgggcgaagctggcggtggtgcacgacaaacaggttcgaatggcgaacatgtgcgtggtcagcggctttgcggttaacggcgttgccgcgctgcactccgatctggtggtgaaagatctgttcccggaatatcaccagctgtggccgaacaaattccataacgtcaccaacggcattaccccgcgtcgttggatcaagcagtgtaacccggcgctggccgcgctgctggataaaacgctgaagaaagagtgggccaacgatctcgaccagctgatcaacctcgaaaaatatgctgatgacgcgacgttccgccagacgtatcgtgagattaagctggccaacaaggttcgtctggcggagtttgtgaagcggcgtaccggtatcgaaattaatccgcaggcgattttcgatattcagattaagcgtctgcacgaatataaacgccagcacctcaacctgctgaatatcctcgcgcagtacaaagaaatccgcgagaacccgcaggccgaccgcgtaccgcgcgtgttcctgttcggtgcgaaagcggctccgggctactacctggcgaagaatattatctgggcgatcaacaaagttgccgcagcgatcaataacgatccgctggtaggcgataagctgaaagtcgtattcctgccggactactgcgtctcggcggcggaaatgctgatcccggcggcggatgtctccgagcagatctctacggcgggcaaagaggcctccggtaccggcaatatgaagctggcgctgaacggcgcgctgaccgtgggaaccctcgacggcgccaacgttgaaattgctgagcaggtgggcgaagagaacatcttcatcttcggtcatactgtggaagaagtgaaagcgctgaaggccaaaggttacgacccgctgaagtggcggaagaaagataagctgctggatgcggtgctgaaagagctggagagcggtaaatatagcgatggcgataagcatgccttcgaccagatgttgcacagtctgctgaaaggcggcgacccgtacctggtgctggcggattttgaagcctacgtggcggcgcagaagcaggttgatgagctgtatcgcgaccaggaagcctggacgcgcgcaacgattctgaacaccgcgcgctgcggcatgttcagctccgaccgttcgattcgcgattatcagcaacgtatctggcaggcaaaacgctaa

SEQ ID NO: 173323 - DNA, 2706 bp, Klebsiella oxytoca
atgttgattccgtctaaattaagtcgtccggtccgccttgaacacactgtggttcgtgagcgattactggcgaaactttccggcgcgaacaattatcgtctcgcgttggtgaccagcccggctggatacggtaaaaccacgctcgtttctcaatgggcggcggggaaaaatgaccttggctggttctcgctggatgaaggtgataaccaacaggagcgttttgccagctatctcatcgccgccgttcagcaggcgaccggcggccactgtgcagccagcgaggccatggtgcaaaagcgccagtacgccagcctgccttccctcttcgctcaactgtttatcgaactggccgactggcagcgcccgctattcctggtgattgatgattaccatctgatcaccaacccggttattcatgatgcaatgcgcttcttcctccgtcaccagccggaaaatatgactctggtggtgctgtcgcgtaatctgccgcagctgggtatcgccaacctgcgcgtacgcgatcagctgctggaaatcggcagccagcagctcgcttttacccatcaggaggccaagcagtttttcgattgtcgtctcagttcgcctattgaggccgacgacagcaaaaggctgtgcgacgatgttgccggctgggccaccgcgctgcagctgatcgcactctcggcgcgccagaacaacacttccgcgcaacactccgcccgtcgtcttgccggtattaatgccagccatctttctgactatctggtcgatgaggtgctggataacgtcgatccgcgaacgcgtaatttcctgctgaaaagctcgttgctgcgctcaatgaacgatgcgctcatcgtccgcgtcaccggcgaagagaatggccagatgcagctggaggagattgaacgccaggggctattcctgcaacggatggacgattccggcgaatggttccgttatcatccgctgtttggtaattttctgcgccagcgctgtcagtgggagctggcggttgagctgccggaaattcaccgcgcggcggccgagagttggatggcgcagggcttcccgaccgaggctatccatcacgccctggcggcgggcgacgctaaaatgctgcgcgatattctgctcaatcacgcatggggcatgtttaaccatagcgagctgagcttgctggaacagtctctcgccgcgctaccgtggtcaaacctgctggaaaatccgcggttaattctcctgcaggcctggctgatgcagagccagcaccgctatagcgaagtgaataccctgctggcccgcgccgagcaggagatggatacggaaatggacaccgccatgcacggcgatttcaacgccctgcgtgcccaggtggcgatcaacgccggcgatcaggacgaagccgagcgcctggcgatggtggcacttgatgagctgccgctggccagctactacagccgaatcgtagcgacctcggtacacggcgaagtgctgcactgcaaaggccaactgagtaaatcgctggcggtcatgcagcagacggaacagatggcccgccgccatgacgtctggcactacgcgctatggagcatgattcagcaaagcgaaatcctgtttgcgcagggtttcctgcaggccgcctgggaaattcaggaaaaagcgttccagctcattcgcgaacagcatctggagcagttgccgatgcatgagtttttgctgcgtattcgctcccagctgctgtgggcatgggcgcggctggatgaagcggaaacctccgcgcgcaacggcatgaacgtgctttcgtcctaccaaccgcagcaacagctgcagtgcctgacgctgatggtgcagtgctcgctggcgcgcggcgatctggataacgcccgcagccatctgaatcgcctggagaatctgcttggcaacggtcattaccatagcgactgggtatccaatgccgataaagtccgggtgatctactggcagatggtcggcgataaagccgccgcggcaaactggctgcgtcagacgcccaaaccggaattcgctaacaaccacttcctgcagagccagtggcgcaatatcgcccgcgcgcagatcctgctcggtgattttgattccgctgaaatggtgctggaagagctaaacgataacgcccgctcgctgcgtctgatgagcgatctcaaccgcaacctgctgctgctcaaccagctctactggcaggccgggcgtaaaagcgaagcgcagaaagcgctactggaagcgctcaccctcgccaaccgcaccgggtttatcaatcattttgtgattgaaggagaagcgatggcgcagcagttgcgccagctgattcagctcaataccctgccggagctcgagcagcaccgcgcccagcgtattctgcgcgatatcaaccagcatcatcgccacaaattcgcccactttgacgagagcttcgtcgagcggctgctgaaccacccggaagtgccggagctcatccgcaccagcccgctaacccagcgcgaatggcaggtactgggacttatctattccggctacagcaatgagcagattgccggcgagctggacgttgccgccactacgattaaaacgcatattcgcaatttgtatcaaaagctgggcgtcgcgcaccgccaggatgccgttcagcatgcccagcagttgcttaaaatgatgggatatggagtctaa

SEQ ID NO: 173324 - DNA, 1020 bp, Klebsiella oxytoca
atgaaaaggatgattacgctggacggcgcgcagggagaaggcggcgggcagattttgcgctcggcgctgagcctgtcgatgataaccggccagccgtttgagattatcggcatccgcgccggtcgcgctaaaccgggcctgctgcgccagcatctcacggcggtacgggcggcggccgagatctgtagcgctcagttgagcggcgatgagctgggctcgcagcggctgcgttttgtccctgggccgattcgcggcggagcgtataaatttgccatcggcagcgcgggcagttgcatgctggtgctgcaaacggtgttaccggcgctctggtttgccgatagcccggcccgcgtcgaagtcagcggcggcacgcataatcaggcggccccgagcgcggatttcatttgccgcgtctgggagccgctgctggcgaaaatgggtataaaccagcgtacggctttgatcaagcatggcttctatccggccgggggtggcgccgcgctaacggaagtggcgccgagtgcgtcactcagcgggctacagctgctttcgcgtggtgaaacgaattgcctcaccgcagaagcgctgctggcggcggttccttaccacgttggcgagcgcgaagtgatagcgctggaggcctggctgccgctggcagataaaaaaattcgcgtgctggagggcggcgccgggccgggaaatacgctgtcgctgaccgtggagtgcgaacatcttacggagctgtttatggcttttggctccaaaggcgtgagtgctgaaaaggttgcgcaccagctcgcttcgcaggccaaacgctatctggcaagcaaagcggctgtgggggaatatctggccgaccagctgatattaccgctggcgctggcgggcgaaggtgcgtttaccgtcgcggaagtatcggcgcatttgctgaccaatatcgcggtggttgagcggtttctgccgatccgatttacctgtgaaccgagtgatattggctatcttattcaggttcgcgattaa

SEQ ID NO: 173325 - DNA, 1215 bp, Klebsiella oxytoca
atgaattatgaattgatggccacccagaacgccccggtgaaaatgtggaccaaaggcgtacccgtggaagacgaagcgcgccagcagttgattaacacggcaaagatgccgtttattttcaaccatgttgccgttatgcccgatgtgcaccttggtaaaggatcgacaatcggaagcgtgatccccactctcggtgcgattattccggctgcggttggcgtggatatcggctgcggaatgaatgcgctgcgcaccagcttaacggcggcggatcttccggataaccttgctgaattgcgtagtgcgattgaagccgccgtgccgcacggacggacgaccgggcggggccgtcgtgacgcgggggcatgggaaaatccaccggctaacgttgacgcgcactggtcaacgctgcatgcggagtttcaatggctaaccagtaaatatccgcgcttccttaacaccaataactacaagcacctgggaacgctgggaaccggtaaccactttattgaaatttgcctcgatgaggcgcagcaggtttgggtgatgttgcactccggttcacgcggaattggtaacgccataggcacctattttattgaaatggcgcaaaaagatatggagcagcatattgcgaacttgccctcgcgcgatctggcttatttctctgaaggcagcgagcatttcgtggattacgttcgggcggtgagctgggcccaggattatgcgcgcgccaaccgtgaagcgatgctggaaaacgtgctgctggcgctgcgtaaaaccatcgacaaaccctttacgctggtgagcgaggcgattaactgccaccataactatgtgcaaaaagagcagcattttgggaaggagatttacgttacccgtaagggggcggtatccgcccggcgcggtcagtacgggattattccgggatcgatgggcgcgaaaagctttattgttcgcggactcggtaacccagagtcgttctgttcatgcagccacggcgccggacgcgtgatgagccgtaccaaagcgaaaaaactgtttagcgtagaggatcagattcgcgccaccgcgcatgtagaatgccgtaaagatgcaaacgtcatcgacgagatcccgatggcctataaggacattgacgcggtgatggccgcgcagtccgatctggtggaaattgtgcataccctgcgtcaggtggtatgcgtgaaaggataa

SEQ ID NO: 173326 - DNA, 1599 bp, Klebsiella oxytoca
atgcgcaaaacggtagcctttggttttgtcggtacggtactggattatgttggccgcggcagccagcgctgggagaaatggcggccaaccttatgcctgtgtcagcaggaaacactggttgttcatcgccttgagctgctttacgacgcccgttcgcgcggcttgtttgagaccttaaagcaggatatcgccagcgtatcgccggaaacggaggtcgtcggcgttgagatgaccatccgcaatccatgggatttcgaggaggttttcgcctgcctgcacgattttgcccgcagccaccggttccatcctgaagatgaagactatctgatacacatcaccaccggcactcacgtggcgcagatctgctggttcctgctggccgaagcgcgctatctcccggcgcgactggcgcaaacctccccgccgcggaaaaaagacaagccccataccccgggcggcgtgacgatcattgacctcgacctcagccgctataacgctatcgccagccgcttcgcccaggaacgggaagagacgcttaactttttgaaatccggtatcgagacccgtaacccgcgcttcaaccgcacgatcgagaatattgagcgcgtcgctatccgctcccgttcgccgattctgctgaacggccccaccggcgcaggtaaatcatttcttgcccgccgcatttatgagttaaagctggcgcgccatcagtttaacggtccgctcgtcgaggtgaactgcgccaccctgcgcggtgataccgcaatgtcgacgctgtttggccatgtcaaaggcgcttttaccggcgcaagggaagaacgggctggcctgctgcgcagcgctaacggcgggatgcttttcctggatgagattggcgagctgggcgcagatgaacaagcgatgctgttgaaggccattgaggaaaaacgcttctatcctttcggcagcgaccagcaggtcagcagcgattttcagctcatcgccggcaccgtgcgcgatttgcgccagcgggttgcgcagggccagttccgcgaagatctctacgcacgtattaatttgtggacctttgaactgcccggtctgcgtcagcgccaggaagatatcgaacccaatctcgagtatgaaatggagcgtcacgccgcgctaaccggcgacagcgtgcgctttaataccgaagcgcgccgcgcgtggctgacgttcgccacctcgccccaggcggcgtggagcggcaacttccgcgaactctccgccagcgtgacccgcatggcgaccctggcggaaaacggtcgcatcacggtaagcacggtggaggatgagattgaacggctgcgctacagctggaacgatcgccgcccctctgcgctcgacgcgctactgggggcggaggtagaaaatcttgacctctttgaccgcctgcatctacaaaacgtcattgccgtatgccagcaggcaacaacgatttccgatgccggacgccagctctttaacgtttcacgcctcggcaaagcaacggtcaacgacgcggaccggctgcgcaagtatctggcgcgctttggcctgagctgggaaatgctaaaggatcagcacagctccagctga

SEQ ID NO: 173327 - DNA, 759 bp, Klebsiella oxytoca
atgaaacaaacacaacgtcatgacgcgattatcgagctggtaaaaaaacagggatacgtcagtaccgaagaactggtcgaacagtttgccgtcagcccgcagaccattcgccgcgacctgaatgatttagccgatcagaaaatgattctgcgccaccacggcggcgctgcgctaccttccagttcggtgaatacttcctggcacgacaggaagtcgacccagacccaggaaaaagagcgcatcgcccgtaaggtcgcgagtgaaattcccgatggcgcgacgctgtttatcgatattggcaccacgccggaagcggtggcccatgcgctgcttaaccataacgatttgcgcatcgtcaccaataatctcaacgtcgccaatacgcttatggtgaaagaggatttccgcatcattctggccggcggtgagctgcgcagccgggatggcggtattatcggtgaggccacgctcgactttatctctcagttccgactcgattttggcattcttggcatcagcggcatcgacagcgatggctcgctgctggagtttgactaccacgaagtgcgcaccaaacgggcgattattgaaaactcccgccacgtaatgctggtggttgatcattccaaattcggccgcaatgcgatggtgaatatgggcagcatcagcatggttgatgcggtctataccgatgtgatgccgcccgcaggggtactgaaggtgattaccgataacaaccttcagctggagctgtgctga

SEQ ID NO: 173328 - DNA, 825 bp, Klebsiella oxytoca
atgattacctcttttgccaacccgcgcgtggcccaggcgtttgtcgactatatggcgacgcagggaattattttgactattcagcagcatacgcagagcgatatctggctggctgacgagagccaggccgcgcgcgtgcaggccgaactggcccgatttcttgaaaatccagccgatccgcgctatctggccgccagctggcagtcggggcacaccaatagcgggctgcactaccagcgattcccttttttagcgacgcttcgccacaacgccgggccggttacctggagcgttctcttcgcctgcatcgccgtctttgtcctgcaatcggtcattggcgatcaaccggtcatgatgctgctggcctggccctacgatccttcgctgaaatttgaagtctggcgctactttagccatgtccttatgcacttctcgctgatgcatattctgttcaacctgctatggtggtggtacctcggcggggcggtagaaaagcgaatcggcagcggcaagctggtggtgattaccgcgatcggcgccttactgagcggctttgtacagcatcagtttagcggcccgtggtttggcggactctccggcgtagtctatgcgctaatgggctatgtctggctacggggcgagcgcgatccgcagagcggcgtttatttacagcgcggcttgatactcttctccttagtatggttagttgctggatggtttgatgttttcggcatgtcgattgcgaacggtgcgcacgtggctggtctggtgaccgggctggcgatggcgtttgttgatacgcagaatgtgcgaaaacgaacgtag

SEQ ID NO: 173329 - DNA, 330 bp, Klebsiella oxytoca
atggatcactttgaatgtattaacgtagaagaagcccaccagaaaatgcatcagcagacggcggtgctggtggatatccgcgacccgcaaagcttcgcgatgggccatacgccgggtgcgtttcatctgaccaacgatacgctgggcgcgtttatgcgcgacaacgactttgatacggcggtcatggtgatgtgctatcacggcaatagcagcaagggcgctgcgcagtatctgctgcagcagggttatgacaaggtgtacagcgtggacggcgggtttgatgcctggcaccggcattttccggcggaagtcgcgcatggcgcagtttag

SEQ ID NO: 173330 - DNA, 1509 bp, Klebsiella oxytoca
gtggaaaccaaagatctgattgtgatagggggaggcatcaacggtgccggtatcgcggcagacgccgcagggcgtggtttatccgtgctgatgctggaggcgcgcgatctggcctgcgcgacatccagcgccagctcaaagctgattcacggcgggctgcgctacctcgaacactatgaattccgcctggtgagcgaagcgctggccgagcgtgaagtgttattaaaaatggccccgcatatcgccttcccgatgcgttttcgcttaccgcatcgcccgcacctgcgtccggcgtggatgatccgcattggcctgtttatgtacgaccatctcggtaagcgcaccagcctgcctggatcaaccggtttgcgttttggtacagaatcagtacttaaacctgaaatcgtgcgcggtttcgaatattccgactgctgggtcgacgatgcgcgcatggtgctggccaatgcccagatggttgtgcgtaaaggtggagaagtacgcacgcgcacccgcgccatttcagcaaaacgtgaaaacggtttgtggattgtcgaagcggaagatattgatagcggtgaaaagttcacctggcaggcgcgcggtctggttaacgcgaccggcccgtgggtcaaacagttcttcgacgaggggatgcacctgcgttctccgtacggtatccgcttgattaaaggcagtcatatcgtcgtaccgcgcgtacatacgcagaagcaggcctatatcctgcaaaatgaagataaacgcattgtctttgtgatcccgtggatggacgagttctccatcatcggcaccaccgacgtcgaatataaaggcgatccaaaagcggtggcgatcgatgacaaagaggttaactatctgctgaacgtctataacgctcactttaaaaaacaactcacgcgggacgatattgtctggacctactcgggcgtgcgcccgctgtgcgatgatgaatctgattcaccgcaggcgatcacccgcgactacaccctcgatattcatgatgagaacggccaggcgccgctgctatcggtcttcggcggtaagctcaccacctaccgtaagctggccgaacacgcgctggagaaactgacgccttactacaaaggcattggcccggcatggaccaaaactgcggtgctgcccggcggcgatatcggcggcgaccgtgatgactatgcggctaagctgcgccgccgcttcccgtttatcagtgaatcgatggcccgccattacgcccgcacctacggcagcaacagcgagttgatccttgataaggcgacctcgctggacgatctgggcgaacatttcggtcatgagttttttgaagccgaactgcgctatctggttgaacatgaatgggttcgttcactggatgacgctatctggcggcggaccaagcagggcatgtggctcacggaggaacagcaggcgcgcattagcgaatggctggcgcagcacgcgggaaagtctgagctgtcgctggcgtcataa

SEQ ID NO: 173331 - DNA, 2448 bp, Klebsiella oxytoca
atgaatgtaccttttagctactcatcacccaccctgagcgttgaggcgttaaagcactctattgcttataaactgatgtttattatcggtaaagatccggctatcgcgaacaagcatgaatggcttaatgctacgctgttcgccgttcgcgatcgcatggttgagcgctggctacgttcaaaccgggcgcagctctctcaggaggtgcgccaggtatactatctgtcgatggaatttttgattggccgtactttatccaacgcgctgttatcgctaggtatttatgaagatgtgaatagcgcgctggaagagatggggctgaatcttgaagagctgattgatgaagagaatgacccgggcctgggcaacggcggcctggggcgtctggccgcctgcttccttgactcgctggcggcgctgggtttaccgggccgtggctacggtattcgctacgactacggcatgtttaagcaaaacatcgtcgatgggcggcagaaagagtccccggattactggctggagtatggtaacccgtgggaatttgagcgccacaatacgcgctataaagtgcgtttcggcggccgcattcagcaggaaggtaaacattcacgctgggtggaaaccgaagagattattgctgaagcctacgatcagattatcccgggttttgataccgacgccaccaatacgctgcgtctgtggagcgcgcaggccagcagcgagattaacctcggtaaatttaatcagggcgactacttcgcggcggtggaagataaaaaccactccgagaacgtgtcgcgggtactttatccggatgactccacctattccgggcgcgaactgcgcctgcgccaggagtatttcctcgtgtcggcgacggtacaagatatcctcagccgccactaccagctgcataaaacctacgccaatctggcggataaaatcgcgattcatctcaatgacacgcacccggtgctgtcgattccggagctgatgcgcctgctgattgacgagcacaagttcagctgggatgaggcgttcgaggtaacctgccaggtcttctcttataccaaccataccctgatgagcgaagcgctggagacctggcccgtcgacatgctgggtaaaattctgccgcgtcatttgcagattattttcgagattaatgactacttcctgaagaccctgcaggagcagtatcccaacgatacggcgatgctgggtcgtacgtcgattatcgacgagtctaacgggcgtcgcgtccgtatggcgtggctggcggtggtggtaagccacaaggtcaacggcgtgtcggagctgcactcccggctgatggttgagtcgctgtttgccgaatttgccaaaatttttccgatgcgcttcaccaacgtcacgaatggcgtgactccgcgccgctggctggcgctggcgaatccgccgttgtcaaaagtgctggatgaaaatatcggtcatacctggcgcacggatttaagtcagctgaaggagctggagcagcatatcgactatccgaaggtcaatcaggcggtacgccaggccaagctggaaaacaagcagcggctggcgaactacatcggccagcagcttaacgtggtcgtcaacccgaaagctctgtttgatgtgcagatcaagcgtattcacgagtacaaacgtcagttgatgaacgtgctgcatgtgatcactcgctacaatcgcatcaaagccgatcctgacgctgagtgggtaccgcgagtgaatattttcgccggaaaggcggcttcggcttactatatggcgaagcatattattcatttaattaatgatgtcgcggcggtagtgaataacgatccggaagttggcgataagctgaaagtggtgtttattcctaactacagcgttagcctcgcgcagctgatcattccggcggcggatctctccgagcagatctctctggcagggacggaggcgtccggtaccagcaacatgaagttcgcgcttaacggcgcgttaaccattggtactctggatggcgctaacgttgagatgcaggagcacgttggggcggataatttctttatcttcggtaatacagcggaacaagttgaagccctgcgggccaatggctataaaccgcgtgattactacgagcaggatgaagagctgcaccaggcgctgacgcagattggcaccggcctgtttagtccatctgaaccgggacgttaccgcgacctgctggattcgctgattaacttcggcgaccactatcaggttctggcggattaccgtagctacgtggattgtcaggataaggtggatgagctgtaccgtcatccggaggagtgggccaataaagcgatgctgaatatcgctaatatgggttacttctcgtccgaccgcacgataaaagagtatgccgaccatatctggcatatcgatccggtaaggctgtaa

SEQ ID NO: 173332 - DNA, 1434 bp, Klebsiella oxytoca
atgcaggtattacatgtatgttcagagatgttcccgctgttaaaaaccggtggactggcggatgtgatcggcgcgctgcctgcagcgcaaattgccgggggcgttgatacgcgcgtactgctgcccgcgtttcctgatatccgccgcggcgtgacggatgcgcaggtggtaacgcgccgggagacgtttgccgggcgtatcactttactgttcggccactttaacggcgtgggcatctatctgattgatgctccgcatctctacgatcgtccggggagcccttaccacgataccaatcagcatgcctataccgacaacgtgctgcgcttcgcgctgctgggctgggtaggcagcgagatggcctgcggcctggatcctttctggcgtcccgatgttgttcacgcccacgactggcatgcggggctgacccctgcctatctggcggcgcgcggccacccggcgaagtcagtctttacggtgcataacctggcctatcaggggatgttctactcgtggcatatgaacgacattgagctgccctggtcgttctataacgttcatggcctcgaatttaacggtcagatctccttcctgaaggcgggtctttactacgccgaccatattacggcggttagtccaacctatgcccgcgaaatcaccgagccgcagttcgcttacgggatggaagggctgctgcgccagcgacagcatgagggccgcctttcggggatcctcaacggagtggatgatcatatctggaatccggaaagcgacctgctgctggccgcgcgctatgaccgcgatcggctggaagagaaggctgagaacaaacgtcagctgcaaatcgccatggggctgaaggtggatgataaagcgccgctgtttgccgtggttagccgtttgaccagccagaaagggttggacctggtgctggaggcgctgccgggcctgctggagcagggcggtcagctggcgctgctgggggctggcgatccggtactgcaggagggcttcctggccgctgcggccgagcatccgggcaaagtcggcgtccagattggctaccatgaggcattctctcaccgcattatgggcggcgccgacgtgattctggtgcccagccgttttgaaccgtgcggcttgacccagctgtacggcctgaagtacggcacgctaccgctggtgcggcgcaccggcggtctggcagacaccgtttccgactgctcgctggagaatctcgccgacggtctggctaccggctttgtttttgaagatagcaacgctgtgtcgctgctgcgggccattcgacgcacgttcgtcctgtggtcgcgcccatcgctctggcgttacgtccagcgccaggcgatgaatatggattttagctggcaggttgccgcaaactcttaccgcgaactttatcaacgcttgctgtaa

SEQ ID NO: 173333 - DNA, 1296 bp, Klebsiella oxytoca
atggttggggtagaaaagaacgatccattgatgctggcgcgtcagttgccgatcaaatccgttgcgctgatccttgccgggggacgtggtacccgtctgaaggatctgaccaataaacgcgcgaaacctgctgtccatttcggcggcaagttccgtattatcgattttgcgttatctaactgtattaactcaggtattcgtcgtatcggcgtcatcacccagtatcaatcgcatactctggtgcagcatattcagcgcggctggtcttttttcaatgaagagatgaacgaatttgttgacctgctgcccgcccagcaaaggatgcagggagaaaactggtatcgcggcaccgcggacgcggtgacgcagaacctcgacatcattcgtcgctacaaggcggagtatgtcgtcatcctcgccggcgaccatatctacaaacaagactactcgcggatgcttatcgaccatgtcgaaaaaggcgcgcgttgcaccgttgcctgtatgccggtgcctattgaagaagcacgggcgttcggcgtaatggcggtggacgagagcgataagattatcgatttcgtcgaaaaaccggctaaccctccggcgatgccgggcgatgcgagcaaatcgctggcgagtatgggtatctatgtctttgacgcggattacctttatgagcttctggaagaagacgacagtgatgaaagctccagccacgattttggtaaagacatcattccgaaaatcaccaaagctggcatggcttatgcacatcctttcccgctttcctgcgtgcagtccgatccgcagtctgagccctactggcgggatgtcgggaccctggaagcgtactggaaagccaacctcgatctggcttcggtgaccccggaactggatatgtacgatcagaactggccgattcgcacccatatggagcctctgcctccggcgaaattcgttcaggaccgctcgggtagccacgggatgaccctcaactcgctggtctccggcggctgtatcatctccggttcggtggttgtgcagtcggtgctgttcccgcgcgtgcgggtgaattcattctgtaatattgattcggcagtcttgctgccagaggtttgggttggccgttcgtgccgcctgcgtcgctgcattattgaccgtgcctgcgtgataccggaaggtatggttgttggtgagaacgcggaagaggatgcacgccgtttctaccgctcggaggaaggtatcgtgctggtcacccgcgacatgctgcggaaattggggtacccacaggagcgctaa

SEQ ID NO: 173334 - DNA, 1977 bp, Klebsiella oxytoca
atgatcgcactcacggcaggaaagcccgcgcctttaggggccagctacgacggtaagggcgtgaatttcgcgctcttttccgtccatgcggagcgggtggaactctgcgtgtttgacgagcagggcaatgagcggcgagtcgacctgcccgcacgcagcggcgatatctggcacggctggctcgccgatgtcgggccaggtctgcgctacggctaccgcgtccacggcccctgggacccggcgcaggggcaccgtttcaatccggcaaagctgctgctcgatccctgctgccaccaggtggatggcggactgcctgacgacgagcgacttcacggcggcgatagcgttcccgataaccgcgatagcgcggcaatagcgccgaagtcgcgggtaatcgacctccattatgactggcgcggcgataagccgccgcgcacgccgtggggccagacggtgatttatgaagcccacgtcaaggggctgacctggctgcatcctgagctgccggaagagatccgcggcacctacaaagcgctgggtcatccggtgatgatcgaatacttccgcacgctcggcattactgcactagagttaatgccggtggcgcagttcgccagcgaaccgcgtttgcagaggatggggttaagcaactattggggctacaacccgctggcgatttttgccctcgatacgcgctacgccagcgcgccggagcaggcgttaaacgaatttcgcgatgcggtaaaagcgctgcacgcggcaggtattgaagtgatccttgacgtggtgttgaaccatagcgcggagatagacctggaagggccgaccttctccctgcgcggaatcgacaaccgtagctattattggatcagggaagacggtgattaccacaactggaccggctgcgggaacaccctcaacctcagccatcccggggtggtggagtatgcgcgccagtgtctgcgcttttgggtcgatgagtgccacgtcgacggttttcgtttcgacctcgcctcggtaatggggcggacgccggagtttcgtcaggatgcgccgctgtttgaggccattcgtaacgatccgcggcttgcggaagtgaagctgattgccgagccctgggatatcggtcccgggggctaccaggtcggtaactttccgccgttgtttgctgaatggaacgaccatttccgcgataccgcacgtcgattctggctacagcagaacgtctcgctgggcgacttcgcgctgcgttttgccgcatcgagcgacgttttccagcgtaacggcagagcgccgtcggcggcgattaatctggtcaccgcgcacgatggtttcaccctgcgcgactgcgtttgtttcaatcagaaacacaatgaggcaaacggggaggagaatcgcgatgggactaacaataactatagcaacaatcatggtatagaaggattagaagggagtcttgccgtcattgagcggcgccgtgccagcgttcacgctcttctggcaacgctactgctggcgcagggaacgccgatgctgctggcgggtgacgaacacggtcacagccagcatggtaacaacaatgcttactgtcaggacaatgcgttgacctggctggactggaaccatactaaccgcgggctgaccgcgttcaccgccgcgttgattcatctgcgccagcgtatttcggctttaaccgataatcgctggtggcaggaggaagacggcagcgttcgctggttaaaccaacatgctcagccgctgtccgctgatgaatggcagcacggtgcgccgcgcatgcagatcctattgtccgatcgctggctgatggcgctgaacgccaccgccgaggtggcagagatggttttacccgcgggggaatggcgcgccattccacctttcgccggagaggataatccggtcactatggctgtctggcatgggcccgcgcacggagtgtgcgtatttcaaaggtcgtaa

SEQ ID NO: 173335 - DNA, 2187 bp, Klebsiella oxytoca
atgtctaatcgtatcgataaggacgtgattaatgcgcttatcgccggccattttgcggatcctttttccgtgcttggcatgcattacaccgacgccgggctggaagttcgtgcattattacccgatgccaccgaagtgtgggtcattgaaccaaaaaccggacgcaaagtcggcaagctggaatgcctcgactcgcgcggtttctttagcggcgttctgccgcgtcgtaaaaatccttttcgttatcagttggctgtcacctggcacgggcagcagaatctgatcgatgacccgtaccgttttggcccgctgctgcaggatctggatgtctggctgctgtcggaaggcacgcacctgcgtccgtatgaaacgttgggcgcgcatgccgatactatggacggcgtggtcggcacgcgtttctcggtctgggcgcctaacgcccgtcgggtgtcggtcgtcggccagtttaactactgggatggtcgccgccacccgatgcgcctgcgtaaagagtccggcatctgggagctgttcgttcccggcgcgctgaacggccagctgtataaattcgagctgattgatgcccacggcaacctgcgggtgaagtccgacccttacgcttttgaagcgcagatgcgcccggatagcgcctcgctcatctgcgggctgccggaaaaggtccagcagccgccggagcgcaagctggctaaccagtttgatgcgccaatctcgatttatgaggtgcacctcggctcctggcgtcgccataccgataataacttctggctgagctaccgcgagcttgccgaccaactggtgccttatgccaaatggatgggcttcacccatcttgaactactaccggttaatgagcatccgtttgacggcagctggggctatcagccaaccgggctatatgcgccaactcgtcgcttcggcacccgggaggatttcctctactttatcaacgccgcgcacgctgcgggcctgaacgtgattctggactgggtacccggccattttccggcggatgatttcgcgctcgcctcgtttgacggcacctcgttgtatgaacatagcgacccgcgcgaaggctaccaccaggactggaacaccctgatttacaactacggtcgtcgcgaggtcagtaattatctggtcggcaatgcgctgtactggatcgaacgcttcggcattgacgcgctgcgggttgatgcggtggcatcaatgatttatcgcgactatagccgcaaacagggcgagtgggtgccgaacgaattcggcggtcgggaaaaccttgaagccattgagtttctgcgcaataccaaccgcgtgctgggcgagcagacgccgggcgcggtgacgatggcggaagagtcgaccgatttccccggcgtgtctcgtccttcctccaccggcgggctcggcttctggttcaagtggaaccttggctggatgcacgacaccctcgactatatgaagctggacccggtgcatcgccgacatcatcacgacaagatgaccttcggtatgctctacaactacaccgaaaactttgtcctgccgctctctcatgatgaggtcgtgcacggcaaaaaatcgattctcgaccgtatgccgggcgatgcctggcagaagttcgctaacctgcgcgcgtactacggctggctgtttgccttcccgggtaaaaagctgctgtttatgggcaatgagtttgctcaagggcgagaatggaaccacgatacaagccttgactggcatctgctggaaggcggcgataactggcaccacggcgtccagcggctggtgcgcgatctcaaccatacttatcgccaccataaagcgctgcatgaactggattttgacccctacggatttgaatggctggtggtggacgaccacgagcgctcggtctttatctttgttcgtcgcgacagggcgggtaacgaaattatcgtcgccagcaacttcacgccagtgccgcgccatgagtatcgctttggcatcaaccagcctggccgctggcgtgaagagctgaacaccgactctatgcactaccacggtagcaataccggcaacggcggcgtcgtcgagagcgacccgatcgccagccacggtcgtgaacactcgctctccattacgctgccgccgctggcgacggtatggctggtgcgggaggcgcaatga

SEQ ID NO: 173336 - DNA, 1107 bp, Klebsiella oxytoca
atgaaaaatgttggttttatcggctggcgcggaatggtcggctctgtcctcatgcaacgcatggtagaagagcgcgattttgacgccattcgccctgtttttttctccacctcccagttggggcagcctgctccatcctttggtggcagtaccggtggcacgcttcaggatgcattcgatctggaagcactgaaggcgctggacattattgtcacgtgtcagggcggcgattacaccaacgatatttacccgaagctgcgtgaaagcggctggcagggctactggattgacgccgcctcttcgctgcgcatgaaagacgacgccatcattattcttgacccggtgaatcaggatgtcattaccgcaggtctgaacaacggcgttaaaacctttgtcggcggcaactgtaccgttagcctgatgctgatgtccctcggcggcctgtttgctcaggatctggttgagtgggtgagcgtggcgacttaccaggcggcttccggcggcggtgcgcgtcatatgcgcgaactgctgacccagatgggccagctgcacagccatgttgcggctgagctggcggatccggcttccgcaatcctggagattgaacgcaaagtcacctctttgacccgcagcggcgaactggcggtggataactttggcgttcctctggcgggcagcctgatcccatggatcgacaaacagctggataacggccagagccgtgaagagtggaaaggccaggcggagactaacaaaatcctcgcgaccgcctcaccgattccggtagacggcctgtgcgttcgcgttggcgcgctgcgctgccatagccaggcgtttaccatcaagctgaaaaaagatgtttctattccgaccgttgaagaactgctggccgcgcacaacccgtgggccaaagtggtgccgaacgatcgtgatattactatgcgtgagctgaccccggctgccgtcaccggcaccctgaccaccccggtggggcgcctgcgtaaactgaatatggggccggagtatctgtcggcgttcaccgttggtgaccagctactgtggggggccgccgagccgctccgccgtatgctaagacagctggcgtag

SEQ ID NO: 173337 - DNA, 1341 bp, Klebsiella oxytoca
gtgagtacattaacgcttgttttgacagcagtcggctccgttttgctgctgctgtttttagtcatgaaggcgcgtatgcatgccttcgtggctttgatggtggtttctattggagcagggcttttttccggaatgccgttagataagatcgcggcgacgatggaaaaaggcatgggcggcacgctgggttttctggctatcgtcgtcgcgttaggggctatgtttggtaagatcctgcatgaaaccggcgcggtcgaccagattgccgttaagatgctgagatctttcggccacaatcgcgcccattatgcgataggtctggccgggcttatctgcgcgctgccgctgttttttgaagtggcgatcgtgctgctgatcagcgtggctttctcaatggcgcgccataccggcaccaaccttgtgaagctggtgatcccgctgtttgctggcgtagccgccgcggccgcgttcctgctaccggggcctgcgccgatgctgctcgcctcgcagatgcatgccgactttggctggatgatcctgattggcctgtgcgccgctatcccggggatgattattgccgggccgctgtggggtaacttcatcagccgctatgttgaactgcacattccggacgatattagcgagccacaccttggcgaaggcaaaatgccgtcgttcggcttcagcctgtcgctgattctgctgccgctggtgctggttggcctgaaaaccatcgccgcgcgctttgtgccggaaggttctaccgcttacgaatggtttgagtttatcggccatccgtttaccgcgattctggtggcgtgcctggtggctatctatggtctggcggtacgtcagggaatggctaaagatcgggtgatggagatttgcggtcatgcgctccagcctgcgggcatcatcctgctggtcatcggtgcgggcggggtgtttaaacaggtgctggtcgactccggcgtaggccctgccctcggtgaagcgttaaccggtatgggcctgccgattgccatcacctgcttcgtgctggcggcggcggtgcgtattattcagggttccgcgaccgttgcctgcctgacggcagtcgggctggtgatgccggttattgaacagctgcactacagcggcgcgcagatggcggcgctctctatctgtatcgccggcggttctatcgtggtcagccacgttaacgacgcgggtttctggttgttcggcaagtttaccggcgcgaccgaagcgcaaacgctgaaaacctggacgatgatggaaaccatcctcggcaccgtcggggcgattgttggtatgattgcgtttacgctgttgagctaa

SEQ ID NO: 173338 - DNA, 531 bp, Klebsiella oxytoca
ttgagcacgactaaccatgatcaccacatctatgtcctgatgggcgtttccggcagcgggaaatccgctgtcgccagcgaagtggcgcatcaactgcacgccgcgtttctcgacggcgactttcttcatccgcgcagcaatatcaacaagatggcttccggcgaaccgttaaatgatgacgaccgcaccccgtggctgcaggcgctgaacgatgccgcctttgctatgcagcgcaccaataaagtgtcgctgattgtctgctccgcgttgaaaaagagctatcgcgacatcctgcgtaaaggtaacccgaacctctcctttatctatctgaaaggtgattttgcggttatcgaacaacgtctgaaggcgcgtaaaggccacttctttaagactcagatgctggttacgcagtttgagacgctgcaggaaccgggcgcggatgaaagcgatgtgttaatcgtcgatatcgaccagtcattggaaggcgtggtcgccagcaccattgaggtgatcaacaaaggcagtaactag

SEQ ID NO: 173339 - DNA, 996 bp, Klebsiella oxytoca
atgaaaaagaaaagacccgtacttcaggatgtagccgatcttgtcggcgtgaccaaaatgacggtcagtcgctatttacgtaacccggaacaggtttccgaagcgctgcgtggcaagattgccgttgctctcgatgaactgggttatattcctaatcgcgcccctgatatcctctctaatgctaccagccgcgccattggcgtgctgctgccctcgttaactaaccaggtcttctcggaagtgctgcgcggtattgaaagcgtaaccgactctttcggctatcagactatgctggcgcactacggctataagccggaaatggaagaaaaacgcctggaatcgatgctctcctggaatattgacggcctgatccttaccgaacggacccatacgccgcgaaccctgaagatgattgaagtcgcgggtatcccggttgtggagctgatggacagtcagtcgccgtgcctcgatatcgccgtcggctttgataactttgaagcggccagacagatgaccgcggcgattatcaatcatggtcaccgtcacgttgcctatcttggcgcacgtcttgatgaacgtactatcatcaaacagaaggggtatgagcaagcgatgcttgatgccggtatgacgccctacagcgtgatggttgagcagtcttcttcttattcatcgggaattgagctaatgcgccaggcgcgtcgcgaatatccgcagcttgacggcattttctgtaccaacgatgaccttgcggtcggcgcagcgtttgagtgccagcggctggggcttaaaatccctgacgatatggcgattgccggtttccacggccacgatattggtcaggtgatggagccgcgtctggccagcgtgctgacgccgcgtgagcgtatggggcggattggcgctgaacgtctgctggcgcggatacgcggtgaagcggtgacgcctaagatgttagatttaggtttcacattgtcaccgggcggatctatttaa

SEQ ID NO: 173340 - DNA, 696 bp, Klebsiella oxytoca
atgatctacttacgcaaagctaacgaacgcggccacgctaaccacggctggctggattcctggcatactttctctttcgcgaactattacgatcctgactttatgggcttctcggcgctgcgggttatcaacgatgacgtgatcgacgcaggccagggcttcggtacccatccgcataaagatatggaaattctgacctacgtgctggaaggggccgtggagcatcaggacagcatgggtaacaaagagcaggttccggcgggtgagtttcagatcatgagcgcgggtaccggtattcgtcactctgagtacaacccaagcgccacggaaaaactgcatctgtaccagatctggattatgccggaaaaaaatggcatcactccgcgctacgaacagcgccgctttgacgccgttcagggcaaacagctggtgctgtcgccggatgctcgcgaaggctcgctgaaagtgtaccaggatatggaactgtaccgctgggcgctgctgaaagacgagcagtcggtgcatcagattgccgccgaacgccgggtgtggatccaggtggtaaaaggtgatgtgacgattaacgggacaaaagccaccaccagcgatggcctggccatttgggacgagcaggcgatttccgtgcatgctgacggcgatagcgagatactgctgttcgatctgccgccagtctga

SEQ ID NO: 173341 - DNA, 1038 bp, Klebsiella oxytoca
atgactttacactgcgcatttattggattcggcaaaagtaccacccgctaccatcttccctatgttttgcaccgaaaagaccgctggcatgtggcgcatatcttccgccgcagcgccaggccggaggagcaggcgccgcagtattcgcacatccacttcaccaacgatctcgatgaagtgcttaacgacccgcaggtcaagctggtgatcgtgtgtacccacgcggacagccattttgactatgccaaacgggcgctggaggcgggtaaaaatgtgctggtcgaaaagccttttacgccgactctggacgaggcgaagacgctattcgcgctggcgaaaagcaaagggctgacggtcactccgtaccagaaccgccgctttgactcctgctttctgaccacgaagaaagtcattgagagcggcaaactgggggagctcgtcgagattgaaaaccatttcgataactatcgcccgatagatggtggaaagcctggcctgccgcaggatgggacgttctatggtctgggggtccataccatggaccaaattattgctctgtttggccgcccggatcatgtgtcttacgacattcgtagcctgcgcaaccaggccaacccggacgatacttttgaggcccagctgttctacggcaatctgaaagcgattgttaaatccagccatctggtgaagctgccctacccaaaattcatcgtccatggtcataaagggtcatttattaaatacggtatcgaccagcaggagaccagcctgaaggcgaatatcatgcccggtgagccaggattcggcgcggacgatacgttgggcctgctggagtacgtcaatgaggcaggggaaaccgtacgggaagaggttccgcttgaaaccggcgactatggccgcgtctatgattcgctgtatgaaaccctcgttaacggccagcctaatttcgtcaaggaatctgaggttctcacgaatatcgagatccttgaacgcggctttgagcagccgtctcccgccactataacccttgcaggataa

SEQ ID NO: 173342 - DNA, 660 bp, Klebsiella oxytoca
atggaaagcaagtacttagccataaatagcgctcttctcttctggctgcttggcctgctggcatggtgcttcgaatccacgtacatggccttgttatctggttctttctccctgtcatccttcgtttttcattttcaataccatcgggttaaccatatgtttaaaaagaataaaactatcgacgttacgccacagccagccagcgtacccgcgccggtcaacgacaaagtcacctctgcggccaggaagccggataccacggtcatcgccagcggcatgcgctttgaaggaaacattattgcggcgggtaatgtcgatatctacggcacagtgagcggcgatatcgacgcgaaagagaaccaaattaagatcatgaccggcggcctgctggagggaaacattacctgccgcgaactggttattgacggctgcgtcatcggccagtgcagtagcgataccattgaaatcgataaaaacggtaacgtcaccggaacgctggcctaccgtacgctggccattaaaaagggcggcgtgttttccggccaggcagaagtgctgccgccggtcgcggaaaagaacaacgtggtgggattcatcacagataccgcggtagaaacgaaagagagagcggaagcgcatactgccgaagcggcgcagtaa

SEQ ID NO: 173343 - DNA, 492 bp, Klebsiella oxytoca
atgagcgacatagtgatacgccatgccgaagccaaagattacgacgcaatccgtcagatccatgctcagccggaggtatatcgcaatacgctacaggttcctcatccttccagccatatgtggcacgagcgactaaccgaccgaccgggcgtcaaacagctggtcgccagcatagatgaccaggtcgtgggacacctcgccattgaggttatccagcgcccgcgccggagccacgtcgccgatttcggcatttgcgtggattcacgatggcacaatcgcggcgttgccagtgagctgattcgcaccatgatcgacatgtgcgacaactggctccgcgttgaccgtattgagttgacggtgtttgtggataacgctcccgcggttgcggtatatcagaaattaggctttgaaattgaagggacggggagaaagtatgccctgcgcaacggcgaatatgtcgatgcctactttatggcgcggctgaaggggtga

SEQ ID NO: 173344 - DNA, 1743 bp, Klebsiella oxytoca
atgagaagaacaacgctctggcgtcaggtggtcatcgctgcgctgctggcgggcggcagttttaccgtcgcggcagatcccgccccgcctccggtctcgtatggtgtagaggaagatgtttttcatccggttcgcgctcagcaggggatggttgcctcggtggatgcgctggcaacgaaggttggcgtggatattttacgtcagggcggcaatgcggtggatgctgccgtggcggtgggctacgcgctggcggtcacccatccgcaggccggtaatatcggcggcggcgggtttatgatgctgcgaaccaaagacggtaataccacggcaatcgacttccgcgagatggcccctgaacaggccacccgcgatatgtttctcgacgatcagggcaatccggacagtaagaaatcgctgacctcccatctggcttccggcatcccgggaaccgtggccggcttctccctcgcgctggagaaatacggcacgatgccgctcaacaaagtgatccgtccggcaattaagctggcggaagagggcttcacggtcaacgatgcgctggccgacgatctgaaaacctacggcagcgaagtgatccccgaccatgccaacagccgggctatcttctggaaaaacggcgagccgctgaaaaagggcgataagctggtgcaaaaacagctggggaaaagcctggagctgattgccgagctggggccagatgccttctataaaggggctatcgccgaccagattgccgcggagatgaagaataacggcggactaatcaccaaagcggatctggcgaattacaacgcggttgaacgtacgccggtgagcggcgagtatcgcggctatcaggtgttctccatgccgcccccatcgtccgggggcattcatatcgtgcagatcctgaatatcctcgaaaacttcgatatgcataagtacggcttcggcagcgccgacgccatgcaggtgatggccgaagctgaaaagcacgcctatgccgaccgttcggaataccttggcgatccggacttcgtcaaggtgccgtggcaggcgctgaccagcaaagcctacgctaaatcgattgccgggcagattgatgtcaataaggcgaagccgtcgagccagattcgccccggcaagctggccccctatgaaagcaatcagactacccatttctcggtggtggataaggacggtaacgccgttgcggtgacctatacgctgaacaccacctttggcaccggcatcgtggcggggaactcaggcattctgctgaacaaccagatggatgatttctcagctaaacccggcgtgccgaacgtctacgggctggtgggcggcgacgctaacgccgtcgaggcgaaaaaacgtccgctgtcatcgatgtcgccaacgattgtggtgaaagatggcaaaacctggctggtgaccggtagcccgggcggcagccgcatcatcaccacggtactgcagatggtggtgaacaccatcgactttgggatgaacgtcgcggaagccaccaacgccccgcgcttccaccatcaatggctgccggacgaactgcgggtagagaaggggtttagcccggatacgctgaagctgctggagagcaaagggcagaaagtggcggtgaaagaggcgatgggcagcacccagagtattatggttggcccggatggcacgctgtacggcgcatccgatccgcgttcgccggatgatttaaccgcagggtattag

SEQ ID NO: 173345 - DNA, 321 bp, Klebsiella oxytoca
atgaaagcaatgttatatctggcggcgctggtcccgctgagcgtcatggcgcagccgatcaatatcgacaataaccctaatcagccggggtacgtggtgcccagccagcagcggatgcaaaatcagatgcagacccagcaaatgcagcagcaaaacactctgaagcagggtattcagagccagtcgcgcacgcagcagcagcatcttcagacgcagttgaataacgatcggcagcgggtacagcagaataacaacctgaaccggcagcagcctctacccaacaacaacggtgggatgctgcagcgccagacgaccccgtaa

SEQ ID NO: 173346 - DNA, 741 bp, Klebsiella oxytoca
atgagtcactggccttatccccatatcgtcgcccaccgcggcggcggtaaactggccccggaaaacaccctggcggccatcgataccggcgctcgttatggccatacgatgattgaatttgacgctaagttatcgaaagacgggcacatttttttactgcacgatgacaatcttgaacgcaccagcaacggctggggcgtggcgggcgagctggcgtggaacgatctgctaaaagtggatgccggcagctggtacagcggcaaattcaaaggcgagccgctgccgctgctgagcgaagtggccgatcgctgccgtcagcacggcatgatggccaatatcgaaattaaaccgaccaccggcaccggcctggtgaccggtaaagcggtggcgctggcggcgcgtgagctgtggcagggaatgacgccgccgctgctctcatcgtttgaaatcgatgcgctggaagcggcgcaggaagcggcgcccgaactaccgcgtgggctactgctggatgagtggcgcaacgactggcgcgaactcaccgcgcgtcttggctgcgtctctattcatctcaaccacaagctgctggatgaagcgcgagtggcaaacctgaaggctgcaggcctgcatattctcgtctataccgttaataaaccgcagcgtgccgccgaactgctgcgttggggcgttgactgtatctgcaccgatgcgattgatctcatcggcccacgcttttcggcataa

SEQ ID NO: 173347 - DNA, 1071 bp, Klebsiella oxytoca
atggcaggactgaagctacaggcagtaaccaaaagctgggatggcaaaacccaggtgatccaaccgctgacgctggacgttgcggacggcgaatttattgtgatggtgggcccttcgggctgcggaaaatcaaccctgctgcgtatggtggcgggtctggagcgggttaccagcggcgatatctggattgaccgcaagcgtgttaccgaaatggaaccgaaagatcgcggcatcgcgatggtgttccagaactacgccctctacccgcatatgagcgtggaagagaatatggcgtgggggctgaaaattcgcggtttgggtaaaggattaattgctgagcgcgtccaggaggcggcgcgcattctggagctggacggcctgctgaagcgccgtccgcgcgaactttcaggcggccagcgccagcgcgtggcgatgggacgggctatcgtacgcgatccggcggtattcctgtttgatgagccgctctccaaccttgatgctaaactgcgcgtgcagatgcgccttgagctgcagctgctgcaccgtcggctgaaaaccacctcgctgtacgtgactcacgatcaggtggaggcgatgaccctcgcccagcgggtgatggtaatgaataaaggcatcgccgagcagattggtacgccggtcgaagtctatgaaaaaccggccagccgctttgtggcgagctttatcggcagcccggcaatgaacctgctggaagggcgggtcagcgatgacggcagccgctttgagctggagggtggaatgcttttacctgtcaacagcgagcatcgacgctatgccgggcgtaagatgacgctgggtatccgcccggaacattttgcattaagctccgaagcggaaggtggcgtaccgctggtgatggatacgctggaaattttaggtgccgataaccttgcccacgggcgctggggcgcgcaaaagctggtggtccggctgccgcaccagcagcgtccgcaggcgggcagcactctgtggctgcatctgccgcaggaaagtctgcacctttttgatagtgaaacaggacaacgcgcatga

SEQ ID NO: 173348 - DNA, 846 bp, Klebsiella oxytoca
atgattgaaaaccgtcgcgggctgacgattttcagccacacgatgctgattttagggatcgcggtcattctgttcccgctgtatgtcgcctttgttgcggcgacgctggacagtaaagcggtctttgacacgccgatgacgctgatacccggcgggcatcttctcgaaaacatgaagtttatctgggtgaacggcgtaggggccaatagcgcgccgttctggctgatgatgctcaacagcttcatcatggccttcggcatcacggtgggcaaaattacggtctcgatgctctccgctttcgccatcgtctggtttcgttttccgctgcgcaacctgttcttctggatgatcttcatcacgctgatgctgccggttgaggtgcgtattttcccgacggtggaagtgatcgccaacctgaaaatgctcgacagctatgccggactcacgctgccgctgatggcctcggcgaccgcgaccttcctgtttcgccagttctttatgaccctgccggacgagcttatcgaggccgcacgtatcgacggcgcatcgccgatgcgctttttccgcgacatcgtcctgccgctgtcgaaaaccaacctggcggcgctgttcgtcatcacctttatttacggctggaaccagtatttgtggccgctgctgattattaccgacgtgaatctcggcaccgcggtcgcgggcatcaaagggatgatcgccatcggccagggcaccacgcagtggaatcaggtgatggcggcgatgctgctcacgttgattcctccggtagtcatcgttttagccatgcagcgcgcgtttgtgcgtggtttagtggatagtgagaaataa

SEQ ID NO: 173349 - DNA, 888 bp, Klebsiella oxytoca
atgtcatcatcccgtccggtgtttaaatcccgctggctgccctatgtgctggtcgcgccgcagctggttatcaccgtcgtattctttatctggcccgcgggcgaagcgctgtggtattcgctgcagagcgtcgatccttttgggctctccagccagtttgtcggcctggacaactttttagccctgttccacgacccgtactacctggactccttctggaccaccattaagttcagtacgatggttaccgtcagcggtctgctgatctcgctgtttttcgccgcgctggtcgattatgtggtgcgcggcagccgcttctaccaaacgctgatgctcctgccctatgccgttgcgcccgcggtggctgcggtgctgtggatcttcttattcaaccccggacgcgggctgattacccatcttctcggcgaaatgggctatgactggaaccacgcacagaatagcggtcaggcgatgttcctcgtggttttcgcctcggtctggaagcaaattagttacaacttcctgttcttctttgccgcgctgcaatcgattccccgctcgctggttgaagccgccgcgattgacggcgccgggccggttcgccgcttcttcaggctggcgctaccgctgatcgccccggtgagtttcttcctgctggtagtgaatctggtgtacgccttctttgatacctttccggttatcgatgccgcaaccggcggcgggccggtgcaggcgacgacgacgctgatttataagatctaccgtgaaggtttcgcggggctcgacctgtccgcttccgccgcccagtcggtggtgctgatgttcctcgtcattattctgacggtggtgcaattccgttacgttgagaaaaaggtgcgctaccaatga

SEQ ID NO: 173350 - DNA, 1317 bp, Klebsiella oxytoca
atgatatcgttacgacatacagctttaggactggcgctcagcctggcatttgccggacaagccctggcggtaaccactatcccgttctggcactcgatggaaggggagttggggaaagaagttgattcactggcgcaacgtttcaatgcagccaacccggactataaaattgtcccggtgtataaaggcaactatgagcagagcctgagcgcaggcatcgccgccttccgtaccggcaacgcgccggcgctattacaggtttatgaagtcggcaccgcgacgatgatggcctcaaaggcgattaagccggtttatcaggtgttcagcgatgcgggcattcagtttgacgaaacgcagttcgttcccaccgtttccggttattacactgattcgaaaaccggacacctgctctctcaaccgtttaacagctccacgccggtgttgtactacaacaaagacgcctttaaaaaagccgggttagatccggaacagccgccgaaaacctggcaggatctggcggcgtataccgcgaagctgaaggctgccgggatgaaatgcggctacgccagcggctggcagggctggatccagattgaaaacttcagcgcctggcacggcctgccggtggccaccaaaaacaacggcttcgacggtaccgatgcggtactggagttcaacaagccggagcaggtcaagcatatcgctctgctcgaagaactgaataagaaaggcgacttcagctacttcgggcgtaaagacgaatccaccgagaagttctataacggcgactgcgccattaccaccgcctcttccggctccctcgcggatattcgccagtacgcgaagttcaactatggcgtagggatgatgccgtacgacgccgacgcgaaaggcgcgccgcaaaacgccattatcggcggggccagcctgtgggtgatgcagggtaaagacaaagaaacctataccggcgtcgccaaattcctcgatttcctgactaagccggaaaacgccgccgaatggcatcagaaaaccggctatctgccgattaccaccgccgcttacaacctgacccgcgaacagggcttctatgataagaaccccggtgccgatatcgcgacgcgccagatgctgaacaagccgccgctgccgttcaccaaagggctgcgtctgggcaatatgccgcagatccgcaccatcgtggatgaagagctggaaagcgtgtggaccggtaagaaaacgccccagcaggcgcttgacgccgcggttgagcgcggtaatcagctgctgcgccgtttcgaacagtcaacgaagtcgtaa

SEQ ID NO: 173351 - DNA, 768 bp, Klebsiella oxytoca
atgaagacgcttcataaacctaccgagcgcgttttgctcattctggaaaccttagccaacgcggatggaatgacgctttccgagctatcgctcaaaacggatatttccaagggaaccattttcccgatcctcaaatcactgcagtatcgcaaatatatcagtcacgacgatcgcaacgggatttacactctggggatctcctgcgcggttctggccagtgccaccgtcgaaaaagagttctggctgaaaacgatcaatagcgaaatgcacgcggtggtcactgaatgcaacgaagtttgccagctcggcattctggatgacgcctgggtactgtatgttgataaagtccagggcgatcaaaccgtgcagctggtctctaaggtagggacgcgcctgccggcaatctgctccgccctgggcaaggcgctgctgcataagcaccgcgacgaagagattctggagctctatccgcagggttttccttccgttaccgcccgcagcgtaacgaatatggcccagcttcgtcagcagctggatatggttgccgccaacggttatgccatggacgatcgggaaatcaacgacgataccatctgcttcgccgtccccctgcagcagaaaggcattattctggcggcgatcagcgtctcattgccctctttccgcgccagcgatgaaaaaacgcagcaggtgattcgtgcgctaaaagaggccaagggtcgtatcgaaagcgtgctgaataagctgcctgatattaaaaattactga

SEQ ID NO: 173352 - DNA, 900 bp, Klebsiella oxytoca
atgcaaagtcattacatcaccccggcaataacggtttttgatgagcagggcaggctggatcctgaaggcaactttcgcctgtatgatttcattaaaagcagcgtatcgggatttgtcgtcatgggcagtaccggtgagtttttctcgctggatatgaaaacatcccgtcaggtaattcaaatggcggcagagttcccgcgcgagggaataaaggcctatgcgggtaccagccgcatggatattgacgagtgcgtagagctggctaactatgcagatgagtgcggactggatggcgtcatgattatcagcccgtggtacttccgcctgactgatgaaggcatttatacattttatagccagatagctcgccgcaccgccgccaaaatatttatttataacttcccggaacgtaccggctattgcgtctcgccagaggtctgtttacgactcgccagagagttcccaaacattgtcggtcttaaagacaccattccggacaccaatcatacgtcgcaggtgattcgccaggtaaaatctgaactaccgtattttgaagtctacgccggttatgacaataacttcgcgcacaatgtcctggcggggggcgatggatgtatcggcgggttatccaatatttgccctgaaatattccgcgactggatgcaggcatttaacgataacgatttgcagcaaatttcgcggtatcagcaaaaagtggatgggttaatggatatttacgcggttaacgatccgttcattccaacatttaaaaaagcgctacagctgcgcggaattattcagtccgaccgctgcacgccaccgtttagctcactcacaaccggccagaccgaaagtattttgcggatactttcccgtgctggtattgaaattaatgcctga

SEQ ID NO: 173353 - DNA, 1311 bp, Klebsiella oxytoca
atgaaaaccatcacagcttacgacaatccggccctcaattccgcgattacgaaatcatggaagcgcctggtgccactgatgtttattttgtacttcatcgcctttatcgacagggtgaacgtgggattcgctaaagaggcgatgcaggtggatattgggctctccaattccgccttcgccctcggggcagggatctttttcgccgcctatgcgctatttggcattcccgcaaacctgatcctgaataaaattggcgcgcagaaatggttaagcatcactactgcgctgtggggcgttctctctgccctcaccggactggtgcagacggaaacccagtttattgttctgcgttttttactgggattaggcgaagccggtttttatcccggtattctgctgctggcctccatctactttcccaataaagttcgcgcatccgtcgtcggtatcttcgtactcggcgtaccgctggcgctgaccttaggctcgcccatctccggcgcgctgctggaaatgcacggtttccttggtaaacccggctggttctggatgttctttattgaaggcattccggcggtcatcatggggatcttcgcctggttctggctcgacgatacgccggccaaagcgcgcttcctgaacgaagaagagaaaaaggcgctgattgcccagctacagcaggagcagcggcagacggaaaccagcagcgttggtaccgcgctgaaaagccttaaagtctggcacctggcgctgatctacggcaccatccagatcagcgtgtacggactgatgttcttcctgccttcgcaagtcgcctcgctaatgggttccacgctcggctttaaagagtcgctggtcgccgccattccgtgggcctgctccgccgtcggcgtctattacattccgcgtctggcggacaaaatgccggctcgccgggtactgatttcggtcatctgcatgctggctgcggcgctggggctgtttgtttctgcctggtccggcccggtgctcgccattgccgcgctctcgctgtcggccatcggctttctctccgtgcaacccattttctggactttcccggcgcagattgtgtcaggctcggcgctggccgccagtatcggcttttgcaccaccatgggcgcgttttgtagcttcctggcgccgctcattcgcgttgaggtcgataccttcttcggcaatgattcggcgggcctggtcgcactgtcgctgattaccgtctgctgtgcgctgctgattgccgctcttgccggcagaaaagcgacaaacggcgttgcggttacccatcactaa

SEQ ID NO: 173354 - DNA, 1596 bp, Klebsiella oxytoca
atgcagaccatcttaaagattgaccctactgataacttaatcgttgcgctgcaggacttacgcaaagaacagcgggttcactggaacgatgaggcctacgttctgcgtagcgatgtcaaagccaaacataaatttgccaccgaggatattgcgcccggcgatatcgtttcgctgtacggcgtaccggtcggtaaagcgacgcgccccatcacccggggcgaagccatcaccacggagaatatcaaacactacgcggccccggttacgcttgacgatgtcgccccctatgactggcagcagccggatatttccgcctggcagcagcggacgtttaagggaatcgtgcgtgaagatggccgggtcgccaccgcaaactactggctggtcattccgctggtattctgtgaaaaccgcaacgttcagcgcgtcaccgatgcgctaaacgacgcccttggctacgccaataacggcctgaaaaattttgctcgccaggtgacatcggcaggggctttaaacgatacccgacatctgccctttccgcatcttgacggtattcgctgtattaccgttaattccggctgcggcggcgccacctcggacagcatgacgatgtgcgacgtgctggccgcctattccgatcatcctaacgttcttggcgtgacggtcttcgccctcggctgtgaaaaagcgcgaattgttgatttcaacgccgcgctggcgaagcgtaacccgaacttcagcaaaccgattatttacttcaggcagcaggactggagtagcgaagaaaaaatgatgcaggatgcgttgaccgaaacttataacgcgatccgcgaagcccccgtcgccgagcggcaggacgtcgcgctctcccacctcaaaatcggcgtgaagtgcggcgcttctgacgggttctcggggatcagcgcaaacccggcgatgggcgaagtgtcagatcgtctcgtcgccctcggcggcgcatcggggctggcggaattccccgagctgtgcggcgcggaaggggatatcgttcagcgctgcgcgacccgggagctgaaagagaagtttttgtcgctgatgaaaaactatgagcatgtcgcgaacttcttcggcaccaccatcgccgataaccccagcccgggaaacattgccgatgggctgatcactgacgcgataaaatccgccggcgcggcgaaaaaaggcggcagagcgccagttagcgcggtatgcgactatgccgaaccgatgggagaaagcggcctttcgctggtctgcacgccgggcaacgatgtggacgcggtaacgggcctggtcgcggcggggtgcaacgtggtgatcttctcaaccgggttgggtacaccgacggggaaccctatcgttccggttctcaaagtttcaaccaacaccgcgctcgcaaaaaagatgccggatattatcgattatgactgcgggccgattatcgaaggcacgccgctggcggatatcgccgacggcctgtttgagaaaatcatcgctaccgccagcggaacctggcgcaccaaagcggatgcgctcgaacagtatgattttatgctgtggaaacgctctctggagctgtag

SEQ ID NO: 173355 - DNA, 732 bp, Klebsiella oxytoca
atggtggtgacgcataagatggaaaaagtgatgttatcttttgacaacgtcagcgcgcattacggcaaaatccaggcgctgcacaacgtcagtctgcatatcaatcagggagaaattgtcaccctgattggtgccaacggtgcggggaaaaccacgctgctgggtaccctgtgcggcgacccgcgcgcctccagcggccgcgtggttttcgacggtaaagatattaccgactggcagacggcgaaaatcatgcgcgaagcggtggcgatcgtgccggaagggcgccgggtcttctcgcggatgacggtggaagagaacctggcgatgggcggtttttttgccgatcgcgaccagtttcagacccgtattaaatgggtgtatgagctgtttccgcgcctgcatgagcgccgggttcagcgggcgggcaccatgtccggcggcgagcagcagatgctggccatcgggcgcgcgctgatgagccagccgcgcctgctgctgctggatgagccttcgctcggcctggcgccgattatcattcagcaaatcttcgataccatcgaacagctgcgcgagcaggggatgactatcttcctcgtcgagcagaacgccaaccaggcgctgaagctggcagaccgcggctacgtgctggaaaacggtcacgtggtgcttgaggataccggcgacgcgttgctggcgaatgaagcggtacgcagcgcctatctgggcgggtag

SEQ ID NO: 173356 - DNA, 768 bp, Klebsiella oxytoca
atgagtcagccattattatccgtaaacggtctgatgatgcgtttcggcggtctgctggcggttaacaacgtgtcgctggagctgcgcgagcgggaaattgtctcgcttatcggcccgaacggcgcgggcaaaaccaccgtttttaactgtctgaccggtttctacaagcccactggcggcactattatgctgcgtgaccagcatctggaagggctgccgggccagcagattgcccgcatgggcgtagtgcgaacgttccagcacgtgcgtctgttccgcgaaatgacggtgattgaaaacctgctggtggcacagcatcagcagctgaaaaccggggttttctccggcctgctgaagacgccatccttccgccgcgcccagagcgaagcgctcgatcgcgccgcgacctggcttgagcgtattggcctgctcgaacacgccaaccgccaggccagtaacctggcctacggcgaccagcgccgtctggagatcgcccgctgcatggtgacccagccggaaatcctgatgctggatgagcccgccgcggggctaaacccgaaagagaccaaagagctggatgagctgatcgtcgagctacgcagccatcacaacaccaccatcctgctgattgagcacgatatgaagctggtgatgggcatttccgaccgtatttacgtggtaaaccagggcacgccgctggccaacggtacgccggaagcgatccgcaacaacccggacgtgatccgcgcctatttaggtgaagcataa

SEQ ID NO: 173357 - DNA, 1278 bp, Klebsiella oxytoca
atgaaaccgatgcattttgcgatggcgctgctgtcggcagttatgttctttatcctggcgggcgtctttatgggcgtgcagctggagcttgacggcacgaagctggtggtggataccgccgccgatatccgctggcagtggatctttatcggaaccgcagtggttttcttcttccagctgctgcgtcccatttttcagaaaaccatgaagaacgtctccgggccgaagtttattctgccggctatcgacggttcgacggtaaaacagaagctattcctgatcgccctgctggttatcgccgtggcgtggccgtttatggtgtcgcgcgggacggtggatatcgccacgctgacgatgatctatatcatcctcggtctgggtcttaacgtggtggtaggactttccggcctgttggtgctgggctacggcggcttttatgccatcggcgcctatacctttgcgctgctgaaccactattacggcctgggcttctggacctgcctgccgctggcggggctggtttcggcggcggcgggcttcctgcttggcttcccggtcctgcgtctgcgcggtgactatctggcgattgtcacgctcggcttcggcgaaatcgtgcgcatcctgctgcttaacaacaccgaaataaccggcggtccgaacggcattagccagatcccaaaaccgacgctcttcggccttgaatttagccgcagcgcccgtgaaggcggctgggatacgttcagcaacttctttggcgtgaagtacgacccctccgatcgcgtcattttcctctacctggtcgctctgctgctggtggtgttaagtctgttcgtgattaaccgtctgctgcgtatgccgctgggccgcgcgtgggaagcgctgcgcgaagatgaaatcgcctgtcgctcgctgggcctcagcccgacgcgcatcaagctgaccgcttttaccatcagcgccgcgtttgccggttttgccggaacgctgttcgccgcccgtcagggcttcgtcagcccggaatccttcaccttcgccgagtcggcctttgtgctggcgattgtggttctcggcggtatgggctctcagtttgcggtgatcctggcggcggttctgctggtggtctcgcgcgagctgatgcgtgatttcaatgagtacagcatgctgatgctgggcgcgctgatggtactgatgatgatctggcgtccgcaggggcttctgccgatgacgcgtccgcagctgaagctgaaaaacggtcaggcaaaaggagagcaggcatga

SEQ ID NO: 173358 - DNA, 927 bp, Klebsiella oxytoca
atgtccgagcagtttctctattttttgcagcagatgtttaacggcgtcacgctgggaagcacctatgcgctgattgccatcggctataccatggtgtacggcattatcggcatgatcaacttcgcccacggcgaggtgtatatgattggcagctacgtctccttcatgatcattgccgccctgatgatgatgggtattgataccagctggctgctggttgctgccggattcgtcggcgctatcgtgattgccagcgcctacggctggagtattgagcgcgtggcctaccggccggttcgcagctcaaaacgcctgattgcgctgatctccgccatcgggatgtcgatcttcttgcaaaactacgtcagcctgacggaaggctcgcgcgatgtcgcgctgccaagcctgtttaacggccagtggacggtgggcagtagcgacaacttctccgcgaccattaccaccatgcaactggtgatctggggggtgacgtttatcgccatgctggcgctgacgctgtttattcgctattcccgcatggggcgcgcctgccgcgcctgcgctgaagatctgaaaatggccagcctgctcgggattaacaccgaccgcgtgattgcgctgacctttgtgatcggcgcggcaatggcggcggttgccggcgttctgctcggacagttttacggcgttatcaacccctacatcggctttatggccgggatgaaggccttcaccgctgcggttctgggcggcatcggcagcattcctggcgcgatgatcggcgggctgatcctcggtattgccgaagcgctctcttctgcctatctcagcacggaatataaagacgtggtctccttcgcgctgctgatcctggttctgctggtgatgcctaccggcatcctgggccgtccggaggtagaaaaagtatga

SEQ ID NO: 173359 - DNA, 1110 bp, Klebsiella oxytoca
atgaaaaggaacgcgaaaacggttatcgcggggttagtcgcactggcgatgtcccaggcggcttttgccaaagatattaaggtcgccgttgttggcgcgatgtctggcccggtagcccagtggggcgatatggaatttaacggcgcgcgccaggcaatcaaagacattaacgctcagggcggcattaagggcgataagctggtcggcgtagagtacgatgacgcctgtgacccgaaacaggccgtggcggtggcgaacaaaatcgtcaatgacggcatccagtatgttatcggccatctctgctcttcttccactcagccggcatccgatatctacgaagatgaaggtattctgatgatctccccgggagcgactaacccggagctgactcagcgcggttatcagtacatcatgcgtactgcgggtctggactcctcgcaggggccgaccgccgctaaatacatcatggaaaccgtcaaaccgcagcgcattgctatcattcatgataagcagcagtacggtgaaggcttagcgcgctctgttcaggaaagcctgaaaaaaggcggcgcgaatatcgtcttcttcgacggcatcaccgctggcgaaaaagacttctccgcgctgctggcgcgcctgaaaaaagagaatatcgacttcgtttactacggcggctactacccggaaatgggtcagatgctgcgccaggcgcgttccgtagggctgaaaaccgtgtttatgggcccggaaggcgtgggtaacgcgtcgctgtccaatatcgcgggcgatgcggcggaaggcatgctggtcacgatgccaaaacgctatgaccaggacccggctaacagcgctatcgttgacgcgctcaaagcggagaagaaggacccgagcggtccgtatgtctggatcacctacgccgccgtacagtcactggcgcaggcgatggaccgggccggaagccaggagccgctggatttaatcaaagatctgaaagctcacggcgcgaaaaccgtgattgggccgctgaattgggacgaaaaaggcgatttgaagggatttgagtttggtgtcttccagtggcacgcggatgggtcatccaccctcgcgaaataa

SEQ ID NO: 173360 - DNA, 387 bp, Klebsiella oxytoca
atgaaattgaccattattcgtttacaacacttcagcgatcaggatcgtatcgacttagggaaaatctggccgtcgcaggatctcgcggcactggcgatagatgagagccatcgtatttacgccgcccgcttcaacgagcgtctgctgggagcggtacgtattacgctgaatggcgttgagggcgaactcagcgcgctgtgcgtgcgtgaagtgacccgccgtcgcggcgtcgggcaatatttagtggcagaagcgctaaaggataatccagaaatcaccagttggcggattgcggatgccggcgtggaagaccgcggcgtgatggcggcgtttatgcaggcgctgggctttagcgcgcaaacgggcggttgggtaaaaaatcagtaa

SEQ ID NO: 173361 - DNA, 1098 bp, Klebsiella oxytoca
atgaagggtaaagcgttactggcaggatgtattgccttaatcatgagcggtgcggcaatggccgaggatatcaaagtggccgttgttggcgcgatgtccggtccggtagcgcagtacggcgaccaggagttcactggcgcagagcaggctattgcggatatcaacgctaaaggcggtatcaaaggcaataagctgcagatggtaaagtacgatgacgcctgtgacccgaaacaagcggttgccgtcgccaacaaagtgattaacgacggtatcaaatacgttatcggccacctgtgctcttcttccacccagccggcgtctgatatctatgaagatgaaggcgtgctgatgatcaccccggcggccaccgcgccggagctgacagctcgcggctatcacctgattctgcgcactaccggcctggactccgaccaggggccaaccgccgccaaatatattctggaaagcgtgaaaccacagcgtatcgcgattgttcacgataagcagcagtacggcgaaggcctggcccgtgctgtacaggataatctgaagaagggtggcgccaacgtggtgttctttgatggcatcaccgccggcgagaaagacttctccaccctggtggcgcgcctgaaaaaagagaatatcgacttcgtttactacggcggctatcacccggagatggggcagatcctgcgtcagtctcgcgccgctggcctgaaaacgcagtttatggggccggaaggtgtcgccaacgtgtcgctgtctaatatcgcgggcgcttctgcggaaggtatgctggtcaccaagccgaaaaactacgaccaggttccggcgaacaaaccgattgtggatgcgatcaaggcgaagaaacaggatccgagcggcgcgttcgtgtggaccacctatgccgcgctgcagtcgctggaagcgggcctgaatcagtctgacgatccggctgaaatcgcgaaatacctgaaaggggcaacggttgagaccgtgatggggccgctctcctggaacgagaagggcgacctgaaaggcttcgaattcggtgtgtttacctggcatgccaatggcacagcgaccgacgccaaataa

SEQ ID NO: 173362 - DNA, 1245 bp, Klebsiella oxytoca
atgtctgacaactccaccttttcttcggttctgacgagccgggagcgtaccgctgtacctgcaaaatccctgagtttcattgaaggcgtgtcgatgatcgtcggcaccaatatcggcgctggggtgctatccatcgcctatgcctccagcaaagcgggctttctgccgctgctgttttggctgattgtggtcggtagtctgacgaccattaccatgctctacgtagcggagtcgacgctgcgcacgcgcaagcatctgcagcttagcggcctgtcgcagcgctacgttggccgctttggcgcgctgatgatgttcctctctgtttgcgtcaacagcgtcggcgcgctgacggcctatatgaccggcagcggtaaattattgcattcgttattcggtatctcgccggctctcggcagcgcgctgttttttattccggcggcaggggtactttatcttggcctgaaggcgattggccggggcgagaaatttatcagtatcggcatggtcgtcatgataaccatacttgtcgccgcgacgttgctgaaagagaccgccagcgtcggctatttgctggagggtaactggctgtatatggtgccggtatttaacgttgtcgcgttctgcttctccgcgcagtatatcgtgccggaaatggcgcgcggtttcgctgataaaccggagaaactgccgaaggccattatggtgggaatgttattaaccttttgcctgctggcgctggtcccgctctcggtgattgcattaagcgggctggataatatttctgatgtggcgaccatttcctggggacgtgcgctcggcgagtgggccttcttctcggcaaacctttttgcgctctgcgcgatgctgacctcctattgggggctgggcggcagcttcctgaccaatatcttcgatcagtttcgccttggaaacgacgagcagccgttgaaacgctttaaggtgctgttagtggtcgccgtaccgcctttcattctggcctacagtgggatggtatccttcgtgaatgcgctctattttgccggggtatttagcggggtgattttatctatcatgccgatcctgatccttaaaggctcgcgcaggcagggtgatatcaatcccggttggacctgcccggcgctgattacgcatcctttaatccagatcttcatcgtattgctctatctttgcagcgccgcctacgccattgcttccgcctttggctacctgcctgcgggctggtag

SEQ ID NO: 173363 - DNA, 1266 bp, Klebsiella oxytoca
gtgaaaagttcagaactgaatcagcgtcgccagcaggcgactccacgcggcgtaggggtgatgtgcagctactttgttgagaaagcggagaacgctacgctgtgggatattgaagggaatgaggtgatcgatttcgccgccggcatcgcggtgctgaataccggccatcgccacccaaaaatcgttgccgccgttgaacagcagctgcaggcctttacccacacggcttaccagattgtcccgtacgaaagctatgtcacgctggccgagcggattaacgaactggcgccgattgacggtccggcgaaaaccgccttttttaccacgggggcagaagcggttgaaaacgcggtgaaaatcgcgcgcgcttataccggccgtccggggttgattaccttcggcggcggcttccacggtcgtacgtttatgaccatggcgctgactggcaaagtggtgccttacaagattggtttcggcccgttcccgggctcggtttatcacgccgtctaccctaacgccgcccatggcattaccaccgccgacgcgatgaagagcctggagcgcattttcaaagcggatatcgcggccgatcaggtggcggcgattgtgctggagccgattcagggggaaggcggctttaacgttgccccgcctgagtttatgcaggcgctgcgcgcgctgtgcgatacccacggcattctgctgattgccgatgaagtacaaaccggctttgcgcgcaccggtaagctatttgcgatgcagcactatgatgtgaagcctgacctgatgacgatggccaaaagcctggccggcggtttcccgctctccggcgtggtaggtcgcgccgaggtgatggatgcgcctgcgccgggcggcctgggcggcacctatgccggtaacccgctggcggtcgcggcggcgcacgcggtgctggacgtgattgaagaagaacagctgtgccagcgcgctgagcgcttaggcagccatctgaaagaggtgttgaatcaggcgcgtcaaagctgcccggccattgctgacgttcgcggtcagggctcgatggtggcggtggagtttaacgatccgcaaaccggggagccgtcggcggagatcacccgtcaaatccagcaacaagcccaggagaacggcctgctgctgctgagctgcggcgtctatggcaacgtcattcgcttcctctatccgttaacgattccggatgcgcagtttacgaaagcgctggatattctggcccgcgtgctgaagcgctaa

SEQ ID NO: 173364 - DNA, 1515 bp, Klebsiella oxytoca
ttgcgttcgcttatcgcagacctggtgctggtcagattgcagaaagaaaccgatccgctcctgcacaagcgcctttacaaggcgattcgccacgccattctggatggttctctcccgccccatagccgactgccgccgtcgcgggatctggcgggggaactaggaatgtctcgcaacacaattttaacagtttacgaacaactcctggctgaggggtacgttgtgtcccgtcgcggcagcggcactttcgtggcgaaaacgctgcccgatatgtttcttcccgccagcagcgccaacgaaagccatcccgcgcagccccccagcgggactatttcccgtcgcggccaacacctgctggggcacatcagcgccagcccgcgtcagtggggggcgtttatccccggcgtaccggacgtcaatgcatttccccacccgctgttcagtaaaattcaggcacgcatcagccgccgtccaaaacccgaacagctcagctatagctgtaacggcggtaccgccgagctgcagcacgcgttggtggactatctgagagtagcgcgcggcgttctgtgtcaggcagatcaaattcttattactgaagggatccaccaggccatcgacctgatcacccgcatgctgtgcgaccgcggcgatctcgcctgggtggaggagccttcctactggggcattcgccacgtgctggcgatgaatgaagtgcgggctgagccgattgtggtggatgccagtggcctgtgcccgcccgaaagcgtagccgaagcgccgcggctgatcttcgttacgccatcccatcagtatcccctcggcgcggtaatgagccttgaacgccgacagcgcctgctcaccctggcccatcagcacggcagctggattgtggaagatgattacgacagcgagtttcgcttttccggccagccgatcccggcactacagggcttagtccccgaagcgccggtggtctacgtcggcacgttcagtaaaacgctctacccggggctgcggctgggctacgtcgtgctgcctcgaccgctggcggctgaactcaaaaacgcccatgccgagctctaccgcggcggccattcgcttatccagctggcgctggcggaatttatcaatgccggtcattactcggcgcacattcgtcgcatgcgcctgctctacagccgccgtcgcgtctttttgaccgaactgattcagcggcactgcggagcgcatgcgctgtcggacttcagcgacaatgccggactgcatctgattctgaatttgccggatgaggcagatgacgtggcgattgcccgcgatgccaacgcgcgcaatattttagtgcgtccgctgtcgcgctattacctgacggcgcagcggaagaaaggactgttgatggggtttgcttcgcagccggaaacgcagatggagccagcgttcaacgtgctgcttgagtgtctgaacaggcactgcccgcaggcgctgacggaggcagaaaaacaaaacgccccaacgtaa

SEQ ID NO: 173365 - DNA, 855 bp, Klebsiella oxytoca
atgaccaaagatatgcaaactttagccttagcccccgttggtaacctggaatcgtacatccgggctgctaacacttggccgatgttgtcggctgatgaagagcgggagcttgctgaaaagctgcattaccagggcgatctggaagcagcgaaaaagctgatcctgtctcacctgcgctttgttgttcatattgctcgtaactactcgggttatggcctgccgcaggcggatctgattcaggaaggcaacattggcctgatgaaagccgtgcgccgttttaacccggaagtgggcgtgcgtctggtttccttcgccgtgcactggatcaaagcggagattcatgaatacgttctgcgtaactggcgtattgtgaaggtcgcgaccacgaaagcgcagcgtaagctgttctttaacctgcgtaaaactaagcagcgtctgggctggttcaaccaggacgaagtcgaaatggtggctcgcgaactgggcgtatcaagcaaagacgtgcgtgagatggagtcacgtatggcggcgcaggatatgaccttcgacatgtcgtcggatgatgaatctgatagccagccgatggcgccggtgctctatctgcaggataaaacgtctaactttgccgacggcattgaagacgacaactgggaagagcaggcggcgaacaagctgactgacgcgatgcagggtcttgacgaacgtagccaggatatcatccgcgcccgctggctggacgaagacaataagtccacgctgcaggagctggcggatcgctacggcgtatcggccgagcgagtacggcagcttgaaaagaacgccatgaaaaaactgcgcgccgctatcgaagcctaa

SEQ ID NO: 173366 - DNA, 1074 bp, Klebsiella oxytoca
atggaggccatatcggtgaataagcgcgaggcaatgaaccacattcgccggttcggcaatcgattcgatcgtttccgcaatgcgggcggagcgggcggcagcggtggacgcaatacgtcgaagcggcctaaggcggcgccgaatccggcttcccgcaagagcaacgtgttcaatgaacaggtgcgctatgcctggcatggtgcggtgcaggatctgaaaagcacgcccctggcgacgttcctgacggtgatggttatcgccatttcgttgaccctgccaagcgtgtgctacatggtctacaaaaacgtcagcaccgcggcgtcgcagtattatcccacgccgcaaatcaccgtctatctggagaaaacgctggatgacgatgccgctgcgcgggtagtcggtcagctgcaggcggagcagggcgtcgagaaggtcaactatctgtcgcgcgatgaagcccttggcgaattccgcaactggtcaggcttcggcggcgcgctggatatgctggaagagaacccgctgccggcggtggcgatcgtcgtgccgaaaattgatttccagagtgtcgaagcgctgaacacgctgcgcgaccgcgtgagtcacgttcagggcgttgatgaagtgcgtatggatgatagctggtttgcgcgcctctcgtcgctgaccgggctggtcggacgcgtgtcggcgatgatcggcgtactgatggtggcggcggtgttcctggtgatcggcaacagcgtgcgtctgagcattttcgcccgccgcgataccattaacgtgcagaaactgattggcgcaaccgacggctttattctgcgtccttttctttacggcggtgcgctgctggggttctccggcgcgtttctgtcgctgatcctgtcggaaattatggtcatgcgcctttcgtcggcggtcaccgaagtggcgaaagtcttcggcacgcagtttgaactcagcggcttaggctttgatgagtgcctgctgatgctgattgtttgctcaatgattggctgggtcgccgcctggctggcaaccgtacaacatttacgtcactttactcccgagtag

SEQ ID NO: 173367 - DNA, 669 bp, Klebsiella oxytoca
atgattcgctttgaacaagtcagcaaagcctatctcggtgggagacaagcgctgcagggggtgacttttcacctgcaggcgggtgagatggcgtttctgaccggccattccggcgcggggaaaagtaccctgctgaagcttatctgcggtatcgagcggcccagcgccggcaaaatccttttcggcggccatgacattagccgcctgaagagccgcgaagtgccgtttttgcgccgtcagattggcatgattttccaggaccaccatctgctgatggaccgtaccgtttacgataatgtggcgatcccgctgattatcgccggcgccagcggcgatgacattcgccgtcgcgtgtcggcggcgctggataaagtcgggctgctggacaaagcgaaaaacctgccgattcagctttcaggcggggaacaacagcgcgtgggtatcgcccgcgcggtggtcaacaaaccagcggtcctgctggcggatgaaccgaccggtaacctcgacgaagcgctgtcggaagggatcttacgtctgtttgaagagtttaaccgcgttggggtgacggtgctgatggcgacgcatgatctggggcttatctccagtcgtccgtatcgcgttctgtccctcagcgaggggcatatgcatggaggccatatcggtgaataa

SEQ ID NO: 173368 - DNA, 1521 bp, Klebsiella oxytoca
atggcgaaagacaaaaaacgtggcttcttttcctggctgggctttggtcaaaaagaacaggcgcaggaaaccgacgcagaacaaaaagtagaagcccagcaagaggttgaagaacaggctccggaaagcgaaacgcctgcggctgcgccggaaacggtcgacgcgccggcgacggagcaccaggatgccgaagcctttgccgtcgaggtggtcgaggtgaccgggcaggttgtggagagcgaacagccgcaggcggttgtcgactccccggcagttgagacgattgcagaaccgcctgtggttgaagaaattgtcgctgagcctgtagttgaagaagctatcgccgagccggtagtggctgaagctatagttgagctgacgccggaagaggtgattgccgaaccggaagctgtcgttgttgaaaagggtgaagaggctgtcattgaagagccggaaatcgttgagccggtagaagaagccgaaatcactgacgaagagctggaagcgcaggcgctggctgcagccgatgcggcggaaaatgccgtagaagtggtgccggacgaaaccgtggtgacgccgttagagcaggaaaaacccaccaaagaagggttcttcgctcgcctcaaacgcagcctgataaaaaccaagcagaacctcggttccggatttatcagtctgttccgcggcaagaaaatcgacgatgatctgtttgaagagctggaagagcagctgctgattgccgatgtcggcgtggaaaccacccgtaagatcatcactaatcttaccaacgacgccagccgcaagcagttgcgcgacgccgaggcgctgtacggcctgctgaaagaagagatgggcgatattctggcgaaggtggacgagccgctgaacgtagaaggcaaggcgccatttgtaattctgatggttggcgtcaacggcgtcggtaaaaccaccaccatcggcaagctggcgcgtcagtttgagcagcagggcaaatcggtgatgctggccgcgggcgataccttccgcgcggcggcggtagagcagcttcaggtgtggggtcaacgcaacaatattccggtgattgcccagcataccggcgcggattcggcatcggttattttcgatgccatccaggcggcgaaggcgcgcaacattgacgtcctgattgccgatactgcgggtcgtctgcagaataaatcgcacctgatggaagaactgaagaagattgtccgcgtcatgaaaaaactggatgtcgatgcgccgcatgaggtcatgctgaccattgacgccagcaccgggcaaaacgcgattagccaggccaaactgttccatgaggcggttggactgaccggtatcactttgactaagctggatggtaccgccaagggcggggttatcttctcggttgccgatcagttcggtattccgattcgctacatcggtgttggcgaacgtattgaagatctgcgtccgtttaatgcgggcgactttattgaggcactttttgcccgagaggattaa

SEQ ID NO: 173369 - DNA, 597 bp, Klebsiella oxytoca
atgaagaaaccaaaccacgcaggcagcggtcagatccgtattatcggcgggcaatggcgaggccgtaaattaccggtgccggagagcccaggtctgcgcccgaccaccgaccgggtgcgcgaaacgctatttaactggctggcgccgtcgatcgttgacgcgaactgcctcgattgcttcgccggcagcggcgcgctgggccttgaagccctctcccgctacgcggctaacgccacgctgctggaaatggaacgcggcgtcgcgcagcagttgcaaaaaaatctggcgactctcaaagccagcaacggcaaagtcgtgaataccaataccttagcgtttcttgctcaggcgggcacgccgcatcacatcgtgtttgtcgatcccccgtttcgcaaagggctgcttgaagagacgctaaagctgctggaaaacaacggctggcttagcgatgaagcgctcatctacattgaaagtgaagttgaaaacgggttaccgccggtgcctgtaaactggcatccgtaccgtgagaaagtagccggacaggtcgcctaccgtctctatcaacgtgaggcacaaggagaaaaccatgctgattaa

SEQ ID NO: 173370 - DNA, 279 bp, Klebsiella oxytoca
atgctgattaactttggccgcttgctgatgctgtgcgtgtgggcgtttttattgctgaatctgttccaaccgttcccaaagccgctcaatatctttgttaacgtggcgctgatctttatgattctgatgcacggcctgcagctcacgctgctcaaggcgacgcagacgaaagagatgccgccgctggggcgcttcgagcaaattcgtattttcatcttcggcgtgttcgaactggtcgcctggcagaaaaagctcaaggcgaccctgaagaagaaataa

SEQ ID NO: 173371 - DNA, 360 bp, Klebsiella oxytoca
atgagtaaagttccgctgttttttatggttgccgttgccatcattgcggttgccgcgtcgtatcgctatgtgcagcagcgtcgggaaaaaatggataacgatgccgcgccgctgttgcaaaaacgggtggtggtgagcaataagcgggagaaggtgattaacgatcgccgttcgcgccagcagacggtgacgcctgccggcagcgaaatgcgttatgaagcaagcttcaggccggaaagcggcgggctggaagtggtttttcgtctgcaggcgccgcagtatcatgcgctaagcgtcggcgataagggcgtactgagctataaaggttcgcggtttatgggttttacgcccgagccctga

SEQ ID NO: 173372 - DNA, 627 bp, Klebsiella oxytoca
atgctttggtcatttattgctgtctgtttctccgcatggctttacgtcgatgcgtcttatcgtgggcctgcctggcgtcgctgggtgtttaaacccgtcacgctgatcctgcttctgttactggcctggcaagcgccgatgtttaacgccatcagctatctggtgctggcggggctttgcgcctcgctggtcggcgacgcgctgaccctgctgccgcggcagcgggtaatgtacgccgtgggggcattctttctctcgcatctgctctacaccatctggtttgccagccagctgacgctatctttcttctggccgctgccgctggtgctgctgatcctcggcgcgctgctgctggcgattatctggacgcgtctggaagagatgcggatgccggtgtttacctttatcgcgatgacgctggtgatggtctggctggccggggagctgtggttcgcccgcccgacggataccgccctgtccggcttcgctggcgcggcattcctgctgctcggcaacgcggtctggctgatcagccattatcgccgccgcttccgcgctgacaacgcgatctcctcggcattttacttcgccgggcacttcctgatcgtccgcgcgctttatttgtaa

SEQ ID NO: 173373 - DNA, 2205 bp, Klebsiella oxytoca
atgtcggctccagaatcgcaggataaaaaagtcccacacttctcatcgttaaaatttacccctgccgcgcagccggcggaaagctgctgcgcggaccacgcctgccgcagcgaaaccaccgaggaaaacgaggctctgaggcacgcacgctttagttggctggtagaaggcatggattgcgcagcctgcgcgcgcaaggtcgaaaccgccgttcgccaggtaccgggggtcagccaggtgcaggtactgttcgccaccgaaaagctgctggtcaacgccgagggcgatgttggtccgcaaatcgaaagcgccgtgcgcgccgcgggctatcagctgcgtgatgaaaacgcgccacgggcagaggagtccacctcgtggctgcgcgagaatctgccgctcatcacgctggtcatcatgatgggactaagctgggggctggagcagttcagcccgcctctgggcgaaattgccttcatcgcaaccacgctggtcggcctgtggccggtcgcccggcaagcgatacgcctgatcagaagcggaagctggttcgccattgaaaccctgatgagcgtcgcagccatcggcgcgctgtttatcggcgccaccgccgaagcggcgatggtcctgctactgtttttaatcggcgaacgtcttgagggatgggctgccagccgcgcgcggcaaggcgtcagcgcattgatggcgctgaagcccgacacggcaatccgcgtgcgcgatggcgtgcgtgaaaccgtagcccagcgcgacttgcgccccggcgacgtgattgaagtcgccgccggaggccgcctccctgccgatggccagctactctcccccttcgccagcttcgatgagagcgctttgaccggtgaatccgtaccggtagagcgtaacgccggggaacgcgtagcggccggcgccaccagcgtcgatcgtctggtacagctgacggtgatctccgaaccgggcgacagcgctatcgatcgtattcttaagctgattgaagaagcggaggagcgccgcgcgccgattgaacgctttatcgatcgctttagccgcatctataccccggcgattatggtcgtcgccctgctggtggccattgttccgccgctgctgtttgcgggcgcctggctgccgtggatctataaaggcttaacgctgctgctgattggctgtccgtgcgcgctggtgatctccaccccggcggcaattacctccgggctggcggtagcggcacgacgcggcgcgctgattaaaggcggcgcggcgctggagcagctcggccgcgtgcgccaggtggcgtttgataaaaccggtaccctgaccatcggccagccgcgcgtcactgcggtgatggcgaccgcagacatcagcgaaaacgatctgctggcgctcgcggccgccgtggagcaaggctccagccacccgttagcccaggctatcgtgcgtgaggcagaacagcgccggctggtcattccgtcggcaagcgatcagcgcgcgctggccggatccggcattgaggctcaggttgaaggacgccaggtgctgatttgcgccgccggtaaaactcgcgatccgcagtacgatgaacctattcagcagctggagagcgccgggcaaaccgtggtgctggtaatgcgcgataagacgctgctgggaattctggcgctgcgcgatacgcttcgcgatgatgcccgtcaggcggtggatgagctccatcagttgggcgttcagggagtgatactgaccggcgataatccacgtgcggcggcggctatcgctaacgagctgggactggcgttccgcgccgggctgctgcccgcggacaaagtgcaggcggtgatagcgcttaatgcccagtcgccgctggccatggtcggcgacggtatcaacgatgcgccggcgatgaaagcggcgacgataggtatcgcgatgggcagcggcaccgacgttgctctggagaccgccgatgcggcattgacccataaccgcctgaccgggctggcgcagatgatttcgctggcgcgcgccacccacgccaatatccggcagaacatcgccatcgctttgggtctgaagggcattttcctcgtcaccaccttgctcggcctgaccggcctgtggctagcggtgctggctgataccggggcgacggtgctggtcaccgctaacgcgctgcggttgctgcgtaagaagtaa

SEQ ID NO: 173374 - DNA, 246 bp, Klebsiella oxytoca
atgagcgaacttttctccagccctgaccatacgcttgatgcgcaggggcttcgttgcccggaaccggtgatgatggtgcgcaagaccgtgcgtacgatgccggtgggcgagacgctgctaatcgtggccgacgatccggcgaccacccgcgatattcccggtttctgccgctttatggagcatgagctactggcgcaggaaaccgaggcgctgccgtaccgctatctgattcgtaaaagccactga

SEQ ID NO: 173375 - DNA, 666 bp, Klebsiella oxytoca
atgagtccgtttactaccgtacagcgtaaaaaagcgctgatctggctatcgcttttccatctgctggtcatcacttccagtaactatctggtgcagctaccgatctccatctttggttttcataccacctggggcgcgttcagctttccgtttattttcctcgccaccgatctgacggtacgcattttcggcgctccgctggcgcgacgcattatcctcgcggtgatgatcccggcgctgctgatctcctacggggtttccgcgctgttctacatgggcgagtggcagggctttgccgccttaaccagctttaacctgtttgtcgctcgtatcgccgccgccagctttatggcctacgcgctggggcaaatccttgacgtccacgtctttaaccgcctgcgtcagagccgccgctggtggctggcgcccacggcatccacccttttcggtaacatcagcgatacgctggccttcttctttatcgccttctggcgcagcccggacccgtttatggcggcgcactggggggaaatcgccatcgtcgattattgcttcaaagtgctgattagcatcgtattcttcctgccgatgtacggcatgttgttgaatatgctgctgaaaaaactggcagataaatctgatttatccgcattgcagccaggttaa

SEQ ID NO: 173376 - DNA, 558 bp, Klebsiella oxytoca
atgcgcaatttggttaaatatgtcggtattggcctgctggttatggggcttgctgcctgtgataacagcgataccaaaacgccgactgccggggctgctgcggaaagcaacgccagcgggcaacctattagtctgctggatggcaaactgagcttctccctgcctgccggtatgaccgaccagagcggcaagctgggcacccaggccaacaatatgcacgtctactctgatgccaccggacaaaaagcggtgatcgtgattgttggcgacaataccaacgaagagctggcggtgatgagccagcgcctggaagagcagcagcgcagccgcgacccgcagctgcaggtcgtgagcaataaatccattgagcttaaaggccacaccctgcaacagctggacaccatcatctccgctaagggccagaccgcctggtcttccgtgcttctcggcaaggttgatgacaaactgctgacgctgcagatcacgctgccagcggacaaccagcagcaggctcagaccgaagcggaaaacattatcaacaccctcgtcatccagtaa

SEQ ID NO: 173377 - DNA, 1221 bp, Klebsiella oxytoca
atgcccgaaaccgtcgctgaaccggcgcttaatggattgcgcctcaatctgcggattgtctctgtcgttatctttaactttgccagctacctgaccataggcctgccgctggcggtattacccggctatgttcatgatgtaatggggtatagcgccttctgggccgggctggtgattagcctgcagtattttgctacgctgctcagccgccctcacgccgggcgctatgccgatctgctgggcccgaaaaaaatcgttgtttttggtctgtgcggctgctttctgagcggactgtgctatctgctggcggcgttctgcggcgactggcccgtggttagtctggcgctgttgtgtctggggcgcattattctcggcatcgggcagagctttgcgggcaccggctcaacgctgtggggcgtaggggtagtcggttcgctgcatatcgggcgggttatttcctggaacgggattgtgacctacggggcgatggcgatgggcgcgccgctcggggtgctctgttactcgctgattggcctgcacggtctggcgttgacgattatggcggttgcgctggtggcggtgctgtgcgcgttgccgcgggcggcggtaaaagcgggtaaggggaaagcgatgtcgtttcgcgcggtgctggggcgcgtctggctctacggcatggcgctggccctcgcatcggcgggtttcggcgttatcgccacctttatcaccctgttttatgatgccaaaggctgggacggcgcggccttcgccctgacgctgtttagctgcgcctttgtcggcactcgcctgctgtttcccaacggaattaatcgcctcggtgggctgaacgtggcgatgatctgttttgtcgtcgagattatcgggctgctgttagtgggcctggcggagacgccgctgatggcgaaaatcggtactttctttgccggagccggtttttcgctggtgttcccggcgcttggcgtggtggcggtgaaggcggtgccgcagcacaaccaggggtcggcgctggcaacctatacggtatttatggatctctcgctggggatcaccggcccgctggccgggctgctgatggcgtgggcgggaatttcatcggtctatctggcgacggcggggctggtcgcggtagcgctgctgctgggatggcgattaaaaaaacggcccccggtcaatgaaccggaggccgcggcgtcaggccagtag

SEQ ID NO: 173378 - DNA, 1050 bp, Klebsiella oxytoca
atgacaacccctcagcccgataaaacgggcatgcatattctgctcaaactggcgtcactggtggttatcctcgccggtatccacgccgcggcagatatcatcgtacagctattactggcgttgttcttcgccattgtcctgaatccgctggtcacctggtttattcgccgcggtatcagacgtccggtagccattaccatcgtggtcgtggtgatgctgatcgtacttaccgcgttaattggcgtgctggccgcgtcggttaacgaattcgtcgccatgctgccaaagtataataaggagctgacggcgaaagtcctgcgcctgcaggaggcgctgccgtttttgcatattcacatgtccccggaacgtatgctgcaacgcatggactccgacaagctaatgacgttcactaccgtcctgatgactggcctctccggcgccatggccagcgttattttactggtcatgaccgtggtctttatgctgtttgaagtccgtcatgtcccctataaactccgctttgcactgaacaacccgcaaatccatatcgccggtcttcaccgggcgttaaaaggcgtctcgcattatctggcgctgaaaacgttgctcagcctgtggacaggggggattatctggttaggactgatgctgatgggggttcagtttgcgctgatgtggggcgtgttggcttttctgctgaactatgtgcctaacattggctcggtgatttccgccgtcccgccaatgatccaggcgttactttttaacggttattacgaatgcctgctggttggcgcgctctttttagtcgtgcatatgattatcggcaatattctcgaaccacgcatgatgggccaccggttgggcatgtctacgctggtagttttcctctcattgctggtctgggggtggctgcttggcccggtgggaatgctgctgtcggtgccgttaaccagcgtctgtaaaatatggatggaaaccactaaaggcggcagtaagttagccatcctgctcgggcccggacgcccgaaaagcaggctgccgggctag

SEQ ID NO: 173379 - DNA, 384 bp, Klebsiella oxytoca
atgggcttaatctgggcgttattcagtgtcggactggtgagcggcgcgcagctgctgctgcgcagcgcgatggtcgagctgccgccgctgacggatttatttaccttcctcaaccatctgctgcatctgcgggcgggcacctttggcctggcgtttggtcttttgggttacctgctgtcgatggtctgctggtactttgccctgcatcagctgccgctggcgaaagcctacgcgctgctgagcctgagctacattctggtctgggccgccgccatctggctccccggctggcatgaacctttccactggcaatcgctgctgggcgtgctgctgattgtcgccggggtgctgacgatcttctggccggtgaagcggcagggctag

SEQ ID NO: 173380 - DNA, 339 bp, Klebsiella oxytoca
atgagcgtgtggatctgtctggttttcgccagcctgctgagctgcgccggacagctgtgccagaaacaggcgacccgcccgtccaaatccgggcggcgcgggcaccatattcttggctggctggggctggcgctgctctctctgggctgcagcatgctgctgtggcttagcgtgctgcagtcgattccggtcagcatcgcctaccctatgctgagcctgaactttgtctgggtgacgctggcagcatgggggatctggcgcgagccggtcgcacgccgccactggtttggcgtggcgcttatcgtcgttgggatcgttattctggggagccgcatctga

SEQ ID NO: 173381 - DNA, 1656 bp, Klebsiella oxytoca
atgaaaagcattcgctacggcgcctctctggtcgccctttttgtcctctactatttactccccctcaacttccgcctgctgtggcaaccggatgaaacccgctacgcggagatcagccgcgaaatgctggcgaccggcgactgggtggtgccgcacttcctcggtctgcgctactttgagaagccgattgccggctactggatcaacagcatcggccagtggctattcggtcataataattttgccgtccgctttggggtggtgttctccattaccgtcaccgccctgctggtggcctggctggcatggcgtattttccgcgataaacgcctggcgattttgtcggcagtgatattcctgaccgcgctgctggtctacggtatcggcacctatgcggtgctcgacccgatgattaccatgtggctggcgctggcaatgtgcagcttctggggtgcggcgcaggctcaaagccacagcggtaaaatcttcggctacgtcttgctgggcgtggcctgcgggatgggggtgatgaccaaaggcttcctcgcgctggcggtgccggtggttggagtgctgccatgggtcattgcgcgtaaacgctggcgtgaagtgctgacttacggctggctggcggtgggcgtctgcgcgctggtggttctgccgtgggggctggccatcgccaaacgagagccggacttctggcgctacttcttctgggttgaacatatccagcgtttcgcggaaaaagatgcccagcataaagcgccgttctggtactacatcccgttcctgattgccggaagcctgccgtggctggcgctgctgccgggagcgctcaagcgcggctggaccgagcgcgacgagtcgcgcggggcgctctatttgctcggatgggtggcgatgccgtttctgttcttcagcattgctaagggtaagcttccgacctacatcctgccgtgtttcgcgccgctgtcgattctgatggcgcgctacgcgctggatgcggcaaaggcgggggcgaaagcgctgaaaattaacggcgcgatcaacctggcttttggcctgattggtctggtagcggtgctggtggtttcgccgtggggctttatgcacaagccggtatggagccatattgagctgtataaatgcctgctggcggcgctaatattcggctgttgggcgctgatgggatggctggcgatgaagaataacggtcgccgctggacgcttgccgcgtgctgcccgctggggttggcgctgctggtgggtttcgcgattcccgaccgggttatcgacagcaagcagccgcagtttatggtggatatcgtgagcgaatcgttgacgccgagccgctacgtgttgaccaataacgtcggtattgccggcggactgtcctgggagctgaagcgcagcgatattatcctgttcgacaagcagggcgagctgaaatatggtctctcctggccggatgcgcagcaccagtttgtcgataaggcgcaatttgctgactggttagcggcgcaccgccagcaggggccgatctcgttggttctgctgatggataaaggagagagtatggccgatctaccgctaccgaaaccggatagctcttatgagctggggcgggtagtgtttatccagtacctgccgcaatga

SEQ ID NO: 173382 - DNA, 903 bp, Klebsiella oxytoca
atgaaacaggtcggcttacgcatagatgtcgatacctttcgcggcacgcgggacggggtcccgcggctgctggctctgctgagccagcacgggattcaggcaagcttctttttcagcgtcgggccggacaatatggggcgtcatttatggcgcctgataaaaccgaaatttctgtggaagatgctgcgctcaaaggccgcttcgctgtacggctgggatatcctgctggcaggtaccgcctggccagggcgcaggatcggcgcgggcaatgaagaggttatacgtgccgccgcgcaggagcatgaagtcggtctgcacgcctgggatcactatagctggcaaacgtggagcggagtctggccgcaggagaagttgacgctggaggtggagcgcgggctgctggagctggagcggatcatcggtcgtccggtgacctgctccgccgttgccggctggcgtgccgatcagcgggtcattaaagccaaagaggcgtttgatttcctctacaacagcgactgccggggaaccgccccttttctgccgcagctcggtaacggcgcttccgggaccgtgcagatcccggtcaccttacccacctgggatgaagtggtcggcagcgcggtcgatattgcgggcttcaatcgctatctgctggattgcatccaccgcgataagggcaccccggtctataccatccacgctgaagtggaagggatcgcctttgcgcaacagtttgacgagctgctgaccatggccgctcagcaagagatccgtttttgcccgctaagccagctgctgcccgccgattttagcgcgctgccgcgaggcaaggtggttcgtggtgaattagccggccgggaaggctggcttgggcgtgaacaattactgaattcgggtgtttga

SEQ ID NO: 173383 - DNA, 1986 bp, Klebsiella oxytoca
atgaaagccgtagtcttcgcttatcacgatatgggttgtgcaggtattcagtctctgctggatgccggttatgacatcgccgccatttttacccatccggataaccctggcgaaaaccatttctttggctccgtggcgcgcattgccgcggaacaaggtattccggtatgggcgccggaagatgtgaatcatccgctgtggatcgaacgtctccgcgagataaaaccggacgtgctgttctcgttctattaccgcaatctgctgtgcgaggacattctgaatatcgcgccgcagggggcttttaacctgcatggttccctgctgccgaaataccgcggccgcgcgccgctgaactgggtgctggtcaacggcgaaagcgaaactggcgtgacgctgcaccgcatggtgagccgcgccgatgccgggaatatcgtagcgcagaaaagcgtagctatcggcgaggatgaggcggcgctggccctgcatcgtaaactctgcgctgcggcgtcggacctgctggctcaggcgctgcccgcgatccgcgatggcaaaatcgaagagcgcgcgcaggatgaaagccaggcgacctgggtcggtcgccgcacgccggaagacggtcgcctcgactgggagcactccgcccggagcctgcataatcttgtgcgcgcggtttccgatccatggccgggcgcgttcggctatgctggcgcgaacaagtttatcgtctggaagtcccgcgtacgtgacgatctacccgccgccaaagcggggaccgtgctttccgtcacgccgctggtcgtcgcctgtcaggaaggggcattagaaatcgtcaccgggcagaccgagcgcggcgtttatatgcagggtacgcagctggcgcaggcgctggggctggtagccggagcggtgctgagcagcaaaccggtcgtggcgattaagcgccgcacccgcgtgctgatcctcggggtgaacggttttatcggcaaccacctgaccgagcgtctgctgcaggacgacaactacgagatttacggactggacattggctcagacgccatcagccgcttcctcgacaacccgcgtttccacttcgttgagggcgatatcagcatccactccgagtggatcgagtatcacatcaagaagtgcgatgtggtcctgccgctggtggcgattgccacgccaatcgaatatacccgtaacccgctgcgcgtgtttgagctggatttcgaagagaacctgaagattatccgcgactgcgtgaagtacgataagcgcatcattttcccgtcgacctcggaagtgtacggcatgtgcaccgacaacaatttcgatgaagatgcctctaatctggtcgtcgggccgattaacaaacagcgctggatctattcggtctccaagcagctgctggatcgcgtgatctgggcctacggcgataagaacggcctgaagtttaccctgttccgtccgttcaactggatggggccgcgccttgataacctgaacgccgcgcgtatcggcagctctcgcgccattacccaactgatcctcaacctggtagaaggctcgccgatcaagctgattgaaggcgggaaacagaagcgctgcttcaccgatatcagcgacggtatcgaagcgctgttccgcatcattgagaacaaagacggccgctgcgacgggcagatcatcaacatcggtaacccggataacgaagcgagcatcaaagagctggcggaaatgctgctggcctgctttgaacgtcatccgctgcgcgaccgtttcccgccgtttgccggtttccgcgaagtggaaagcagcgattattacgggaagggttatcaggacgtcgagcaccgtaaacccagcattcgcaacgcgaaacgctgcctgaactgggtgccgacggtcgaaatggaagagaccgtggaacataccctggacttcttcctgcgcacggttgaattgacggacaacggcaaatcatga

SEQ ID NO: 173384 - DNA, 984 bp, Klebsiella oxytoca
atgtttagctatcctcccgtgaaaaaggtctcggtcgttattcctgtctataacgagcaggagagcctgccggagcttatccgccgtaccgataccgcctgcgcgacgctcggtcggcagtatgaaattctgctggtcgacgatggcagcagcgatgactcggcgcgaatgctgaccgaagccgctgaagccgaaggcagccatgtagtggcggtactgttgaaccgcaactacggccagcactcggcaattatggcgggttttagccacgtcaccggcgacctgatcatcacccttgatgctgacctgcaaaacccgccggaagagatcccgcgcctggtggagaaggccgacgaaggctacgacgttgtcggtaccgtgcgccagaatcgccaggatacctggttccgtaaaagcgcctccaggatgatcaatcgtctgattcagcgcaccaccggtaaagcgatgggcgattacggttgcatgctgcgcgcctatcgccgccatattatcgacgcgatgcttaactgccatgagcgcagtacctttatcccgattctggcgaatacttttgcccgtcgcgcggtggagatcccggtgatgcacgccgagcgcgagttcggtgattccaaatacagttttatgcgtctgattaacctgatgtatgacctggtgacctgcctcactaccacgccgctgcgtctgctgagcctgttcggcagcgccatcgctctgctgggcttcgccttcggtctgctgctggtggtgctgcgcctggtatttggcccgcagtgggcggcggaaggggtgttcatgctgttcgcggtgctgtttatgtttatcggcgcccagttcgtcggtatgggtctgctcggggagtatatcggccgtatctataacgacgttcgcgcccgtccccgctactttattcaacgtgttgttcgccagccggaaacggcatctcaagaggaagatcgttcatga

SEQ ID NO: 173385 - DNA, 1140 bp, Klebsiella oxytoca
atgagcgattttttgccgttttcgcgcccgtcgatgggcgacgcagagctggctgcgctgcgtgaagttttgcaatccggctggatcaccaccggaccgaaaaatcaggcgctggaagaagcgttttgcgcattaaccggcaaccgccacgccatcgccgtcagttcggcgaccggcggcatgcacgttacgctgatggcgctgggtatcagcgccggcgatgaagtgctcaccccttcgcagacctgggtctccacgctgaacatgatctgcctgctcggcgcgacgccggtgatgatcgatgtcgatcccgataacctgatgattactcccgaagcggttgaagcggcgatcactccacggaccaaggcgatcgtcccggtgcactatgcgggcgcgccggtggatatcgacgccatccgtgcgattgccgagcgtcacggtattccggtgattgaagatgccgcccacgcggcagggacgtactacaaaggccgtcacgtcggctggcgcggcaccgccattttctcattccatgcgatcaaaaatatgacctgcgccgaaggcgggctggttgtaaccgacgatgatgaactggccgcacgtattcgcagcctgaagttccacggcctcggcgtagatgcttacgatcggcagaccctgggccgcgccccgcaggcggaggtgatttcgccgggctttaaatacaatctggcggatatcaacgccgcgctggcgctggtgcagctggacaagcttgccgccgccaatcagcgccgtgccgccattgcgcaacgctatctccgcgagctggcggatacgcctttcaggccgctggcggtgccgtcatgggagcatcagcacgcctggcacctgtttattatccgcgttgatgaagccgcctgcggtatcagccgcgatgccctgatggaaaaactgaaggccatgggcattggcaccggtctgcacttccgcgccgcgcatacgcaaaagtattaccgcgagcgtttccccgacgtttcattaccgcatacggaatggaacagcgcgcgcatttgttccatcccgttgttcccggatatgaccgacgacgatgtcactcgggtcatttccgcactgcaccagctgtcaggacgttga

SEQ ID NO: 173386 - DNA, 504 bp, Klebsiella oxytoca
atgagcacattcgacaaacatgacctgagcggttttatcggtaaacatctggtttatacctatgataatggctggaactacgaaatttacgtgaaaaacgccaccactctggattaccgcattcacagcggcatcgtcgcgaatcgttgggtgaaagatcagcaggcttacatcgttcgcgttggtgaaagcatctacaaaatttcctggaccgaaccgaccggtaccgacgtcagcctgatcgtaaacctcggcgacaaactgttccacggcaccatctttttcccacgttgggtgatgaataatccggaaaaaaccgtctgcttccagaacgatcatatcccgctgatggtttcctaccgtgaagccggcccggcgtatccgacggaggtgattgatgagtttgccactatcacttttgtgcgcgattgcggcgcggataatgacgaagtgattaattgcccggctaatgaattgcctgaaaattttcctggcaatctgtaa

SEQ ID NO: 173387 - DNA, 861 bp, Klebsiella oxytoca
atgcacaagactacgctggaacaatgggcgctgctggaaaaggtggtcgaactgggtagcttcgcgaaggcggcggaagagacccaccgcagtcagtcgtcggtgagctataatctcgcgctgctgcaggagcgcctcggcgtcacgctactcacgccatcgggccgtcgcgcggtgctgaccccggcgggtgagctgctgcttggccaggttaaaccgctgctgcaggccttcgcttacgtcgaaacccatgccgccaccctgcgcgacggcacgcggacccgactggacctggtggtcgacagcatttttccgcgcgagcggctgttcgccattctgcgccagtttcaacagcgctatccgcagacccaggtcaggctgaccgaagtgctggaaaacgttgaagaggaacatccggcccgcagcgaggcggacgtgatggtgctgacccgccgccaggatattaccggccgcggcgaatggctgatgaatattgattttgtcgccgtcgcccatcgcgagcatccgctctccgcgcttcagggaccgctggatgataacgcgctggccccctggccgctggtgcgcatcgccgatcgcagcaacgacccgcaatcctcccgcgatgcatggaccttttccaccattgatgccgccattgatgcggtgctgtaccaggtcggtttcggctggctgccggaggagcgtattcgccctcagctacagcaaggagtgctgaagatgctgccgctgggacacggcgcgcggcgcgccacgccgctgcatttgatcgttaagcgtgatttaacgcccattgatgagcaggtcgccacgctgctggatctgttcagaaccccctga

SEQ ID NO: 173388 - DNA, 1569 bp, Klebsiella oxytoca
ttgtctatcatccgcaccaccctgctggcgctattcgcctgcgctccgttgctggcctgcgccgcgcccaatgaactcaccaccgcatggccggtcaacgtggggccgcttaatcctcacctctacacgcccaaccagatgttcgcccagagcatggtctatgagccactggtaaagtatcaggcggatggctcagtaaaaccctggctggccaaaagctggacccactcggcggacggcaaagtctggaccttcaccctgcgcgatgatgtgacattttccaacggcgaagcgtttgacgcccatgccgccgcggagaacttccgcgtggtgctcgataaccgccagcgccacgcctggctggagctggtcaatcagattgtcgatgtcaaagcgctcagccaaaaccaactgcaaatcaccctgaaaagcgcttattacccgttcctgcaagagctgaccctgccgcgtccattccgctttatcgccccgtcgcagtttaaagacaatgagaccctgcacggcattaaagcgccgattggcaccggcccttgggtactgaaggcatcaaaactcaatcagtacgacgtgctggtgcgtaacgagcgctactggggcgaaaagccgcagattgaaaagattaccgtcaaggtgatcccggacccgacgacccgcgctgtagcttttgaaaccggagatatcgacctgctgtacggtaacgaagggctgctgccgcttgacacctttgcccgtttcagccagaacccggcgtaccgtacccagctttcccggccaatagagacggtgatgctggcgctaaattccgccaaagcgcccaccagcgagctgttggtgcgtgaagcgttgaactacgcggtgaataaaaaatcgctgattgataacgctctgtacggcacgcagcaggttgctgatacgctgtttgctcccaccgtgccttatgccgacattggcctgaagccgcgccggtacgatccgcagcgggcgaaagcgttgctggaaaaagcgggctggctactgcctgcgggaaaagagattcgcgagaaaaacggccagccgctgcgcgttgaactgtcgttcattggcactgacgccctgagcaagtcgatggcggaaatcattcaggccgatatgcggcagattggcgtggacgtggcgctggtcggcgaggaagagagcagtatttatgcccgccagcgcgatggtcgcttcggcatgattttcaaccgcacctggggggcgccgtacgatccgcacgcctttatgagttcgatgcgcgtgccgtcgcacgccgattttcaggcgcagcagggtttagccgacaaaccggttattgataaagagattggcgaggtgctggaaaccaccgacgacccccaccgtcaggcgttgtaccgcgacattctgacccgtctgcacaatgacgcggtgtatctgcccatcagctatgtctcgacgatggtggtcgccagaccggagctgggtgctattccttacgcgccgattgcgtctgaaattccgtttgaacagattaaaccggtgaaaccctga

SEQ ID NO: 173389 - DNA, 945 bp, Klebsiella oxytoca
atgctacgttacgcgctacggcggatctcgctgctgatcccgatgatcttcgccgcctcggtgattatcttcctcatgctgcgcctgggcaccggcgacccggcgctcgactatttgcgtctgtcgaacctgccgccaacgccagagatggtcgcctcgacccgcgtgatgctgggactggatcagccgcttatcgtccagtacggcagctggctgtggcaggcgctgcatctggatttcggcatctcgttcgccactcagcgtccggtgctggatgacatgctgaacttcctgcccgccacgctacagctggcgggggctgcgctggtgttgattctcctcacctccgtaccgctcggtatttgggcggcgcggcatcgtgaccgcctgccggattttattgtgcgggttatcgccttccttggcgtgtcgatgcccaacttctggctggctttcttgctggtgatgttcttttcggtttacctgcaatggttgcctgcgatgggctatggcggctggcagcacatcattctaccggcggtgtcgattgcctttatgtcgctggcgatcaacgctcgtctgctgcgcgccagtatgctggaggtcgccgggcagcgccatgtgacctgggccagactgcgcggtctgaacgagaaacaaaccgaacgccgccatattttgcgtaacgcttcgctgccgatgatcaccgccgtaggaatgcatatcggcgagctgattggcggcacgatgattatcgagaatatctttgcctggcccggcgtggggcgttatgccgtttcggcgatatttaaccgcgactatccggtgattcagtgctttacgctgatgatggtgattgtttttgtggtttgtaacctgatggttgatctgttgaatgccgcgctggatccgcgcattcgtcgccatgaaggagcgcactcgtga

SEQ ID NO: 173390 - DNA, 834 bp, Klebsiella oxytoca
gtgaacgttttcctctcttcgcgctggtctgtccgcctctctttcatcatcatcgccctgctggcggtaattgcgctcaccagccagtggtggttgccgtacgatccgcaggcgattgatcttccttcgcgcctgttgacccctgatagtcaacactggctgggcaccgatcatctggggcgcgatatcttctcgcgcctgctggcggcaacacgcgtatcgcttggctcggtgatggcctgcctgctgctggtgctggcgctgggattgatcgtcggcggcagcgcggggcttatcggtggtcgcgtcgatcaggtcaccatgcgcatcgcggatatgtttatgactttcccgacctcgatcctctctttctttatggtcggcgtgctgggaaccgggctgaccaatgtgattatcgccatcgccctgtcgcactgggcgtggtacgcacggatggtgcgcagcctgaccctctccctgcgccagcgcgaatttgtgctcgcttcccggctttccggcgcgggccatgttcgggtgtttatcgaccatcttgccggtgccgtgattccgtctctgctggtactggcgacgctggatattggtcacatgatgctgcacgtcgccgggatgtcgttccttggcctcggcgtcaccgcgcccaccgccgaatggggggtgatgattaacgacgcgcgccaatatatctggacccagccgctgcaaatgttctggccggggctggcgctgtttatcaccgtgatggcctttaacatggtgggtgacgcgctgcgcgatcgtctggaccctcatctggttacggagcatacccactga

SEQ ID NO: 173391 - DNA, 762 bp, Klebsiella oxytoca
atgccgcaacaaattgaactgcaaaacatcgccttacgggccgagcgtccgctggtgcacggcgtttctttgacgatcaaacgcgggcgcgtgctggcgctggttggcggcagcggcagcggcaaatccctgacctgcgccgcggcgctgggcattttgcctcccggcgtacgccagacggcggggataatccttgccgacggccagccggtttctccctgtgcgctacgcggcagcaaaatcgccaccattatgcagaatccgcgcagcgcttttaatccgctgcgaacaatggccgatcacgcccgggaaacctgccgggccctggataaagcctcagacgacgccacgcttattgcggcgctggaagccgtcgggctggagaacgcgccgcgcgtgctcaagctatacccgtttgagatgagcggcggcatgctgcagcgaatgatgattgctatggcgttgctgtgcgatgcgccctttatcgttgccgacgaacccaccaccgatctggacgcggtggtccaggcacgcattctcgatctgctggtaagtattatgcaaaaccgcggccccggcatgctgctggtgacgcatgatatgggggtggtggccaggctggcggacgatgtcgcggtaatggatagcggcagcattgtggaacagggcgatgtggaatctctgtttcgcgccccgcgacacgacatcacccgcgggctggtggcggcgcatctcgccctttatggtctggagctaagctga

SEQ ID NO: 173392 - DNA, 771 bp, Klebsiella oxytoca
atgacattactgaccgcctcgacaattacccatcactacccggacttaaaggtgctaacagaggtctctttagcgctgaaaagcggtgaaaccgtggccctgctggggcgtagcggctgcggcaaaagcacgctggcgcgcctgctcgtcggcctggaatccccaacgcagggtcgcatctgctggcggggagagccgctctcccggctcaatcgcgctaaacaaaaggcgttccgtcgggatattcagatggtttttcaggacgccatcagcgcggtcaatccgcgtaaaaccgtacgcgagattctgcgcgagcctatgcgtcacctgctatcgttgacgaaagcggagcagctggcccgggccagcgaaatgctcagggcggtggatctcgacgatagcgtgctgaataagcgccccccgcagctgagcggcgggcagctacagcgcatctgcctggcgcgggcgctgacggtagaaccaaagctgctgatcctggatgaggcggtttctaacctcgacctcgtgatccaggcgagcgttattcgtctgctcaaaaagctccagcagcagttcggcaccgcctgtctttttatcacccacgatttacgcctggttgagcgcttttgccagcgggtgatggtgatggatgaggggaaaatcgtggagatacaaaccgtgggcgaggcattaactttttcctctgacgccggtcgcgtgttacaaaatgcggtacttcccgcctttcccgtgcgccgaaataaggtttaa

SEQ ID NO: 173393 - DNA, 417 bp, Klebsiella oxytoca
atgcaacgaattaccattactctcgatgacgatttactcgatacgctggatagcctgagccagcgccgtggctacaacaaccgttccgaagcgatccgcgatattctgcgcggcgcgctggcccaggaggccgctcaggagcacggtacccagggcttcgcggtgctctcttacgtctatgaacatgagaaacgcgatctcgccagccgtttagtctccacccaacatcaccaccacgatctctccgtcgccactctgcatgtgcatattaatcacgacgattgtctggaaattgccgtgctgaagggggatatgggcgacgttcagcattttgccgatgacgttatcgcccagcgcggcgtgcgccacggccatttgcagtgcctgccgacggagaaggaatccccccactcataa

SEQ ID NO: 173394 - DNA, 1014 bp, Klebsiella oxytoca
atgtcttccattcaactgtgcgccgcacaccaggcgaattcgactttcgacggcgacgcaattgcccagtacatgcgtaccgatttcattaccctgccggagcatctcagcgttcatgaggcgcgagaactgttcgtttctcagctggccagcgatgagatccccggccaggtttttgtcgtcgcgggaaaaaaactgcgcggcagtttatcgattaaaaagctgctgcaggagagcgatactgcgcaatccatccgttatttaatggatagctgtctgtttcgcgtcaggcccgacgacccgcgcccgcaggtggtcgccgaactcggcgagcgcgggctcgatctggtgccggtggtcgaaaagggtgagctggtcggctgcctgatggaaaaagagatcgctcatctgctggaagatgacgtaaccgaggatgctcagcgccagggggcgacgctgccgctggaaaagccctatctggaaaccagcccgtgggcgctgtggaaaaaacgttcggtgtggctgctgctgctctttgtcgccgaagcctacaccagcagcgtgttacagcattttgaagaggcgctggaatcggctatcgcgctggcctttttcataccactgctgattggtaccggcggaaacagcggaacgcagataacctctacgctagtacgttcgatggcgctgggggaagtgcgactgcgcgatatgggacgcgtgatccgcaaagaggtctcaacctcgctgctgatcgccatcacgctcggcctggcgggctgcctgcgcgcctggatgatgggcatcggcatggagatcaccctgattgtcagtctgacgctggtatgcatcaccctgtggagcgcggtggtgtcgtcggtgatccccctgacgcttaagcgcgtcggcatcgacccggcggtggtgtcagcgccgtttatcgccaccctcatcgacggtaccggattaattatctattttaaaatcgcccagtattttcttggcctgaattga

SEQ ID NO: 173395 - DNA, 954 bp, Klebsiella oxytoca
atgacgtacaaaattttactcccgcaggaaatcatggctgaagggagagaatacctggaaagtcgcggttatcagctgattaacggatcagggatggaagaagaagatatcattcgcgacatcggggactgcgacggtattatcgtacgcctttcaaaaatgtccgatcgcgtatttgaggcggctaaaaagctgaaagtcgttgcacgacacggtgccggttacgatacggtcgatctggagtcagcgaaacgtcacggcgtagtcgtattaaatgcgccaattgctaacagcatgtccgttgccgaactggccatattttatatgctgcactgctcgcgtaatttcaagctggtacaggaaaagatgcttgaagattattactgggcaaaactgcgtacgccaaaagtggagctggatggtaaaacgctgggcctgattggcgtgggaaatatcggttcacgcgtggcaatcaaagcgctgcatggctttaatatgaaagttatcgcctacgatccgtataaaacccagcagcagatccccgaaggcgtagaactcaccgacgattttgaccgtattttcaaagagagcgacttcgtttctctgcactgcccgacgaccgcggaaaccaccgattttgtcggtgagaaacagttttccatgatgaagcccaccgcctacttcattaataccgcacgcggaaagctggttgatgaaaaggcgctgtatcacgccttgagcacccacgctatcgccggagcgggcgtggacgtcttaaagaaagagccgtttgatgccaacgatccgattttctcgctaagcaatatcgtgattgccccgcacattggcgccgccactatcgaagcgaccgacagagcctcgctccattccgcgattggcattgatgaagtcttatccggtaagaaaccatcctggccggtgccgggtttttaa

SEQ ID NO: 173396 - DNA, 699 bp, Klebsiella oxytoca
atgactattggtaaccgtatttttttaaaacgtccggcctgcagcgtcgatcttctgaaagaatttgaacagctcccggcggcgaatattgctgacaccatgaatcgtattgccgtactgggtaacgggattaaacggatttcttcgccgaaaaaaccgattatggcgggcttcgccatcaccgtaaaagttcgtgcgggcgataacctgatgctgcacgccgcgctggatatggcgggtgagaacgatgtgattgtggtctccaacgaaggcgaccgttcgcgagcgctgatgggcgagatcatggtggcctacgcccactgcatgaagaaagtcgccggtatcgtgctggacgggccaatccgtgacatcgatgcgctgtcggttctcgattttccactgttcgccaccggctccaaccccgcaggcccgtttaaacaaggtcccggcgaggtgaacacgccgatcgccgttggcggcgtcgcggtttgtccgggcgacctgatcgtcggcgatgcggatggcgtcattgttatccccctcggcgacgcagaagccgtactgaataaagccaaagattatgcaaaattcgatgcaagcaaagtagaggccgcgaaaaacggcaccgcgaatcgcctttgggtcaaaaaatcactggatgagacaggcgttgagtttatcgacgacatgtatcgttaa

SEQ ID NO: 173397 - DNA, 1395 bp, Klebsiella oxytoca
atgctttatttaaaactcttgcccattatcttttttcccgttttattttggataataccgcacccggaaggcgtcgccgcgccgacctggcatatggttggcatctatctggcgatgctgtgcggactggttttacgtccgtttaccgatgcggtcattatgctgattattctcgggtttgcctctctggttctcgaccctgctcctctgtttgcgggttttggtagcccgatggtctggtttatcatcagcgcctttattatttgcaaagcgtttgtcattaccggtctgggtaaacgtatcgcctatctgctgctaaaacgctacggtaaaaataccctcaccctgggctatctgatgatggtgacggataccgtactggccccggcaacaggttcaaatatgtcccgttccggaggcatcacctatcccatcttcaggaacatcgccgaagcgctgggctcgaagcccgacgacggtagccggaaaatcggcgcctatctgaccatcctgatgtacgtcgtctcaatgggaacctccagcctgtttctgacggggatggcgaccaactcaattaccgtctcgctggctaacgagatcatgaaagtgaatctcgaatggatgacctggtttaaagccgccattgtgcccgccggactggtgctgctgctcgcgccatggatactgtataaaatctacgccccggaactcaaagttattgataacgtcaacgaaattgctgaaaaaggcctgcgtgaactgggtccggtaaagcgcgaagagaagctgttgatcgtattctttattctgggcgtactcggctggatgacgggctccattaccggcatcgcctttattcccgtcggcctggctttcctcgcctgcctgctgcttttcggcgtcctgagctggaacgacgtggtgagcgaaaaatcggcctggcagaccttcgtctggtacggcgcgttttatggatgcgcggttgcgctatcaaaaggcgggttctatgtcttcctggtcgacgttatcaaaaactatcttgacctgtcgcacctgaatgaaatcagcgcgattgccgtcctggtctttatcagccttgctgtccgctatttctttgtctctaatagcgcgttcgtggtctcattctacccggtactttttaccctgggaatgacgactcaggcgcatcctatgtacgtggcgctttctctggccttctccgcaggctatggcgcattgctgacgcactatggcaacggcgctggcgtatttacgttctccagcggctacgtgccgcaaaaaacattctggatgctgggcaccatcatggtggtggtcaacgtattaatcttcttcctgatcggtattccctactggaagtttatcggcatttaa

SEQ ID NO: 173398 - DNA, 1164 bp, Klebsiella oxytoca
atgaaactggatattctgattaaaaacggtctggtcgccgatcttgatagccgcgattatattaatcgcaatattggcatcatcggcgatcgtatcgttgacttaaatgccgttgatgatttacaggccgaaacgattattgatgccgcaggttgtatcgtactgcctggcttaatcgacttccatggccatgtttttcatggcgggaccgccatcagtgttaaccctgatatcgtatgcttgcctaatggggtcaccagtatggtcgatgccggcagcagcggctgggtaaattatcagctttttcgcaatagcgtgattcatcctgccatggtgaaaatcaaaagctatctgaacgtggtcaacgtcggactttctaccctcggaggcgggccgaccggttatctggaaaataccaatccggcaaattacaacgaggagaagatagcgcaaacgctgaatggcaacagagacaatattctcggcctgaaactacgctacagccaggatatcgctaaagggaaacagtacgccagcgaccctcttctctctaccgtctccctggcgcgtaaactggataccacgatttgcgttcacgtcacggactctcttctcttcgccgatgaactgatccgctattttaatgccgatgatatttacgcgcactgtttccacggcaccggccactcgattctcaatgaacagggcgaggtctatgcggcgataaaagaggcccagtcccggggcgttatcttcgactgttcaaacggcgtggcccactttgattttcacgttgccagaaccgccatggcgcagggattctatcctgatatcattagtaccgatctcactttaagaaatagcttacggacggataaggtctacagtctgctccacgtcatgtcgaaatatctcaacatgggaatgtccttcttcgatattgttcgcgcggtaaccgctacgccggcccgcctgatgaagatgcagggacaaattggtaccctggcgcccggcgcgtttgctgatatttcgattgttaaactgcaaaaagagaagattgtttttgaagatactcagggcgttaaaattgaaggcgaccgttacattgataactgcgctaccctgtgtaatggtcaaattgtctaccgccgcctgcgcttctaa

SEQ ID NO: 173399 - DNA, 1884 bp, Klebsiella oxytoca
atgaataataatgaaattgttatcttttcagtttccaggacaataacccaacgaatcatgaatgtccttattgaaaggaaactcgacatccccgtgtatgaatttcgttattcagaagttctcgataaagcccatgagatgattcaatccggcactaagataattattagccgaggcggtaccgccgcactcctgcgtagcaatattactatccccgtcattgaaatagcccatgattttcatggcgtttatcgcatcttacaagaagcgaatagtaagtcgcaaaaaatcgccgccgttggtttcccgcagttttgcagcgccttacgccattaccagaacatgaccaatgaagattttaaaatttgtcaggtttataatcatcacgatattgaaaatgttataaaaaatctttcggagaataattaccataccgtaatcggcggactgaccgttgctgaaatggctcaaaaatatcacctcaatgctattatgggtgatactgataacatttccattgagcaggccatcaatgaagctcacagtttattgaaatacattaatcgtgaaaacagcaaactgatcatgagtcactcagcattgaatcaggcgcgtgaaggtattatgtgtatcgatcagcttggtgaaattatcaatatcaacgctaccggcgtggcattattccaatgtcaagccggagataaaatattcaaaaaagaagcgtttaaagagatctacgccagtattattaatgaattagacatcaaagagcaggctatagacatcaacggcgtaacgattcatatttccgtgcgccacttttctaaccgaaaaatatcttatgccgttatcacggggctaagccaggagagcacactttggcaaaacagcgtcaacaaaaaaagtaagctacgcgggttttccacaatctggtctttcgacgatattattggccagtcgccggccatcctcgatgttataaaaaaagctaaactgtgcgcccgccacgaactgccgattcatattttaggtgataccggcacgggcaaagaacttttcgcccaaagtattcaccactatagcgccagaggccatagtccttttatcgcgattaactgcgcggccatccccgagagcattctggaaagtgaactctttggctatgccgacggcgcgtttaccagcgcgcggaagggcggcaaacctggggtgtttgaaatggcgatgaacggtacggtgtttatcgatgaaatcagcgaagcgccgctatcggtacaggttaagctgctgcgcgtattgcaggaaaagcagttttctcgtctcggcggcgatacgcttattaccgtcgattttcgcctgatcaccgccagcaataaggatctgcgccagctcgtcgccaacggtgaattccggcaggatctgtactacagaatcaatatccttgagttgactctaccggccttacgccaacgaccgggcgatattatgctgttaattcagcacttgcttcatcagcagggtaagcaaattacctttacccccgacgcggtggattttttacatagctatcgctggcccggcaatattcgcgaactccaggcggtgatctaccgactcattgtgctgctcgatatagacagggtgaacaaggagattttactccaggttagtcaaattacaccggatgaccatcagcaactcgctcactctccggcagtgagcgtctcatccgatgaaaccgatctattaaagaaacaagagaaacaactgattaccagcgtaatagaaaaaaccgacggagacagaaccagagcatcggtcatgctgggcattagccccaccaccctgtggcgcaaattaaagcagcataatatcagcggataa

SEQ ID NO: 173400 - DNA, 1197 bp, Klebsiella oxytoca
gtggaaaggtttgatgccatcgtaatcggcgccggagcggcgggaatgttttgtgcggcgcaggcagggcaggcaggctgccgggtgctgctgctcgataatggcaaaaagcccgggcgcaagatcctgatgtcaggcggcggacgctgcaactttactaacatgtatatcgaacccgcggcatatctcagccaaaacccgcatttttgcaaatccgcgctggcgcgctacacccagtgggactttatcgatctggttagcaaacacggtattgcctggcatgagaaaaccctgggccagcttttctgcgatgattccgccgagcaaatcgtcaacatgctgctggcggagtgtgaaaagggcggcgtacaaattcgcctgcgtagcgaaattatcagcgttgagcgggatgatgagggctacatgctgcagcttaacggcgagacggtggcggcgaacagattggtggtggcctccggcgggttatccatgcccggtctgggcgcttcgccgttcggctacaagcttgccgagcagtttggcctgaaggtactgccgacccgcgcgggcctggtgccgtttaccttgcataagccgctgcttgagcagctgcaggtgctttccggcgtctcggtgccgtcaaccatcacggcggaaaacgggaccgtcttccgggaaaatctgctctttacccaccgcgggctgtccgggccggcggtactgcaaatttccagctactggcagccgggagaattcgtcagcatcaatctgctgccggattgccatcttgatgacttcctcaacgaacagcgcgcggcgcatcctaatcagagcctgaaaaacacgcttgcgatgcaactgccgaaacggttggttgagtgcctgcagcagctgggccaactcccggatgtcaccctgaaacagcttaacgtccgcgagcagcaggcgctggttgagacgctgaccgcatggcgcgtccagccgaatggcaccgaaggctatcgtacggcggaagtgaccctcggcggcgtagatactaacgaactctcttcgcgcaccatggaggcccgtaaggtgcccgggctctactttatcggcgaagtgatggacgttaccggctggctgggaggttataacttccagtgggcatgggcgtcagcctgggcatgcgcgcaggctttagcggaacagaaataa

SEQ ID NO: 173401 - DNA, 1497 bp, Klebsiella oxytoca
atgctacatttatttgccggtctggatttacataccgggctactgttattgcttgctctggctttcgtgcttttttacgaagcgatcaatggttttcatgataccgcaaacgctgttgcaactgtgatctacacacgcgcaatgcggtcgcagcttgctgtggcgatggcggctctttttaacttcttcggcgttctgttgggcggtctcagcgtagcctatgccatcgtgcatatgttgccgaccgacctgttgcttaacatgggttcagcacatggcctcgccatggtcttttccatgctgctggcggcaattatctggaacctcggcacctggtacttcggccttccggcctccagctcgcacaccctgatcggcgcgatcatcggtattggtttaaccaatgcgctgatgaccggtacgtcggtggtggacgcgctgaacatcccgaaagtcatgggtatttttggctcgcttatcatctcgccaatcgttggcctggtcgtggcgggcggcctgattttcatcctgcgtcgttactggagcggaaccaaaaaacgcgcccgtatccacctgaccccagccgagcgtgaaaagaaagacggcaagaaaaagccgccgttctggacgcgtattgcgctgattctctccgccattggcgttgcgttctctcacggcgcgaacgatggtcagaaaggcattggcctggtcatgctggttctgatcggcgtagctccggctggcttcgtggtcaatatgaacgcttccggctacgaaatcacccgtacccgcgatgcggtcaacaacgtggaaaccttcttccagcagcgtcctgagctgttgaagaaagcgaccggcgctgagcagctcatcccgtctccggacgcgggggcagccgcaaatggcgaattccactgccacccggcaaacaccatcaacgcgcttgaccgcgtgaagacgatgctgaccggaaccgaaagctacgacacgctctccgttgagcaacgcagccatctgcgccgcattatgctctgcatctccgataccaccgataaagtggcgaagctgccggaagtcagtgccgacgataagcgtctgcttaaaaagctgaaaaccgatatgctgagcaccatcgaatacgcgccaatctggattattatggcggttgcgctggcgctgggtatcggcaccatgatcggctggcgtcgcgtggcgaccaccatcggcgagaaaatcggtaagaaagggatgacctacgcacagggtatgtcagctcagatgaccgcagccgtatcgattggtctggcgagctataccggtatgccggtttccaccacccacgtgctctcctcctcggttgcggggacaatgctcgtcgatggcggaggtctacagaagaagaccgtcaccagtattctgatggcatgggtactcaccctgcccgcggcgattctgctctccggcgcgctgtactggctctcgctgcagattatctaa

SEQ ID NO: 173402 - DNA, 336 bp, Klebsiella oxytoca
atgatcagcactgttgcgctgttttgggccctgtgtatcgtatgtgtagtgaatatggcacgctacttctcgtcgctgcgtgcattgcttgttgtgctacgtggttgtgaccctttgctctatcaatatgtcgacggcggcggtttttttacgtcgcatggacagcccagcaaacagatgcgcctggtgtggtatatctacgctcagcgctaccgcgatcatcacgacgatgagttcatccgccgctgcgagcgggttcgtcggcagtttatccttaccagcgccctctgcggcctggtgatggtgagcatgattgccctggctatctggcactag

SEQ ID NO: 173403 - DNA, 438 bp, Klebsiella oxytoca
atggcttacaaacatattcttattgcagtagacctgtccccggaaagcaaagtactggtagaaaaagccgtttctatggcccgtccctacaatgcaaaagtttccctgatccacgtagatgtgaattactccgatctctacaccggccttattgatgttaacctgggcgatatgcagaaacgcatctccgaagagactcaccacgcgttaagcgaactctctacgaatgcgggctatccgatcactgagaccctgagcggtagcggcgatctcggccaggtgctggtcgatgcgattaaaaaatacgatatggacctcgtggtttgcggtcaccatcaggacttctggagcaagctgatgtcctccgcgcgtcaactcatcaacaccgttcacgtcgatatgctgattgtcccgctgcgcgacgaagaagaggaataa

SEQ ID NO: 173404 - DNA, 1467 bp, Klebsiella oxytoca
atgaactccaccgcacccacaggcttgctgcagcaacctcgcccattcttcatgatcttctttgtggaactatgggaacgatttggctattacggcgttcagggcattctggccgttttctttgttaaacagctcggcttctcgcaggaacaggcgtttataacctttggcgcgtttgcggcgctggtatatggcctgatctccatcggcggctatgtcggcgatcatctgctcggcaccaaacgtacgctggtgctgggcgcgattgtcctcgccgcgggctactttatgaccggcctgtcgctgctcaaacccaatctcatttttatcgcgctgggaaccattgcggtgggaaacgggctatttaaagccaacccggcgagcctgctctccaagtgctatccgccaaaagatgcccgcctcgacggcgccttcacgctgttctatatgtcgattaacatcggttcgctgctgtcgctgtcgctggcgccggtgattgccgataaattcggctacgcggtgacctacaacctgtgcggcgccggcctgattgtcgccctgctggtttacttcgcctgtcggggtatggtgaaagatatcggctctgagccggactacaagccgttgagtctgcgcaatttactgtacgtgctggcaggaacggtggtgatgatttttgtctgcgcctggctgatgcataatgtaaaaatcgccaatctggtgctaattatcctctcagtggtggtgacgattttcttcttccgcgaagccttcaggctggataaaaccgggcgcaataaaatgttcgtcgcctttatcctgatgctggaagcggtgctgttttatattctgtacgcgcagatgccgacctcactcaacttctttgccatcaacaacgtccaccatgaaatactcggtttcgcgattaacccagtgagctttcaggcgctaaatccgttctgggtggtggtggccagcccgatcctcgccgcgatctacacacgtttgggcaataaaggcaaagacctgagcatgccgatgaagttcaccctcggcatgttcctgtgcgcgctgggctttttaactgccgcagcggcgggaatgtggtttgccgatgcccagggattgacctcgccgtggtttatcgtgctggtctatctgtttcagagtctgggagaactgctgattagcgccctggggctggcgatggttgccgcgctggtaccgcagcatctgatgggctttattctggggatgtggttcctgacgcaggccgccgcatttctgctgggcggctacgtcgcaaccttcaccgccgtaccggacaacattaccgacccgctacaaacgctgccgatatataccaacgtattcagtaaaattggcctggtgaccctgggcgtcacggtggtcatggcgatcatggtgccgtggttgaacaggatgattaatacaaagagcgcgtaa

SEQ ID NO: 173405 - DNA, 765 bp, Klebsiella oxytoca
gtgaaaatttgtttaattgatgaaacgggcgccggagacggcgccttatctgttcttgtcgaccgctgggggctggagcaggacgatgacaacccgatggcgctggtgatgacgccggagcatcttgagctacgtaagcgcgatgaaccgaagctcggcggcattttcgtggattttgtcggcggggcgatggctcaccggcgcaggttcggcggcggccgcggcgaggcggtggcgaaagcggtgggaatcaaaggcgactatctgccggatgtcgtcgatgcgaccgccggtctggggcgggatgcctttgtgctggcgtcagtcggctgtcgcgtacggatgctggagcgtaatccggtggttgccgcgctgctcgacgatggcctggcgcgtggctacgccgacgctgaaatcggctcgtggttgcaggagcgcctgcaactgattcacgcctccagcctgacggcgctgaccgatattaccccgcgtccgcaggtggtctatctcgacccgatgtttccgcataagcaaaaaagcgcgctggtgaagaaagagatgcgggtatttcagtcgctggtggggccggatttagacgccgacggtctgctggcgccggcgcgtcagctggcgaccaggcgggtggtggttaagcgcccggactacgcgccgccgctggcgaatgttgcgacccctaacgcggtggtgaccaaaggccatcgctttgatatctatgccggaacggcggttgagccgcaggggtaa

SEQ ID NO: 173406 - DNA, 2043 bp, Klebsiella oxytoca
atgaccaatccattactgacgcctttttcgctcccgcccttttctgcaatcaaacccgagcacgtggtccccgcggtcaccaaagcgctggatgattgccgggcggcggtcgaacgcgcggtggcgcaaggggcgccgtatacctgggaaaacctttgccagccgctggcggaagtggacgacgtgctggggcgtattttttccccggtcagccacctgaactcggttaaaaacagccctgagctgcgtgaagcctacgaacaaactctgccgctgctctccgaatacagcacctgggttgggcaacatgaaggtctgtacaaagcgtaccgcgacctgcgcgacggcgaccattacgccaccctgaataccgcgcagaaaaaagcggtggataacgcgctacgtgattttgaactctccggtattggcctggccaaagagcagcagaaacgctacggcgaaatcgccgcacgcctgtctgaactgggcaatcagtacagtaacaatgtcctcgatgccaccatgggctggacgaagctgatcgccgatgaatccgagctctccgggatgccggaaagcgcacttgctgcggcgaaagctcaggctgaagccaaagagcaggaagggtatctgttgaccctggatatcccgagctatctgccggtaatgacctactgcgataaccaggcgctgcgtgaagagctgtatcgcgcctattccacccgcgcttctgaccaggggccgaatgccggtaagtgggataacagcccggtaatggcggaaatcctcgccctgcgccacgagctggctcagctgttgggcttcgacagctatgccgataagtcgctggcgaccaaaatggcggagaatccgcagcaggtgctcgactttctgagcgacctggctaaacgcgcccgtccgcagggtgagaaagaactggctcagctgcgcgccttcgccaaagccgaattcggcgtggatgaactgcagccgtgggatatcgcttactacagcgaaaaacagaagcagcatctttacagcatcagcgatgaacagctgcgcccgtactttccggaaaacaaagcggttaacggcctgtttgaagtcgttaagcgtatttacggcattactgcgaaagagcgtactgacgtcgacgtctggcatccggaagtgcgcttctttgaactgtacgacgaaaataacgagctgcgcggcagcttctacctcgacctttacgcccgcgaacataaacgcggcggggcgtggatggatgattgcgttggccagatgcgcaagcttgacggcacgctacaaaagccggttgcctatctgacctgtaactttaaccgtcccgtcagcggcaaaccggcgctgtttacccacgatgaagtgatcacgctgttccacgagtttggccacggtctgcaccatatgctgacccgcatcgataccgccggcgtttccggtatcagcggggtaccgtgggatgcagtcgaactgccgagccagtttatggaaaactggtgctgggagccggaagcgctggcgtttatctccggccactacgaaaccggcgagccgctgccgcaggagctgctggagaaaatgctggccgcgaagaactatcaggcggcgatgtttattctgcgccagctggagttcggcctgttcgacttccgcctgcatgcggaatttagcccgcagcagggggcgaaaatcctcgaaacgctggcggaaatcaagcagcaggttgcgttgattcccgggccgtcctggggccgcttcccgcatgcctttagccacatttttgccggtggatacgcggcgggctactacagctacctgtgggccgatgtgctggcggcggatgctttctcgcgcttcgaagaggaggggatcttcaatcgcgaaaccggccagtcgttcctcgacaacattcttagccgcggcggttcggaagagccaatggtcctgttcaaacgcttccgcggtcgcgagccgcagctggacgcgatgcttgagcattacggtattaagagttaa

SEQ ID NO: 173407 - DNA, 1317 bp, Klebsiella oxytoca
atgccattagtcatcgttgctatcggggttgccctgttattgttgctgatgatccgtttcaagcttaacgggtttatcgctctggttctggtggcgcttgccgtcgggcttatgcagggtatgccgctggataaagttatcgtatccatcaaaaatggcgttgggggaaccctcggcagcctcgcgctgatcatgggcttcggcgcgatgctcggaaaaatgctggcggactgcggcggtgcgcagcgtatcgccaccacgctgattgccaaatttggtaaaaaacatattcaatgggcggtcgtgctgaccggctttaccgtcggctttgcgctgttctatgaagtcggctttgtactgatgctgccgctggtctttaccatcgcagcatccgccggtattccgctgctctatattggcgtaccgatggcggctgcgctctcggtcacgcacggattcctgcctccgcatccgggcccgaccgcgattgctactattttccatgccgacatgggtaagaccctgctgttcggtacgattctggcgattccgacggttattcttgcggggccggtttacgcgcgtttcctgaaaggcatcgataagccgattccggaaggcctgcacaacccgaagacgttcactgaagaagagatgccgggttttggcgtcagcgtctggacttctctggtgccggtgattctgatggccatgcgcgccgtcgccgaaatggtgctgccgaaaggccacgctttcctgccgattgcggaattctttggcgacccggtgatggcaacgctgatcgccgtgctgatcgccatgttcactttcggcctcaaccgcggtcgttccatggagcagattaacgatacgctgacctcctcgatcaaaattatcgccatgatgctgctgatcatcggcggcggcggcgccttcaagcaggtgctggtcgatagcggcatggataagtacattgcgtctatcatgcacgaatccaatatgtctccgctgtttatggcctggtctattgctgcggtactgcgtatcgcgctgggttccgccaccgttgcggccattaccgcgggcggtatcgccgcgccgctgatcgccaccaccggcgtgagcccggaactgatggttatcgccgttggctccggtagcgttatcttctctcacgttaacgatccgggattctggctgtttaaggaatatttcaacctgaccattggcgagactatcaagtcatggtcgatgctggaaaccatcatctcagtgtgcggtttgattggctgcctgctgttggggatggtggtataa

SEQ ID NO: 173408 - DNA, 576 bp, Klebsiella oxytoca
atgatccgtatttccgatgctgcacaagcgcactttgccaaactgctggcaaatcaggaagaagggacacaaattcgcgtatttgtgatcaatcccggcacccctaacgccgagtgcggcgtgtcctactgcccaccggatgcggtggaagattccgatactgcgctgaaatttgagcagctcaccgcctacgtcgatgagcttagcgcgccgtacctggaagacgctgaaatcgattttgttactgaccagctgggctcccagctgacgctgaaagcgcccaacgccaaaatgcgcaaagtttctgacgatgccccgctgatggagcgcgtcgagtatctgctgcagtcgcagattaacccgcagctggccggccacggcgggcgcgtcacgctgatggaaatcaccgatgatggcctggcgattctgcagtttggcggcggctgtaacggctgttcgatggtcgacgtaacgctgaaagaagggatcgagaaacagatgttgaacgagttcccggaactgaaaggcgtacgcgatctcaccgagcatcagcgcggcgagcactcttactactga

SEQ ID NO: 173409 - DNA, 675 bp, Klebsiella oxytoca
atgctaacagcacacagcttatgctggctatgccaaatgccgctggccatcgcccgctgggggatctgttcgcgatgcgcgtcggcgctgctggcctgcgaaccgctatgccctcagtgcggactgccggcccagtcaaacacgctgccctgcggacgctgcttgcaaaaaccgccgccgtggcagcggctggtaacggttaatgactatcgaccgccgctgagcggcctgattcaccagctgaaattcaataagcggcccgagctggcgcccgctctggcgcgtctgctgctgctgcgcatacgtcacagcccggaccttcctcatccggaccggataattagcgtgccgctctggcagcgccgccagtggaggagagggtttaatcagagcgacctgctgtgccgaccgctatcccgctggctgggctgcgcctggcgtagcgatgcgctgacccgcagacgccgcaccgccactcagcatcagctcagtgccagattgcgcaaacagaacctgaaaaacgccttccagcttgaattgtcgctacaggggcaccatatcgccattgtggatgatgtcgtcacaaccggaagcaccgtcgctgagatatcccgcctgcttttgcgaaacggcgccgcgacggttcaggtatggtgtatatgccgtaccttgtag

SEQ ID NO: 173410 - DNA, 783 bp, Klebsiella oxytoca
atgaacgcgatcgagtggcagaccatgggcgaaggaaattgtcatcttgtgctgctgcacggatgggggctgaatgcccaagtgtgggattgcatcacgccgcagctgcgctcgcattttacgctgcacctcgtcgatcttcctggctacggccgcagcggcggctttggcgctctgtcgctggaagagatggcgcagcgggtgctggagaaagcgccggagcgcgctatctggctaggctggagcctcggcgggctggtagcaagtcaggtagcattatcccatcccgatcgcgtgcaggcgctggttaccgtggcttcttccccctgttttagcgctcacgacagctggcctggcatcaagcccgaagtgctgagcggattccagcggcagctgagcgaagattttcaacgcaccgtcgaacgctttctggcgctgcaaaccatgggtaccgagagcgcacgccaggatgcgagaatgctgaaaagcgcggtgctgtcgctaccgatgccatcatcggaagtcttaaacggcgggctggagatcctcaaaaccgccgacttacgccagccgttatctaccctcaaaatgccgtttttgcgcctgtacggtcggctggatggcctggtaccgcgtaaaatcgtcccgattctcgacgccatgtggcccggcagcacgtcgttcgtctttgataaagccgcccatgcgccgttcatttcgcatccgcaggcgttttgcgctcaactggtcgaactgaagcgtgaggtcagtaaatatttttag

SEQ ID NO: 173411 - DNA, 270 bp, Klebsiella oxytoca
atgaaacttgttacaggaattgttgcatctctggtgattggctccctgtcctttggcgcgttcgccgccaaggagatccaaaaagacgaagtggctaagatgaacctgactaaaatcggttccattacgacctcaagaacaacctctccgatggatgcaaagcgcgatctgtcgaaaaaagcggatgagctgggcggcacttatttcgtggtaattgccggcgagaagaacgaaaaaacggttcacgctaacgcggacgtctacaagtaa

SEQ ID NO: 173412 - DNA, 237 bp, Klebsiella oxytoca
atggcgtcgttaattgaagttcgcgatatgctcgccctgcagggaaggatggaagcaaagcagatcagcgcccgcctgcgtgcgccgcagccgttaatcgacgccatgctgggccgcctggaagcaatgggtaaagcggtgaaaaccaccgaagatgccgatggctgcctctccggcagctgtaaaagctgcccggaaggcaaggcctgcctgcgggagtggtggtcgctgcgctga

SEQ ID NO: 173413 - DNA, 2319 bp, Klebsiella oxytoca
atgaaaaaattaacccttggtttaattggtaatcctaattccggtaagactaccctgtttaaccagctcaccggtgcgcgccagcgcgttggtaactgggcgggggtgaccgttgagcgtaaagaggggggcttcaacaccaccgatcatcaggtcacgctggtggatcttccgggcacctattcgctaaccactatctcctcacaaacctcgctggatgagcagattgcctgccactatattctcagcggcgacgccgacatgctgattaacgtggtcgatgcgtccaatctggaacgtaacctctatctgacgctgcagctgctggagctgggcatcccctgcgtcgtcgcgctgaacatgctcgatatcgcggaaaaacagaacatccgtatcgatgtcgacgcgctggccgcccgcctcgggtgcccggttattccgctggtttccacccgtggacgcggtattgaagccctgaaaatggcgatcgatcgccatcagcaaaatcagcctgtagaactggtgcactatccgcagccgctgctgcgcgaagcggacaagctggcgcaggtgatgtccggggagatcccgcagcgccagcgtcggtggctgggcttacagatgcttgaaggcgatatttacagccgcgcctacgccggtgatgccgcccataagctggacgtggccctggcgcacctgagcgaagagctggatgaccccgcgctgcatatcgccgatgcccgttaccaaagcattgctgctatttgcgatgcggtcagtaacacgcttaccgccgagcccagccgctttaccgcagcgatggataaagtcatcctcaaccgttttctcggactgccggtcttcctgttcgttatgtatctgatgttcttactggcgatcaatatcggcggcgcgttgcagcccattttcgacgccggttccgtggcgatctttatccacggcattcagtggattggctataccctgcatttcccggactggctgaccgttttcctcgcccaggggattggcggggggatcaataccgtgctgccgctggtgccgcaaatcggcatgatgtatctgttcctctccttccttgaagattccggctatatggcgcgggcggcgtttgtgatggaccgcctgatgcaggcgctggggttgccggggaaatccttcgtgccgttaatcgtgggttttggctgtaacgtcccttcggtgatgggcgcgcgtacgcttgatgcgccgcgcgagcgtctgatgaccattatgatggcgccgtttatgtcctgcggcgcgcggctggcgatttttgccgtctttgccgccgcctttttcggccagaatggcgcgctggcggtcttctcgctgtacgtgctgggtatcgtgatggcgattgccaccggtcttatgctgaagcataccattatgcgcggcgaagcttcgccgttcgtcatggagctgccggtgtaccacgttccgcacgtgaagagcctgattattcagacctggcagcgcctgaaaggtttcgtgctgcgcgcgggtaaagtgatcgttatcgttagtatcttcctcagcgcgctgaacagcttctcgctgagcggtaagatcgtcgataacatcaacgactcggcgctggcgtcggtcagccgggtgattaccccggtgtttaaaccgattggcgtacatgaggataactggcaggcgaccgtcggactgttcaccggcgcgatggccaaggaagtcgtggtagggacgctgaacaccctctacaccgccgaagatatccagaacgaagagttcaatccgcagacgtttagcctcggcgatgagctgctggctgccgtggacgagacctggcagagcctgaaagatacgttcagcctgagcgtgctggccaaccccatcgaagccagtaaaggcgacggcgaaatggaaaccggtgcgatgggcgtgatgggaagcaaattcggcagcgctgcggcggcgtatagctacctgattttcgtcctgctctatattccctgcatctcggttatgggggcgattgcccgcgagtcgagccgcggctggatgatgttctccgtcctgtgggggctgaatatcgcttattcgctctctacgctgtactaccagaccgtcagctttagccagcatccgcgctacagcctggtatgcattctggcggtggtgctgttcaatatcgtggtctttggcctgctgcgcagagcgcgtagccgggtggacgtttcgctgctggcgacgcgcaaaacgccgtcttcctgctgccagagtcctgctggcgattgccactaa

SEQ ID NO: 173414 - DNA, 228 bp, Klebsiella oxytoca
atgcaattcacacctgatagtgcgtggaaaatcattggtttctcccgcgatattagtccggcgtatcggcagaaactgctgtccctcggaatgctgccgggttcatcttttaatgtggttcgcgtggcgccgctcggcgaccctatccatattgaaacccgacgcgtgagcctggtattacgtaaaaaggatcttgcgttaattgagctggaagcggttgcacaataa

SEQ ID NO: 173415 - DNA, 2331 bp, Klebsiella oxytoca
atgatgaatgattcgctctgccgcattattgcgggtgaacttcaggccagggctgaacaggtagaagctgccgttcgcctgcttgatgaagggaataccgtgccgtttatcgcacgctatcgtaaagaagtcaccggcggtctggatgacacgcagctgcgtaatctggaaacccgcctgggttacctgcgagaactcgaagaccgtcgtcaggcgatcctgaagtccatcggcgagcagggcaagctgaccgaggcgctggaaaaagccatcaacgggacgctgagtaagaccgagctcgaagacctctatctgccgtacaagccgaagcgccgcactcgcgggcagatcgccattgaggccgggctggagccgctggccgagctgctgtggaacgagccctctcatgacccggaaaccgaagctgccaaatatatcgacgctgataaaggcatcgcggacagcaaagctgccctcgatggcgcgcgctatattctgatggagcgctttgctgaagatgcgggcctgctggcgaaagtgcgcgactatctgtggaaaaacgcccatctggtggccaccgtcgttagcggcaaagaagaggaaggtgcgaaattccgcgactacttcgatcaccatgaaccgatctccaccgtgccgtcgcaccgcgcgctggcgatgttccgcggccgtaacgaaggcgtgctgcagctctctttgaacgctgacccgcagttcgatgagccgccgaaagagagccacggcgagcagattattatcaaccatctcggcctgcgcctgaataacgctccggccgacggctggcgtaagggcgtggtgagctggacgtggcgtatcaaggtgttgatgcacctggaaaccgagctgatgggcaccgtgcgcgaacgcgcggaagacgaagccattaacgtctttgcccgcaacctgcacgacctgctgatggccgcgccggccggactacgcgccaccatggggctcgatcctggcctgcgcaccggcgtaaaagtcgccgtcgttgacggcaccggcaaactggtggctaccgataccatctacccgcataccggacaggccgccaaagcggcggtagcggttgccgcactgtgtgaaaagtacaacgttgagctggtagcgataggcaacggtaccgcctcgcgtgaaaccgagcgcttcttcctcgacgtccagaagcagttcccgaaagtgaccgcgcagaaggtcatcgtcagcgaagcgggcgcatccgtgtattccgcctccgagctggcggcgcaggagttcccggacctcgacgtttccctgcgcggcgcggtctctatcgcccgccggctccaggacccgttggccgaactggtgaagatcgacccgaaatccatcggcgtcggccagtatcagcatgacgtcagccagacccagctggcgcgtaagctggacgcggtggtggaagactgcgtgaacgccgttggcgtcgatctgaataccgcatccgttccgctgctcacccgcgttgccggcctgacccgcatgatggcgcagaatatcgtctcctggcgcgatgagaacggtcagttccagaaccgccagcagcttctgaaggttagccgtctggggccgaaggcctttgaacagtgcgcgggcttcctgcgtatcaaccatggcgataacccgctggatgcctcaaccgtgcacccggaagcgtacccggtggtggagcgcattctggcggcgactcagcaggcgctgaaagatttgatgggcaacagcagcgagctacgtcatctgaaagccgttgattttactgatgagaaattcggcgtgccgacggtcaccgacatcatcaaagagctggaaaaaccgggccgcgacccgcgcccggagtttaaaaccgcccagtttgccgatggcgtagaaacgatgaacgatctgctgccggggatgatcctcgaaggcgcggtgaccaacgtcaccaacttcggcgcgtttgttgatatcggcgttcaccaggacggcctggtgcatatctcttccctttcgaacaagttcgttgaagacccgcatacggtggtgaaagcgggggatatcgtgaaggtcaaagtgatggaagttgatctgccgcgcaagcgtatcgcgctgacgatgcgtctggatgaacagcccggcgacagcaacgcgcgccgcggcggtgggaacgatcgccctcatggcaaccgcccggcggcgaaggctgctaaacctcgcggtcgtgagacgcagcctgcgggcaacagcgcgatgatggacgcgctggcggcggcgatgggtaaaaaacgctaa

SEQ ID NO: 173416 - DNA, 480 bp, Klebsiella oxytoca
atgaaaacgccgctgatcacccgtgaagggtatgaaaaactgaagaaagagatggataccctgtggcgcgaagaacgtccggaagtcactaaaaaagtgacctgggcggcgagccttggcgaccgcagtgaaaacgccgactatcagtacaataaaaagcgcctgcgtgaaatcgaccgccgggtgcgctatctgaccaaatgcctcgaacagctgaaaatcgtcgattattcgccgcagcaggaaggaaaggtctttttcggcgcctgggtagagattgaaaacgatgcgggcgagacgaagcgctttcggattgtcggctacgatgaaatctttggccgcaatgactacatctccattgattcgccaatggcgcgcgcgctgctgaaaaaagaggtcggcgatttagctatcgttaacacgcccgcgggcgaggctgcctggtacgtgaacgaaattgaatacgtcaaagctaaatag

SEQ ID NO: 173417 - DNA, 123 bp, Klebsiella oxytoca
atgcgtcttatgcttaaatgtatacttaagctgctgttaaatatgctttgtaacaatttagcctggaatatataccagatttcgctggtgggcgacccgggcttttttgagaatacgtactga

SEQ ID NO: 173418 - DNA, 720 bp, Klebsiella oxytoca
atgcaagagaattataagattctggttgtcgatgacgacatgcgcctgcgtgcgctactcgaacgttatctgaccgagcagggcttccaggttcgtagcgtggcgaacgctgaacagatggatcgcctgctgacccgtgaatccttccacctgatggtgctggatcttatgctgccgggcgaagatggcttgtccatttgccgccgcctgcgcagtcagagcaacccgatgccgatcatcatggtcacggcgaaaggggaagaagttgaccgaatcgtgggcctggaaatcggcgccgacgactatatcccaaaaccgttcaacccgcgcgagctgctggcccgtatccgcgccgtgcttcgccgtcaggccaacgaactgccgggcgcgccctcgcaggaagaggcggttatcgcctttggtaaattcaagctgaacctcggcacccgcgaaatgttccgtgaagatgaacccatgccgctgaccagcggtgaattcgcggtgctaaaagcgctggtgagccatccgcgcgaaccgctgtcccgcgataagctgatgaacctcgcccgcggccgtgagtattcagccatggagcgttccatcgacgtacaaatctcacgcctgcgccgcatggtggaagaagatccggcgcatcctcgctatatccagaccgtatggggcctgggctacgttttcgtcccggacggctctaaggcatga

SEQ ID NO: 173419 - DNA, 1362 bp, Klebsiella oxytoca
atgaaacgcgtgcgcttttcgccgcgaagctcgtttgcccgtaccctgctactgatcgtcaccctgctgttcgccagcctggtgacgacctatttagtggtgctgaatttcgcgatcctgcccagtctccagcagtttaataaggttctggcctacgaagtgcgtatgctgatgaccgataaactgcagctggaagacggcacccagctggtggttccgccggcgtttcgccgcgaaatttaccgcgagctgggcatttcgctctattccaacgaagcggcggaagacgcaggcctgcgctgggcgcagcattatgaattcttaagccagcagatggcgcaccagctcggcgggccgaccgaagtgcgggttgaggtcaacaaaagctcccccgtggtgtggctgaaaacctggctttcccccaatatctgggtgcgcgtaccgctgaccgaaatccaccagggcgacttctcgccgctgttccgctacaccctggcgatcatgctgctggcgattggcggcgcctggctctttattcgtatacagaaccgaccgctggtcgatctggagcacgctgcgctgcaggtcgggcgtgggattatccctccgccgctgcgcgaatacggtgcatcagaggtgcgttcggtgacacgtgcctttaaccatatggccgcaggcgttaagcaactggcggacgaccgtacgctgctgatggccggggtgagccacgatttacggactccgctcacgcgtatccgtctggcgacggaaatgatgggcgaagaggacggctacctcgccgagtcgattaataaagatatcgaagagtgcaacgccattatcgagcagtttatcgactatctgcgcaccggtcaggagatgccggtggagctggtggacctgaatgcggtgctgggcgaagtgattgcggcggagagcggctatgagcgggaaatcgctaccgatctgcagccgggagagatcccgctgcgcgtgcatccgctctccatcaagcgcgcgctggcgaatatggtggtcaacgccgcccgctacggcaacggctggatcaaggtcagcagcggcagcgaaggtaaccgggcctggttccaggtcgaagacgatggaccgggaatcaagccggagcagcgcgaacatctgttccagcctttcgttcgcggtgacagcgcccgaacgattagcggaaccggccttgggctggctatcgttcagcgcatcatcgataaccataacggcaagctggaacttggctccagcgaacgcggcggattattaattcgcgcctggctgccggtgccgatgcatcgcgccctgccggcggtaaaacccacaaaagagagctaa

SEQ ID NO: 173420 - DNA, 843 bp, Klebsiella oxytoca
atgctcagttatcgccacagctttcacgcaggcaaccacgccgacgttctaaaacacaccgttcagagcctgatcattgaatcgctcaaagagaaagaaaaaccgtttctctatctggacacccacgccggcgctggccgctatcagctgagcagcgaacatgccgagcgcaccggtgagtatcttgaaggtatcgcccgcatctggcagcaggatgacctgcccgccgagctggagccgtatatctccgtggtccagcacttcaaccgtagcggccagctgcgctactaccccggctctccgctgattgcccgccaactgctgcgcgagcaggatagcctgcagatgacagaactgcatcccagcgattttccgctgctgcgcgcggagttccagaaagacgaccgcgcccgggttgaaaaaaccgatggctatcagcagctgaagtctaagctgccgccggtatctcgtcgtggcctggtgctaatcgacccgccttatgaaatcaaaagtgactaccaggcggtggtcaccggaattcatgaaggctacaaacgctttgctaccggcacctacgcgctgtggtatccggtcgtattgcgtgcgcagattaagcgcatgatcaaagagttagaggccaccggcattcgcaaaattctgcaaatcgagctggcggtgcgtccggatagcgaccagcgcgggatgaccgcctccgggatgatcgtcatcaacccgccgtggaagctggagcagcagatgaacaacgttctgccctggctacataaaaagctggtgccgaccggtatcggccatgccaccgtcagctggatcgtgcctgagtaa

SEQ ID NO: 173421 - DNA, 1353 bp, Klebsiella oxytoca
atgagcaagcattatgactatatcgccattggcggcggcagcggcggtatcgcctccattaaccgtgccgctatgtacggccaaaagtgtgcgctgattgaagccaaagacctgggcggcacctgcgtgaacgtcggctgcgtaccgaagaaagtgatgtggcatgcggcgcagatccgtgaagccatccatctgtatggcccggattacggttttgataccacaattaatcacttcgactgggataagctggtcgccagccgtagcgcctatatcgatcgtatccacacctcttacgataacgtgctgggcaaaaacaaggtcgatgtcattaaaggcttcgcccgttttgtcgatgcgaaaaccgtcgaagttaacggcgagacgataaccgccgaccatattctgatcgccaccggcggccgtccgagccatccgagcattcccggcgtcgagtacggtattgattccgatggtttcttcgaactgccggcgctgccgaagcgcgttgcggtagtcggcgcgggctatatcgccgttgagctggcgggcgtgattaacggactgggcgcggagacccatctgttcgtgcgtaaacacgcgccgctgcgtagcttcgatccgctgatcgttgaaacgctggttgaggtgatgaacgccgaaggcccacagctgcatacccatgccattccgaaagcggtagtgaagaacgccgacggcagcctgaccctggagctggaagatggccgcagccagaccgtggactgcctgatttgggcgatcggtcgcgaaccggcaaccgataacttcaatcttgctgctaccggagtggaaaccaccgataaaggctatatcgtcgtcgataaattccagaataccaacgttccgggtatttacgccgtcggcgataataccggtgccgtcgagctgactccggtcgccgttgccgccggccgccgtctctccgagcgtctgtttaacaacaagccggacgaacatctggactacagcaacatcccgaccgtggtattcagccatccgccaatcggtaccgtcggtttaaccgagccgcaggcgcgcgagcagtacggcgatgaggcggtaaaagtgtataaatcctctttcaccgccatgtataccgccgtcacttcacaccgccagccgtgccgcatgaagctggtctgcgtcggcccggaagagaaaattgtcggcattcacggtatcggcttcggtatggatgaaatgctgcagggcttcgcggtggcgctgaagatgggcgcaaccaagaaagacttcgacaataccgtggcgatccacccaaccgcagcggaagagtttgtgacgatgcggtaa

SEQ ID NO: 173422 - DNA, 624 bp, Klebsiella oxytoca
atgataaaaatactgggcaaacgctcatcaattaacgtgcgtaaggtactgtggacctgtgaagaagcgggaatagcatatcagcaggaggattacggtagcgggttccagtccatcgagaccccggcgtttcgcgcccttaatccgaatagcctggtcccggtgctgctggatggcgattttgtgctgtgggagtcaaacagcatctgccgctatctggcgcgcaaagccgggcgggaagacctgctccccacggcgccgcaggctgccgccgaggttgagcgctggatggactggcaggcaacggaattcaatactgcctggcgctacgcctttatgggactggtgcgcaaggacccgcgttttcaggaaccgacggctatcaaagagagcattgtcgcctggacccgctgcgtgcagatcctcaatgcgcagcttcagcaaaccggggcatgggttgccggcagccagtttacgctcgcggatatcgtcctgggactgtcggtgcatcgctggaaaatgacgccgttcgcgcatccggaaatggccgaagtggagcgctggtatatggcgctgaatcagcgcccggcgtttaagcgccacggcaataacggcgtggcgtaa

SEQ ID NO: 173423 - DNA, 1149 bp, Klebsiella oxytoca
atgttgacctcttttaacgttttaactccgggcaatatccgctttgggcgcggccttgctctaagcgcggccccctggctcgccgggcgctcgacaaagattctgctgattcacggcgccaccccgcagcgcgcggagtgcttgctaagcgaactccacgcgcttcggctgcacgtcaccacactctctatcgcccatgaaccctgcctgcaggatattgaacggggcgtgagtctggcacgggaaaaaggcgtcggcgccatcgtcagcctcggcggcggcgcggtcattgatgcgggcaaagccattgcggcgctggttcccgcgcaggggcccgcgatcgaatacctggaagtggtgggtagcggccgcatattagaggccaatccgctgccgttcgtcgccattcccacgacggccggtaccggcgcggaagtcacaaagaacgcggtgattaacgtccccgagcagcagcgcaaggtcagcctgcgtgacgaccgcatgctgccggacctggcgattatcgacccgtccctcaccgacagcgcgccgcgcgcggtgaccttagcctccggtctcgacgctatcacccaggtgattgagccctggctgtgcacccgcgcgaatccttttaccgacgcactctgtcgggaggcgatcccgcgcggtatgaaagcgctcagaacgctgatggaacatgagtgtccggatagccgcgatgagatggcgtgggtcagcctgtgcggcggactggcgttagccaatgccggactcggcgtggttcacggcctggcaggcccgctgggaggcctgagcaacgctgcccacggcgcactttgcggtagtctgctccccttcggcctggcgctcaacgaagcacaaattagcgacgcacgcctccgccagcgttttgcggatgtacgccagtggctggccgctggactggattccgatcctgacagcgcatgggagagcctgcgcgaatggagccagcgcgccggtctgggtaatctgcgcgatctcggcgtcccccgcgaagcgctggagcctgcggccctcgccgccagcagctcctcatccatgaaggctaacccggtcacgttgaccagcgagcaactgctggagctgctggaagccgcgtgggagtaa

SEQ ID NO: 173424 - DNA, 1653 bp, Klebsiella oxytoca
atgttcagccagaaattacgcaacgttgatgacgatgagctcaggatcgacaccgatccgtgctacgaagccgatccgtatgagttaaagctggatgaaatgttcgacgccgaacctgaaccggagatcattgaagggctgcccgcctcggatgccctcacccctgccgatcgttatctggagctgttcgcccacgtccagaaatcgcgaattttcgccgatagtaaaaccttcccggactgcgcgccgaagcaggatccgctggatatcttgattcactatcgtcgcatcaggcgcacccccggattcgatttacgccagtttgtggaagatcatttctggctgccggaaagccgcgccgaggactacgtctccgatcccacgcgatcccttaaggagcatattgataatctgtggccaatcctcacccgcgagccgcaggatcatattccgtggtcgtcgctgctggcgctgccgcagtcatatattgttcccggcgggcgctttagcgaaacctactactgggattcctacttcactatgctggggctggcggaaagcggccgcgaagacctgctgaaatgcatggccgataatttcgcgtggatgatcgaaatctatggccatattcctaacggcaaccgcacctactatctcagccgctcgcagccgccggtctttgccctgatggtcgaactgtttgaagaagatggcgtccgcggcgctaaacggtaccttgaccacctgcaaatggagtacagcttctggatggacggcgcggaatcgctgatccccaatcaggcgtatcgtcacgtggtgcgtatgccggacggctctttgctgaaccgctactgggacgatcgcgacacgccgcgcgatgagtcgtggcgggaagatgttgaaacggcgaagcgctccgggcgcccgccgaatgaagtttatcgcgacctgcgcgcgggggcggagtccggctgggattactccagccgctggctgcgcgatatcacccgactggcgagcatccgcactacccagtttatccccattgatctgaacgccttgctgttcaagctggagaataccatcgccaacctctccggcctgaagggcgaccgggaaaccgaggccgctttccgccagaaggccagcgaccgtcgggcggcggtgacccgctatctgtgggatgacgaaagcggttgtttccgcgattatgactggcgccgcgagcagctggcgctgttttccgccgccagcatcgtcgcgctctatgtcggtatggcgacccacgatcaggccgacaggcttgccgatgcggtacgcgcccgcctgcttacccccggcggtattatggcgaccgaatatcaaagcggtgaacagtgggataagcccaacggctgggcgccgctgcagtggatggcggtacagggttttaaaatgtacggtcaggatccgctcggcgatgagatagcccacagctggctgcaaacggtgaatcatttctataaacagcactttaagctgattgaaaagtaccacatcgccagcgccactccccacgaaggcggagggggtgagtacccgcttcaggacggcttcggctggaccaatggcgtggtgcgccggcttattggtctgtacggcgaaccgttgtaa

SEQ ID NO: 173425 - DNA, 549 bp, Klebsiella oxytoca
atgccagaactgatgaccccacgtctgcgctgttccccgctgcagcttgacgactggccttttttcctcgccctccagcaggatccccaggtgatgctttacgtcgcggatcctcgcccggtcgccgacattcgtgaggcttttgattcgcggcttcccttatggtccccgggcgcggcccactggttgtgtctggtggtgcgcgatcgcttcacccacgctccccttggcctcaccggctaccagcatctcgctggcgatagtgctgaagtgggttttctgttcgctccccacgcgcaggggaagggatacgccagtgaatcgctgcgcgcgctgtgcgagtacgcgttgactacgggcggtatccggcggctgacggcgaccgtcaccgcgggcaatctggcgtcaaaaaatctgctgctaaaggttggttttcatcaggaaggcgagctgcgtgaatgctactggctcaacggtcgctggcacaacgattggcttttcggcctgctgcgccgcgagcataaccagcctgggccatctggcgaatag

SEQ ID NO: 173426 - DNA, 429 bp, Klebsiella oxytoca
atgtcccccataacaccgtcgctaagcccgcagggcctggactttattaaacgaactcagggattagcactcgccccctatcgggacgagagcggcctgcgcgtgattggctatggccacgttctcaacgattatgaaacgttcaaccacttcacgcgcgagatcgcggagaccttgcttaccgtcgacctggtgcaatgccagcgccagcttaagcgcaacctgcgggtgaggcttaacccatcgcagtatgatgcgctggtctctttagcctttagctgcggcccggcgtctccggagcttgatattgttttaactcaccttaaccatcagcggttcgctgaggcgctgaccgcctgggaaaatattcgcagcggccacgaacagcggcgtgaagagtgcgcaagattcaaggcgacaaccgattaa

SEQ ID NO: 173427 - DNA, 609 bp, Klebsiella oxytoca
atgcaggtaatcatgtttgacaggcagtcgatatttattcacggaatgaaaattggcctccagcaacacattcctgaacttgatatttttggcacctgtcaggcggatcagctctggcagaagctaacggcgaatcctgaagcactgctcattctggatggcgatatgcacagcgagttttgctgctggctactgcaggaaaagcagctccgcttcccggcgactcaggtgctgctgatcgtgtccgacgataataaaagctggctacagcgcgcgctttcctggaatgtgcgcgggatcattcaacgcagggaaagcctgcaaacattcgcccaggcgatcaacagcatcatgcatggcctgctctgtttgccgggcgattggctaatgacggcggaagcgcgggataataaattggttcatttaagccagcgtcagcgcgagattttacagctgctggcggcgggagattccaataaagagattagccgcgccttaaatattagcgcgggcacggtcaaggcgcatctggagtcgctgtatcgccgactggatgtgaagaatcgtacccaggcggcgatggtgtttaatggcgtcagcgaaacttaa

SEQ ID NO: 173428 - DNA, 759 bp, Klebsiella oxytoca
atgacacaacgtatcgctttggtgaccggcggcagccgcgggctggggaaaaacgccgccctgaagctggcggagaagggaaccgatattattctgacctggcatagcaacccgcaggcggcgcttgacgtggtagctgaaattgagaaaaaaggcgtaaaagccgcagcattaccgttaaacgtcggcgatatcaccagttttgatggttttgcacacaaggttggggaagtgcttcaacaacgctggcagcgggagacattcgactatttattaaacaatgccggtattggcctgaacgtcgcttttgccgaaaccagcgaagcgcagtttgatgaattaatgaacatccagtttaagggaccgttcttccttactcagcgtctgttaccgctattgcaggacgggggacgcatcctcaacgtttccagcggactggcgcgttttgctctgccgggttatgcggcctatgccgcgatgaaaggcgcgatggaggtactgacgcgctatcaggcgaaggagcttggggaacgcggaatttcggtcaatatcattgctcctggcgccattgaaaccgattttggcggcggcgtggtacgcgataacccgcaggtgaatcagcatatcgccgggcaaacggcgctgggaagagtggggcagccggatgatattggtgatgctatcgccgcgctactcagcgacgatctgcgctggatgaacgcccagcgcgttgaggtctctggcggaatgtttttgtaa

SEQ ID NO: 173429 - DNA, 909 bp, Klebsiella oxytoca
atggataaaattcacgcaatgcagctgttcatcagagtagcggagctggagagtttttcccgcgctgcggatacgcttggcctgcctaaagggagcgtttcgcgccagattcaggcactggaaaaccatcttggcgttcgtctgctgcatcgcaccacccgccgggtgcagctgactcaggatggtatggtctactacgaacgcgccagagacctgctcagcaatctcgatgagctggacgggatgtttcagctcgatccctccagcattagcggacgcctgcgggtcgatatgccggtcgccgtggcgaaaaaactggttattccgcaactgccggcatttctgcagcagtatcccggcatcgaactggagctcagcagcagcgacaggttggttgacgtaatccgcgagggttttgattgtgtgattcgcgtcggtacgctgaaagattccgggctgattgcgcgaccgctgggcaagctcacgcaaatcaactgcgccagtcctcaatatctcacccgctttggctacccgcagtcgctggacgatctcgccgatcatgcgctgatccactacgccagcaatctgggcgtgcgcccgctgggcttcgaagtggttagcgatggcgccgtccgctgggtcaaaaccggtggcgttctgacggttaacagcaccgaaacttatcaagcctcgtgcctggcggggctggggattattcaggtaccccgggtgggcgttcgtgaaatgctgcgcaccggggagctgatagaaattctgccccactaccgcgccgagccgctgccggtttcgctcatttatccgcaccggcgcaacctttcacgtcgggtacatctgtttatggagtggctgggcgggctcatgaaaagctatgttgatgagtccgcatga

SEQ ID NO: 173430 - DNA, 1032 bp, Klebsiella oxytoca
atgacgccggaaaacgacgcccaacgaccagcccaggatccggaccagcagccggatgaaaataaaagcgccctggctgcgataaatgactccaccgtggcgaaaaaagccaaccaggcgctaaaaagcgtcaccggaacggcggaaaaagtccagcgtaaccccattattgcgcacctcatccgcgccgcagagcgtttcaacgacaggctgggcaatcagtttggcgcggcgatcacctacttctcatttttatcgatgatcccgattctgatggtctcttttgcggcagccggttttgttctggcctcgcatcctacgctgctacaggacatcttcgataaaatcctgcttaacgtcagcgacccgacgctcgcggcaacgctgaaaaataccatcaataccgccgtacagcagcgcaccaccgtcggcatcgtcggtctgctggtggcgctctattccggcattaactggatgggcaacctgcgtgaggcgattcgcgcccagtcccgcgacgtctgggagcgtacgccgcaggatcaggaaaaaatttgggtgaagtactttcgcgactttatctcgctaatcggcctgctggtggcgctggtgatcaccttgtcaatcacctccatcgccgggtcggctcagcagatgattatctcggcgctctatctggactacatcgagtggctgaaaccggcgtggcggcttattggcctggccatttccatcttcgccaactatctgctctttttctggattttctggcgactcccgcgccaccgcccgcgccgtagggcgctgattcgcggcaccctgattgcggcggtcggctttgagataatcaagatcgtcatgacctggacgctaccgtcgctggtcaagtcgccgtccggggcggcattcggctcggtgctgggaatcatggccttcttctatttcttcgcccgcctgacgcttttctgcgccgcgtggattgcgaccgccgagtataaagacgaccgccggatgccgggcaaagcccacgactaa

SEQ ID NO: 173431 - DNA, 1323 bp, Klebsiella oxytoca
atgcaagccacagccacaacactcgacaatgctcaggaaaccgttccggttaactcacgcaacaaggtcgtcgtcgcttcgctcattggcaccgccatcgagttcttcgacttctatatctatgccaccgcggcggtcattgtatttccgcatattttcttcccgcagggcgatcccgccgccgcgacgctacaatcgctggcgaccttcgccatcgcgtttattgcccgccctatcggttctgcggtattcggccatttcggcgaccgcgtaggccgtaaagcgaccctcgtggcctcgctgctgacgatggggatctcaaccgtagttatcggcctgctgcccggctatgaaaccattggcattatggcgccggtgctgctggcgctggcccgctttggccaggggctgggccttggcggcgaatggggcggcgcggcgctgctggcgacggaaaacgccccgccgcgcaagcgcgcgctgtatggctcattcccgcagctgggcgcgcctatcggcttcttcttcgctaacggcaccttcctgctgctctcctggctgctgaccgaccagcagtttatggaatggggctggcgtatgccgtttatcttctccgccgtgctggtcattatcggcctgtacgtccgcgtttcgctgcacgagtcaccggtgttcgcaaaggtagccgccgcgaagaaacaggtcaaaatcccgctgggcaccctgctgaccaaacacgtacgcgtcaccgttctcggcacctttatcatgctggcgacctacacgctgttttacatcatgaccgtctactccatgaccttcagtaccgccgccgcgccgattggtctcggcttgccgcgcaacgaagtgctgtggatgctgatgatggcggtcattggttttggcgtgatggtgccggtggcgggcctgctggcggatgcctttggccgtcgtaagagcatggtcgtgatcacgactctcatcatcctcttcgcgctgtttgcctttaaaccgctgctcggctccggcaacccgctgctggtctttgccttcctgctgattggcctgagcctgatggggctgacctttggccctatgggcgcgctgctgccggagctattcccgaccgaagttcgctacaccggcgcctcgttctcctacaacgtctcgtcgatcctcggggcatccgtagcgccgtatatcgccgcatggctgcagggcaactacggtctgcccgcggttgggctctacctcgccgccatggcggcgctgacgatgatcgcgctgctgctgactcacgaaacgcgtcatcaatcgctgtaa

SEQ ID NO: 173432 - DNA, 2052 bp, Klebsiella oxytoca
atgaccagaacccgtaaaaccgtggctattatcctcggaacgatagtcgtactgatcgttctgttttttattgtggtggcgacctttgactggaatcgcttgaagccgacgattaatcagaaagtgtcggccgagctgaaccgcccgtttgcgattcgcggcgatctgggcgtcgtgtgggagcgccagcccggcgaaagaggctggcgaagctggataccctggccgcacgtgcatgccgaagatattatcctcggcaacccgcctgacatcccgcaggtcaccatggttcacctgccgcgcgttgaggcgaccctcgccccgctggcgctgctcagtaaaacggtctatctaccgtggattaagcttgaacagccggacgcgcgattgattcgactgtcggagaagagcaacaactggactttcgacctggcttcggcgggggcggctgagaaagatgcggcgccttccagctggtctttccgactcgacaatattcttttcgatcgcggcaagattgctatcgatgacaaggtatcgcgcgccgacgtgacgatcgtggttgatccgctcggtaagccgctggcgtttagtgaagtgaccggcgaaaaagggaaaggagcgccgcagaaagtgggcgattacgtcttcggcctgcaggcgaaagggagctacaacgggcagccgctctccggtaacggcaaaatcggcggcatgctggcgctgcgcagcgaagggacaccgttcccgctgcagggggattttcgttccggcaatacccgggtcgcttttaccggcacggtcagcgatccgctcaatctcggcggcgtcgatctgcgcctcaagttttccggtgattcgctgggcgatctctacgatctgaccggcgtattgctgccggatacgccgactttctctaccgacggccatctgcgcgccacctttaaggagaaaaacggttcacgcttcgcctatcaggatttcaatggccgtattggcgagagtgatatccacgggtcgctgacctacaccaccggtaaaccccggcctaagctggagggcgatctggagtccaggcagctacggctggcggatctggggccgctgattggcgtcgattccggcggtaaaggcagccagactgaacggcgtaaaggtgaagcttctccgcagccagccggaaaagtgttgccgtatgaccgctttgaaaccgacaagtggcaggtaatggatgccgatgtgcgcttcaaaggacggcggattgagcacggcagcacgctacccatcagcgacctttctacgcacatcatcctgcagcgaggcgacctgcgcctgcagccgctgcgtctggggctggctaacggtaccctcgccggcagcattcatcttgaaggggataaaaaaccgctgcaggggacggccaacctacaggcgcgccgcctgaagctcaaagcgctgatgccaaacgtggagatgatgcagaaaacgctcggcgaaatgaacggcgatgttcagcttcgcggcaccggtaactccgtcgccgcgctgctgggcaacagtaacggtaacctgaagctgctgatgaacgacgggctgattagccgtaacctgatggagatcctcggcctgaacgtcggtaactttattatcggccagatctttggcgatgatgaggtgcgggtgaactgcgcggcggcgaatatcgacgtggtcaacggcgtcgcccggccgcaggtgttcgcgtttgataccgaaaacgcgctgatcaacgtgaccgggaccgccagctttgcgtcggagcagctggacctcactatcgatccggagagtaagggctttcgtattatcaccctgcgctccccgctgtacgttcgcggcagctttaagtcgccgaatgcgggcgtgaaggcggggccgctgattgcccgcggcgcggtagcggcagcgctggcgacgctggtgacgccggcagcagcgctgctggcgctgatatcacctgccgaaggcgaggcgaaccagtgtcgggcaatcttgtcgcagatgaaaaaatag

SEQ ID NO: 173433 - DNA, 930 bp, Klebsiella oxytoca
atgtctaagaaaattgccgtcattggcgaatgcatgattgagctgtcagagaaaggcgcggcggtaaatcgcggctttggcggcgacaccttaaacacttccgtctacattgcccgccagaccgacgccagcgagctgggcgtacactatgttaccgccctgggcacggacaccttcagccagcagatgctcgaatcctggcagagtgagaatgtccagacggaccttattcagcgcatggccgaccgtttaccgggcctctactacatcgaaactgacgataccggcgagcgtacgttttactactggcgtaatgaagccgcagcgaagttctggctggagagcgagcagtctgcggccatctgcgaagagctggcgacctatgattatctttacctcagcggcatcagcctggcgatcctgagcccgacaagccgcgagaagctgctgaccctgctgcgggaatgccgggcaaacggcggtaaagttatctttgataacaactatcgtccgcgcctgtggagcagtaaagaagagacgcagcaggtttatcagcagatgctggcctgcaccgacattgcgttcctgacccttgatgacgaagacgcgctgtggggcgagaagccagtggcagaggtgattgcccgcactcacgccgctggcgttgaagaagtggtggtgaagcgcggcgccgactcctgcctggtagcgattgccggacagccgcagctggaagtcccggccgttaagctggcaaaagagaaagtcgttgataccacggcagcgggcgattcattcagcgccggctatctggccgtgcgcctgaccggcggcgatgccgaatcggcggcaaaacgcggccacctgaccgccagcacggtgattcagtatcgcggtgcgattatcccgcgcgaagcgatgccgcagtaa

SEQ ID NO: 173434 - DNA, 1506 bp, Klebsiella oxytoca
atgcagggcacaaaaattcgactcttaaccggtggtttgctgatgttggcgacggtcggttatgtgcaggcagaagcgctccagccggacccggcctggcaacagggcacactggcaaacgggtttcagtggcaggttttagccaccccgcagcgtcccagcgatcgtatcgaagttcgcctgtccgtgaatattggctcgctgagcgaaagcactcagcagagcggctttagccactttatcccgcgcctcgcgctgacgcaaaacggtggcctcccgaccatgcaggcccgttcgctatggcagcagagtattgacccgaaacgtcctctgccgcccgccatcgtctcttatgactacagtttgtttaacctgagcttaccgaataaccgtaacgacctgctgaaagaggcgctgagctggctggcgagcgccagcggtaaaatgtcgatcactccggaagcggtcaaccatgcgctgcagggcgaagatatggtggtcacctggcctgcggatactaaagagggctggtggcgttatcggctgaaaggctccaccatgctggggcatgatccggcggcgccgctgaagcagccggtggatattgctcagcttaaagactattaccacaagtggtacacgccggatgccatgaccctgattgtggtcggcaacgtcgatagccgcagcgtcgcggagcaaattaacaaaactttcggcggcctgaagggcaagcgcgaaacgccggtggcggttcctaccctgtcgccgctgccgacgacgccggtcagcatcatgaccgatgcagtgcgccaggataagctgtcgctgatgtgggatgcgccgtggcagccgattcgtgactcggtcgcgctgcagcgctactggcgagatgacctcgccagagaagcgctgttctggcacgttcagcagaatctgagcaaaagtaacatcaaggatatcggcctgggctttgactgccgcgtgctttaccagcgcgcccagtgcgcgatcaatatcgaatcgccgggcgagcggctgaacgccaacttaacgaccgtggcgcgcgagctggcgaaagtgcgcgataacggtctgccgcaggatgagtttgatgccctgattgcgcagaaaaaccttgaactgcagaagctgtttgccacctatgcccgtacggatacctatcttctgattagccagcggatgcgttcgttgcaaaatcaggtggtggatatcgctcccgagcagtatcagaagctgcgtcaggagttcctcaattcgctgacggttgacatgctgaatcagtacctgcgtcagcagctttcgcaggatatggcgctggtgttgcagcagccgcagggcgaaccggagtacaacatgaaggacctgcaggcgacgtgggaaaagctgatggcgccagcgccagcggccgccgcggcgtcgaacagcgccggtgatgttgcgcaaggacgtagcgaagcgacggatatcccgcctgcgcagtaa

SEQ ID NO: 173435 - DNA, 1287 bp, Klebsiella oxytoca
atgaaaatctctttctttaaaagcctctatgtccaggttttatcggccatagcgatcggtattctgctgggccatttttacccggagctgggtgcgcagatgaaacccctcggcgatgccttcgttaagctgattaaaatgattattgccccggttatcttctgtaccgttgtgacggggattgccgggatggagagcatgaaggccgtcggccgcaccggggcggtggcgctgctctattttgaagtcgtgagcaccatcgcgctgatcatcggtctgatcattgttaacgtggtgcagcccggcgcgggtatgaacgttgacccggccacccttgatgcgaaggccgtggcggtttatgccgaacaggcgaaagatcagggtatcgtggcgttcctgctcgatattatccccggcagcgtgattggcgcgttcgcgagtggcaacattctgcaggtgctgatgtttgccgtgctgttcggttttgcgctgcatcgtctgggcagcaaaggccagctgatttttaacgttatcgaaagcttctcgcaggttatattcggcatcatcaatatgatcatgcgcctggcgccgattggcgcattcggcgccatggcctttactatcgggaaatacggcgtcggtacgctggtgcagcttggtcagctgatcgtctgcttctacatcacctgtatcctgtttgtcgtggtggtactgggctcgatcgccaaagccaccggcttcagcatctttaagttcatccgctatatccgcgaagagctgctgatcgtcctgggaacctcttcgtccgagtcggcgctgccgcggatgcttgataagatggagaagctgggctgccgtaaatcggtggtggggctggtgatcccgacggggtactcctttaacctcgatggcacctcaatatacctgacgatggcggctgtgtttatcgctcaggcgacaaacagccatatggatattttccatcagattaccctgctggtggtgctgctgctctcctcgaaaggcgcggcgggcgtgacgggcagcggctttatcgtcctggcggcgaccatctccgccgtcggtcatttgccggtcgctggcctggcgttaatccttggcattgaccgctttatgtccgaggcgcgcgcgctgaccaacctggtgggtaacggcgtagcgactattgtggtcgcgaaatgggttaaagagctggactcacagcagctcgataatgtgctgaataaccgtacgccggtagacaaatcgcacgaattatcctcataa

SEQ ID NO: 173436 - DNA, 2052 bp, Klebsiella oxytoca
atggatctaaaccgggtatgcgttcagtttcagtggagaaccccgttgcgcgtcagccgttcacttacaattaaacagatggcaatggtcgcgagcgtgtccatggcgtttgtactcgtcttctgttctattttgctgttccattttgttcagcagagtcgctataccacggccacgcagttagagagcattgcgcgttccgtccgcgaaccgctgtcagcggctattctgaaagccgatatcccggaggcggaagctattctgagccgcattcagcctgctggcatcgtcagccgggcggatgttgtcctgcctaatcagttccaggcgctgcggatgcgctttatccccgagcgtccggtgccggtaaccatcacccgcatgtttgaactgccggtacagatttcgctgcctatctactcccttgagcggcccgctaacccacagccgctggcctatctggtgctgcaggccgattcatatcgcatgtataaattcgtgatgagcgccctggcaacattagtgactgcttacttacttttggtgctgatgctgacggtagccattacctggtgcatcaaccgtctgatggtacgaccgctgcgtaaaatcgcccgcgagctgaatgatgtcccacagcaggagcgtcttggccatcagctttctataccgcgcttacatcatgacgatgaaatcggcatgctggtgcgcagctataaccgtaaccagcagactctgctgcgcctgcacgatgaactctctttgcaatcgacccgtttcccggtatccgagctgccaaataaagcctttttgatggcgatgctggagcaaaccgtcgcccgtgggcaggcgtctgcgctgctgattgtcgcctgcgaaacgctgcaggataccgctggcgtactcaaagagacgcagcgcgaaatgctgctgttgacgctcgttgaaaaactgcgggcggttatcccgacgcagatggtcctggcccaggtgagcggctacgactttgcgattctggcccacggaattaccgagccctggcaggcggtgacgttaagtaagcaagtacttactgtcttaagcgaacgtttacccctgcacggcatccagctgcgcccctgcgccagcgtcggcattgcgatgtttaacggcgaaattaacggcgaacagctctatcgccgggcgttttccgccgccgttaccgcgcggcgtaaaggtaaaaatcagattgagttcttcgatccggaacagatggaaaaagcgcagcgccgcctgatggaagagcacgatattttaacggcgcttgataatcagcagtttgccatctggctgcagccgcaggtggatactatcagcggcgaggtctgcggtgcagaagcgctgctgcgtcagcgtcaggctgacgggagctggtcgctgcctggcgatctgattgagcgtatcgaagcctgcgggctgatcgtcccggtcggctactgggtgatggaagaggcctgccgacagcttgccgcctggcaaaatcaggggatcatgttgccgctatcggtcaacgtgtcgcagctacagctgctgcatcacgatcgcggcgcggagatgctggcgctgctcgcgcgctatcgtatcgcgccgggcacgctgatcctcgaagtcaccgaaagccgtcgaatagacgacccgcaggccatgatttccctgctgcgtccgctgcgtgaagcgggcgtgcggatcgcgctggacgactttggtatgggctacgccgggctgcgtcaactgcagcatattaaatcgctgccggtggatatcctgaaaatcgataaagtctttatcgatatgctacctgatgacatcagcatggtgcccgcgattatccagctggcgcgggggctgaatctgcacatcgtcgcggagggcgttgaaaccgataagcagtatcgctggctgcaggaggcgggtgtcgagacggtgcaaggttatctttttggctgcgccatgccgcctgaggcttttaaggcccgctttttaccggctgttgttgaggatgcaagtttgtaa

SEQ ID NO: 173437 - DNA, 3486 bp, Klebsiella oxytoca
atgcacaagttctcattaagcttattcacgctctccctaagcgtcgcgctgatgccgctggctcacgccgtgaacacgcctgttcaggagcatctgctggagcaggtgcgcctcggcgaggccagcaaacgagaggatttggtgcgtcagtcgctctaccgcctggaattgatcgatccgaacaatccggacgttgtcgccgcgcgagtgcgctatcttctccgtcagggcgatacggccggggcgcagaagcagctggcgcgtctggcgaagctggcgccggaatcggcggagctgaaagcttcgcgcgacgagatgaaaagcagcaccggcgatggccgccaggagttgcagcaggcgcgcctgctgggcgtggccgggaaagttgacgaggccatcgccgcttacgagaagttgtttaacggcgtcccggatgatgatgaggcggcgattgagtactggacgctggtggcgcgcctgcccgcccgacataacgaaggcatcaatcagctgaaaaaactcaacgcccgcttaccggacaacgtccagctgcaaacggcgctggcgaaacagatgtttggcgataataagccggaagagggatttgcgtatcttgaacagatgtcgcgctcggcggcgggtcgtggcatcgcagcagacatctggtttaacgaagtgaaaagcatgccggtgagccgggccagcgtacaggcgctacagcggtttattgtgcaattccccaccggttccacctcggcaaatgcccgcgttctgctcgatcagcagcagacccagctcaaagatccgacgttccgcgatcgcgcggaggggctggcggcggtgaaggctgggaaaggttcggtggccgtagccgatttacaacaggctgtccgggcggatgccaaagacagcgacgcggttggcgcattggggcaggcgtactcccagcgcggcgatcgggcgcgggcggttgctcagttgagtaaagctatcaaaatggccccggatagcccgagccgcgataaatgggacagcctgctcaagactaaccgctactggctgctgatcaagcagggcgatagcgctctgaaaagcggccagctggcgcaagcgcaaaatgcttacgctcaggcgcagcggatagacactaccgatagctatgcggtgctggggctgggtgacgtggcggcggcgcgtaaagaaaacgccgcggcggagcgttactaccagcgcgcgctgcgaatggatcgcggcaatagcctggcggtacgcggtctggcgaatctgtatcgcggcgaatcgccggaaaaagctagcgcgtatatcgccagcctgtcgccggcccagcggcgcagcattgatgatattgaacgtagcctgacgaacgaacgcctggagaaacaggccgaagcgctggagagccaggggaactgggcgcaggcggcggaagtgcagcgccgtcggctggcgctggatccggatagcgtgtggataacctaccgcctggcgcgggatctggtcagcgcgggcagccgcagcgaggctgacgcgctgatgcgcgcgatggtcaaccgccagcctggcgatgctgatcgggtttacgcctacggcctctatttatccggtaataatcaggatgagatggcgctggcgcagataaacgccctgcctcaagggcagtggacggacaatattcgcgagctggaggcgcgtctgcaaagcgacaggatcttgcggcaggcaaaccagctgcgcgatagcggccaggaggcccaggctatcgcgctgattaaacagcaaccgacgtcggtgcgctacgcgctcacgctggcggactgggcgcagcagcgcggcgacagccagactgcgatagcggaatatcagcgggtgcttggccagcagccggataacggcgatgcgcgtctgggactcgcggaagtgtatcttgccgacggcgataagaatgctgcccgcgctcaggtggcgcagctcaagggcgaagacatcgattctatcaatatgcagcggcgtattgccctcgcgcaggccggtctgggcgatcgcgttcaggcgcagcaaaccttcgcccgcatcgtgccccaggcgaaagcgcagccgccgtcgatggaaagcgcgctggtgctgcgcgacgccgcgcgtttccaggcgcagaacggcgagccgcagcaggcgctggaaggttataaggatgccatggtggcctccggggttactcgcgagcgcccgcaggataacgacacctttacgcgcttaacgcgtaacgacagcagcgatgactggctcaagcgcgggatccgcagtgatgccgccgatctttatcgtcagcaggatcttaacgtcaccctcgagcatgattactggggctccagcggtaccggcggctattccgatctgaaagcgcataccaccatgttacacgtagatgccccgctggccgacgggcgaatgttcttccgtaccgatctggttaatatggatgccgggagtttttctaccaatagcgacggcagctatgcgccgagctggggcacctgcggcgaaatcgcctgtaccggcggcagcaaacatcagagcgacagcggcgccagcgtagcggtgggctggcagaacgagacctggagcggcgatatcggcaccacgccgatgggctttaacgtcgttgatgtggtgggcggcctgagctacagcagcgacgttggcccgctgggctacaccgttaatcttcatcggcgacccatctccagctcgctgttggccttcggcgggcagaaagataaccctaacggcggccatactggcaagacctggggcggggtgcgcgccgacggcggcggtgtgagtctgagctacgataaaggcgaggccaacggggtctggtcttcgttgggcgtcgaccagctgaccgggaaaaacgttgccgacaactggcgcgtgcgctggatgaccggctactactataaagcgatcaacgaagataaccgccgggtcaccgtcggcctgaacaatatgctctggcactacgataaagacctgagcggctataccctgggtcaggggggatattacagtccgcaggaatatgtctccttctcggtacctgtgacctggcgtcagcggacggagaactggtcatgggagctggggggctcggtgtcgtggtcccactcgcggaccaaaaccgaggcgcgctatccgctgctcaatttgatcccctctcagtatcgtcatgatgccagccagcttacggaagaaggcagcagcagctctggcgtcggctataccgcgcgggcgctgattgaacgacgggtaaccagcaactggtttgtcggggcggcggtggatattcagcaggcgaaggattataccccgagccatgcgctgctgtacgtccgctattcggcttccggctggcagggcgatatggatatgccgccgcaaccgctggtcccttacgccgactggtag

SEQ ID NO: 173438 - DNA, 1107 bp, Klebsiella oxytoca
atgaacgcggtacgtgcagtggtgttgtcgatatgcatgctggcggcggcgcaggcgagcgccgcctgccggtggccggcctgggagcagtttaaacaagagtacgtcagcgccgaagggcgggttatcgaccccagcgattcacgaaaaatcaccacctcggaaggacaaagctacgggctgttctttgccctggcggccaacgaccgcgaaggcttccgcaagctgttcgagtggacgcaaaacaaccttgccgagggcgatctgcgcgcgcatctgccgggatggctgtgggggaaaaagagcgatgacgaatggacggtgctcgataacaactcagcctcggattccgacctgtggatagcctgggcgctgctggaggccggacgactgtgggaaacgccccagtatacggaagtcggcaaagcgctgctggcgcgtattgctgatgaagaagtggctaccgtaccggggctggggccgatgattttgccggggagagtcggcttcgtcgatgacggcggctggcgttttaatcccagctatctgccgccgcagctggcgacctactttgcggcgtttggcgctccctggccaaagatacgcgacggcaatctgcgcctgctgctggagaccgcgccgaaaggcttttcgcctgactgggtccgttacgaaaaaggcaaaggctggcagttgaaggcggagaaacccattatcggcagctatgacgccattcgcgtctatctgtgggccggtatgctcgatgatggcgataagcaaaaagcccgcctgctgacgcgctttaaaccgatggcggcccggacggtagagcagggtgtgccgccggaaaaaaccaacgttgcgaccggtaaaaccaccggcaacggtccggtgggcttctccgcggcgctactgcctttcttgcagcatgaagatgcccgggccattcagcggcagcgcgtcgccgaccactatcccggcgcggatgcttactacagcacggtcctgacccttttcggccagggatgggatcaacaccgttttcgcttcactgccggtggcgaattacggcctgactggaacccggaatgcacaagttctcattaa

SEQ ID NO: 173439 - DNA, 2340 bp, Klebsiella oxytoca
atgaacagaaaactctctttgatttgtgcagtagcggtgggcattggcggctggtcctccttcgcgtcgtatgcggaaccgacggcggcaacggcagcggcgcagacgacaaccgtgcccggtattgccggcacggttgcggacggccagccaacggcgacccttgccgatccggcggcgccggtggtggtgctcgataacgccccgagccgcgacgtgaagctgaccttcgccaaaatcgctccgcctcccggcagcatggtactgcgcggcgcgcgccccgagggttcggtcgagttcggcatgcgcagcgatgaggtggtggcgaaagcgttgcttaatctcgactacaccccctctccgtcactgctgccggtgcagtcgcagctgaaggtttatcttaatgatgagctgatgggcgttttgccggtcaccaaagagcagttgggcaaaaaagtcagcgcgcagatcccaatcgatcctctctatatcaccgactttaaccgcgtgcgccttgagttcgtcggccactatcgcgacgtctgtgaaaacccggccagcagtaccctgtggctggacgtcggtcgcgaaagctatctggatttaacctatcagtcgctgaacgtgcgcaacgatctttcgcattttcctgtgccgttctacgattcgcgtgataaccgccagctgacgctaccgatggtctttgcctcctcgccgggtgtcctgcagcagcaggcggcggcgatcgttgcctcctggttcggcagcaaggcgggctggcgcggtcagcagttcccggtgcagttcaacgcgctgccggaccgcaacgccgttgtttttgcgaccaacgataagcgcccggacttcctgcgcgagcatccaccggttaacgcgccgactattgaaatgatcgaccatccggataatccgtacgttaagctactggtggtctttgggcgagatgacaaagacctgttgcaggcggcgaaggggatagcgcagggcaatattctgttccgcggcagcagcgtgacggttgacgatgtcaaacagctgcaggcgcgtaaaccgtacgatgcgccaaactgggtgcgcaccgatcgcgcggtgacctttgccgagctgaaaacctacgaacagcagctgcaatccagcggcctggtgccggattccattaacgtcgcgctgaacctgccgccggatctctacctgctgcgcgccaacggcatcgatatgaacctgaactatcgctacaccatgccgccgatcaaggacagctcgcgcatggatatcagcctgaacgatcagttcttacagtctttcagcctcaacagctcgcaggatgtgaataagctgattctgcgcctgccggtgctgcaggggctgctggatggcaaaacggaagtgacaatcccggcgctgcgccttggggcgatgaaccagctgcgcttcgattttcagtatatgaatccgatgcccggcggctctatcgataactgtattaccttccagccggtgcagaatcatgtggtgattggggacgactcgaccatcgacttctcgaagtactatcactttatggccatgccggatctgcgcgtgtttgctaacgcgggcttcccctacagccggatggccgatctctctgataccttagtcgtggtgccgaaagcgccgaccgagggtcaggtggccacgctgctggaaacggccggcggcatcggcgcgcaaaccggcctggcggcgattaacctgcgcatgaccgatgacggcagccagattaaggacaaagacgccgacctgctgctgattggctctattccgcaggcgctgaaggacgaaacgaaaattaacctgctggttgaagcgaccaaaagctgggtgaaaatgccgatgcgccattacgacctggcgagcatttaccccgataccgaagccagaacgccgaatacccgcactgatatcacgtcatccgggccgatggcggcgataatcggcttccagtcgccttacaacgatcaacgcagcgtcgtggcgctgctggccgatagccctcgcggtaacgaattgctcacccaggcgcttaacgatagcggtaaacgcgcggcgatgtttggctccgtctcggtgattcgcgagtcgggcgtcaacagcctgcgggtaggtgatgtttactatatcgggcatctgccgtggttcgaacgcatctggtttgcgctctccagccatccggtactgctggcggtgctggcggcattaagcatcgtactactggcgtgggtgctgtggcgcatgctgcgtattatcagccgccgtcgcctccaccttgatgatgagtag

SEQ ID NO: 173440 - DNA, 2619 bp, Klebsiella oxytoca
atgattcgcctgagtacgctactgctggcgccgccggttggagagcggttgagcgaacgctatcgcgattatcgccagcacggcgcgtcgcggctggcggccgcgctgggctgcttgtgggcatctctggcatgggcgtttatgccgctggaaaccccgcgctggcaggcaattcgcgaacatcatggcgagtttttcccgcatattaatccgcatcgaccgcgcccgctggacccgattcgctatctgctgcaagccctgtggctgctggtgacgcgggtgccggagccggataaaaagatcaactggcgttcgctggcggcgctggaaggcgtgcaggggcgctatgcgcagtggctggaaaagctaccggaaaaggtcaacgcccgcaccggtcatctggataagcataaggagctggggcatctgcatccaaaagtgcggcggcttctccttggcacgataacctttttctcgctgatcctggcgctactctgtattacccagccgtttaatccgctctcgcagtttatttttctgctgctgctgtggggcgtggcgctgctggtacggcgcatccccgggcgcttctcggcgctgatgctgatcgtgctttcgctgacggtctcgtgccgctatatctggtggcgctacacctcgacgctaaactgggacgaccccgtaagcctggtgtgcgggataatcctgctgttcgctgaaacctacgcctgggtggtgctggtactgggctatttccaggtcgtctggccgctgaaccgtcagccggttccgctgccggaagatatggcgcaatggccgacggtcgatatcttcgtgccgacttataacgaagatctcaacgtggtgaaaaacaccatttacgcctcgcaggggatcgactggccgaaggacaagcttaatatctggatcctcgatgacggcgggcgcgaagagttccgccagttcgccaaagacgttggcgtgcattacatcgcgcgcaccacgcacgaacacgcgaaagccgggaatatcaacaatgcgctgaagtacgccaaaggcgagtttgtgtcgattttcgactgcgaccacgtgccgacccgctcgttcctgcagatgaccatgggctggttcctgaaggagaaagagctggcgatgatgcagacgccgcaccacttcttctctccggacccgtttgaacgtaacctggggcgttttcgcaaaacgccgaacgaaggcacgctgttttatggcctggtgcaggacggcaacgacatgtgggatgccaccttcttctgcggctcctgtgcggtgatccgccgcggcccgctggatgaaatcggcggcattgctgtggaaacggtcaccgaagacgcccacacctctttgcgcctgcaccgtcgcgggcacacttcggcctatatgcgtattccgcaggcggccggcctggcgacggagagcctgtcggcgcatatcggccagcgcatccgctgggcgcgcgggatggtgcagatattccgccttgataacccgttgtttggtaaagggctgaagctggcgcagcgcatctgctacgtcaacgcgatgctgcacttcctgtccggtattccgcggctgatcttcctgaccgcgccgctggcgtttctgctcctccacgcctatatcatctatgcgccggcgctgatgatcgccctgttcgtgctaccgcatatgattcacgccagcctgactaactcgaagattcagggtaaataccgccactctttctggagtgagatctatgaaacggtactggcgtggtatatcgcgccgccgaccgttgtcgcgttgattaacccgcataagggcaaattcaacgtgacggcaaaaggcggcctggtggaggacgagtacgtcgactgggtgatctcgcgtccctatatctacctcgtgctgctgaatctggtcggcgttggcgtgggtatctggcgctttatgtacggcccggaaaacgaaattttgaccgtctgggtcagcattatctgggtgttctataacctgattattctcggcggcgcggtggcggtatcggttgaaagcaagcaggtgcggcgctcgcatcgcgtggagatgtcgatgccggcggcgattgcccgcgaggacgggcacctgttctcctgtaccgtccatgattactccgacggcggcctcggcgtcagaattcacggcgaggcgcaggtgctggaaagccagcacgttaagctgctgctgaaacgcgggcagcaggagtatgccttcccggtgcgggtcgcgcgggtcaacggcagtgaggttgggctacagctgctgccgctaagcaatcaacaacatattgattttgtgcagtgtacgtttgcccgcgcagatacgtgggcgctttggcaggatagcttcccggaagataagccgatggaaagcctgctggacatcctgaagctggggttccgtggatatcgtcacctggcggagttctccccgccgtcggtgaaggttattttccgctcgctcaccatgctggtggcctggtttgtttcgtttattccgcgccgtccggaacgcgctgcggcgacactctcggcagaaccggcgatggcccaacaatga

SEQ ID NO: 173441 - DNA, 738 bp, Klebsiella oxytoca
atggctattctgggattacaaggcgtgcgcggcggcaccggcaccacgtcgatcactgctgcgctggcctgggcgctgcaattactcggggaaaccgtgctggtggtggacgccagcccggataacatgctgcgcttctttttcaacgtcgattaccgccacaacgcgggctgggcgcgcgccctcatcgacgggaacgactggcgagacgccgggctgcgctacacctcgcatatcgatctgctgccctttggccagctaacgccgggcgagcgcgagaatattgaccagcttcagacgccgctggccccgatggccgggatggtgcagaagctccatcagcagggcgatcaccgctggctgctgattgatctgccggacgggttctcaccgctgacccgctccctgattgacgtctgcgatcgcacgctggtcgtggtgcatccggacggcaacagccatattcgcctgcatcagcaggcgctgccggtcaatagcgatattttgattaacgatctgcgcgtcggcagccagctgcaggaggatctctatcagctgtggctggagagccagcgccgcattttgccggtgactattcatcgtgatgaagcgatggcggagtgtctggcggcgaagcaaccgctcggcgaatatcgccaggactcgctggcggcggaagagatactgacgctggccaactggtgcctgctgcactacgccggaaggggcgcggaatga

SEQ ID NO: 173442 - DNA, 189 bp, Klebsiella oxytoca
atgccagcaaaagagcctgctgtacccaccgatgcgactttgggctatacgtttcaaaatgatttcctggcgttaagccgggcattttccctgcctgatattgattatcatgatatttcccgacgcgagcagttaaccgcggcgctgaaacgctggccgctactggctgaattagcagagaaaaagtaa

SEQ ID NO: 173443 - DNA, 1557 bp, Klebsiella oxytoca
gtggatatcgtatattctttgggtatttcatcattatgggacgaagtgtgccatatgcccgttggcggcgtgtggtggctcaatgtcgaccgccatgcggacgcggtaagcttgcttaatcatacgcttgcggcccaggataaacaggctcgcgttgcgacgatagccatgggtgataacccaaatgaaatcataaaattagaaaaagatcgcgggcctgagaaaatcgcattatttaccatgccgaaccgctttgaagggctggaagaaatgcaccgcgatttagtctgttccctcgaacctggcaattatttgtttattctgctatgtgctgaaaatgcctggcagaatattaaaagcgaacaattatgcaattgggttgagaaatcatatcgatggactaattatcatcgttgttcattattagtgcttaattccgggcacgatatcgataagcaactttcccctttattacgcgagtaccgctcgctttccggactggcaagtatacgttaccagggagataaccacctgttcgatattgcctggtggggcagcgaaaagggcatcagcgcccggcagcagctcattgttttacacgatgaaaacggctggcggttggcgcaggacgaggaaacggtggtacaaccgcgcagcgacgagaaaaccatcctcagcaacctgcgcgtactggagggggcgcccgcgctttccgaatactggacgctgttcgaaaccaatgacgccgttttcaacgccggcagaatggcgcaggcggcgacgctgattttctccattacccagaacgaacagattgaacagctgggacgctatatccacaccctgcgccgccagcgcggtagcgcgctgaaaattgtcgtgcgcgagcaaacgccaagcctgcgcgccaccgatgaacgcctgctgctgagcagcggcgccaatatggttattcccagcggcgcaccgttatcgcgctgcctcacacttatagaaagcgttcaaaaacagcagtttactcgccatattccggaggattttaatactctgctgaactggagccagccgctgaagctgcgcggctaccagaagtgggatgccttctgcgaagcggtgcacaatattatggccaacaccatgctgcccgccgacggcaaaggggtgatggtggcgctgcgcccggcgcccggtctgcgcgtagagcaggcgctgacgctgtgtaagcctaatcgcatgggcgacatcatgaccatcggtaataatcgcctggtgctgtttctgtcattttgccgggtgaacgacctcgacaccgcgttaaaccatatcttccctttacctaccggcgatattttctctaatcgtatgatttggtttgaagataagcagatagcggctgaaatcctgcagatgcgcgggattatgccggagaactggaatacgccgctgcctgtttcgcttgccaaaaaaacgcctatcaacgcgacccacgacggacgtagctggcggcgaacccccgagccgcatcgtctgtccatcgacggggagccaaccttatga

SEQ ID NO: 173444 - DNA, 198 bp, Klebsiella oxytoca
atgatgtcgattgccgatattattcagctggtcgtcctgtgcgccctgctgttctttccgctgggttaccttacgcgccactaccagcggcgaattcgcaccacgttaagactgatgttctttaaaccccgttatgtcaaaccggctggcgtgctgcgccgggaagcggcatccaggcaaggcaaatcaacgaaatga

SEQ ID NO: 173445 - DNA, 1677 bp, Klebsiella oxytoca
atgaccaaacctaaaaccccctcagcgtcgcttccgctctggcgctactggcgcggcctatctggctggaacttctactttctggtgaagtttgccttgctatgggcgggatacctcaattttcatcccatgctaaacctggtgtttctggcctttctgctggtgccgattccgcaatataagctgcaccgtattcgccactggatagcgatcccgctgggctttatgctgttctggcacgacacctggctgcccggcccggaaagcatcgtcagccagggttcgcagattgccggcttcagcgccgactatatctgggatttggtaacccgctttattaactggaatatgattggcgcgttcttcgtgctgctggttctgtggctgtttatcagccagtggctacgggtaacggtatttgtctcagcaattatgatttggctggtcgccagtccgctgctaccttcgtttaccctttggccgacaggtcagccgacgaccgcggcggcgaataacgcgccgaataccggtggcggggcaatcgtcgcgaccaacgccgccccggcgaataacgatatccctgcacaaacggagccgccgacatcggccaatctgaccaactggctgaataccttttacgcctctgagcagaaacgcaaaaccacgtttcctgatgcactcccggccgatgcccagccgtttgatgtcttgatcatcaacatctgctcgctctcatggtcggatatcgaagcagcgggattgatggagcatccgctgtggaagcattttgacctgctgttcaaaaactttaactcggcgacctcttacagcgggccggcagcggcgcgtctgctgcgcgccagctgcggccagctctctcacgccaacctttatcaaccctcaggcagcgaatgctatctgtttgaaaacctggcgaagctgggcttcacccagcagctgatgctcggtcacaacggtgtcttcggcgacttcctgaaagagcttcgttcgttgggcggtatccagagcccgttgatggatcaaagcggcctgccggtcatcctgcagggctttgacggctcaccggtctatgatgaccaggcgacgctgaaccgctggctgcagtcgctggataaactgaatacgccgcgcacggcgaccttctacaacacgctgccgctgcacgacggcaaccactatccgggccagagcaaaaccgcggactataaagcccgtgcgcagaagttcttcgacgaactggacagtttctttactgagctggagaaatcgggacgcaaggtgatggtcatcgtcgtgcctgaacacggcgcggcattaaaaggcgataaaatgcaggtctccggtctgcgcgatattcccagcccatccattaccaacgtgccggcggcggtgaaattcttcggcattaaggcaagacatcccgatgcgccgattatcatcagccaaccaagcagctacctggcggtttctgagctggtggttcgcgccctcgacggcaagatgtttgatgagaatgacatcaactggcagcagtacattgccaacctgccgcagagcgcggcggtgtcggaaaactccaacgccatcgtcattcagtatcagggtaaaccgtatgttcagctgaacggcggcagttgggtaccttatccgcaataa

SEQ ID NO: 173446 - DNA, 519 bp, Klebsiella oxytoca
atgttacccctgcggccccgttcgggcgcatgctgccacttaggcagacagatgcccaccggtcgtctacttgcgattatccatccagctcacgatgatgctgaccagaatgccagcaatgaccggagccgccagatcgtcccacagcagcagaccccactgagcgagcgtcatacagccgccttattgcaatggcaaccgttcgcggctatcctcgaattgtctagatgcgaggttagcccccgaaacgttgccaggttataccaaacaacgtgcgggggttttctctttccagcaacccatcaatcgatgccgccggggttcaagcccccgcaacattgcgcctcaccgggcgagcccggcttgccgacaattctactggcccgatcggctacccgcactccgccattacgcaccatgcgagacgcattccaggaaagtgttttgttgctgcaacaaaacgaaaaaggccgcaggatgttacccctgcggccccgttcgggcgcatgctgccactaa

SEQ ID NO: 173447 - DNA, 495 bp, Klebsiella oxytoca
atgcccaccggtcgtctacttgcgattatccatccagctcgcgatgatgctgaccagaataccagcaatgaccggagccgccagatcgtcccacagcagcagaccccactgagcaagcgtcatacagccgccttattgcaatggcaaccgttcgcggctatcctcgaattgttgagatgcgaggttagcccccgagacgttgccaggttgataccaaacaacgtgcgggggttttctctttccagcaacctatcaatcgatgccgccggggttcaagcccccgcaacattgcgcctcaccgggcaagccggcttgcccacaattctacggcgcccttcagatctcagcacccggctcgactgcgttattcgaggcgcattccacagtttacgaccgttctttctttgccagccataccagcagcttcaggctggcggagtaatagtcgtcctgggaattaatctgcggctcggcctgctcttcaccaagggttaa

SEQ ID NO: 173448 - DNA, 1011 bp, Klebsiella oxytoca
atgggtgaatttatgtccttgcgtgctttagcgacagtcgtggtaacgacggtgatgatgcttccccacgcgtgggccgatacggcgtgggaaagttataaatcgcgttttatgatgccggacgggcgtattgttgataccggtaacggcaacgtctctcatactgaagggcagggttttgccatgctgttagcggtggccaacgacgatcgtcccgcctttgacaagctctggcagtggacagataaaaccctgcgcaacaaagataacgggctgttttactggcgctataacccggtggcgcccgatccagtggcggataaaaatgacgccaccgatggcgataccctgattgcctgggcgctgctgcgcgcgcagcagcagtggcatgaaaaaacctacggtaccgcttcggatgcgataaccgcttcgctgctgaagcatacggtagtgaccttcgccgaccgtcaggtgatgctcccgggcgcaaagggattttatctcaacgaccatctgaatctgaatccatcctactttatctttcccgcctggcaggccttcgcggcgcgtactcatttgaccgcctggcgaaagctgaagagtgatgctcaggcgctgctggggaagatggcgtgggggaaatcgcagctacccagcgactgggtcgccttaagagcggacggcaagatggagccggcaaaagagtggccgacgcggatgagcttcgatgctatccgcattcctatgtatgtctactgggacgacccgcaaagcagcctgctgacgccgtggaaaaactggtttcagcgctatccgcgtctgcagacgccggcctggataaacgtcaataccaatgaggccgcgccgtggtttatgaccggcgggctattggcggtacgcgatttaacccttggtgaagagcaggccgagccgcagattaattcccaggacgactattactccgccagcctgaagctgctggtatggctggcaaagaaagaacggtcgtaa

SEQ ID NO: 173449 - DNA, 474 bp, Klebsiella oxytoca
gtgacggacaataataacgcgcaggttatgacgtggtttcagcagcagcaaacgcctgccggatggttcgatctgctgctcattatggttgatggtatggtcaacaacgcgggtgagctggagagccagccctttctgcggcagatgggcgaggcgctggccgatgaacatccgctgccggagtctgagactctcggccagctggagaccaacatgaatgctctgctaagccgctttcagtggggcttcgtcagcgtcgaggtgaacgatgaaggcctgcgattacgccatcaggctctgccggtcagccgcgatgaagcgcggcgcatccgctggtgtaatgcattttgtgccatactcgaggggctctattcccgctggttacagggacagggcggcgcggcgcacgtggttttacagcgtgagcggctgttttcagtctctgacgttcagtttctttacttccatccctaa

SEQ ID NO: 173450 - DNA, 4053 bp, Klebsiella oxytoca
atgaaaagagccagcagaatgaatacccatgcagcccgtcaattttctacgctgtgcctgtccggcgcgctgacgcttggcgcattcggcggagcgcacgcggcgggtaacgatgccgcgctacaagcgttgttcgcacaggccaactactggcacgaaaaatcgcatgacgaactggcgatggaatcgctgcaaaaagtgctatcggtggatgccaacaacgctcaggcgctgtacctgatggcgctatgggcgcagcaggggggcaatctgcaggccgcagcccagtggcgggcgcggctggagaaagcggcgcccgacagccccggactacaggatctggatagcgcaaaaaaaatggcgcaggtgccgcagggacagctcactctggccagacagcaggcgcgcagcggcaatgttcccgccgcgctggcgacctggcggagtatgtttaacggcaacgttccgccttccgggctggcggccgaatactatatgaccatggccagcgacaaggcgctctacccacaggcgttgagcgaactacgtcaatacgtcgcgcagcatccgcaggagaacgcgccgcgcgttgccctgggcaaagtgctcacctggcgcgaagagacccgccgggaaggcatcgccatgctggagccgatggccagcggcagcaaagaagccgatagcgggctgcgtcaggcgctgctgtggctggggccgcagccgggggatgagccgttttacgacacctggatgcagcgtcatccgcaggatactgaagtccagaactactttcgcgaacggcgcagcggccaggcgcgcggccagggctattctgacctcaacagcggcaataccgccgcggcgaagcagcagtttgaacaggttctgcaaagcaacccgcaggacgctgacgcgctggccggaatgggctatatcgcccagcgcagcggcgattttcaggcggcctctcagtatttgagccgggcggcggatctcggcggcgatggctcggaaacccgtcgtcagcaggcggcggatgcgctgttttacgggcagctcgcccaggcgcagcaggcttacaagcaagggaatattagccaggcgctggcgctctctgcgccgctggcgcagcagagcgggacgcagggcacggcggcgaagctgttccgcgccgacgttctgcgccataacaaagatttgccgcaggccgaacaaacgctacgggcgctgctcaacgaccagccgcaaaacggcccggcgcgggagaatctctattacgttctgcgcgaacagaataaaacggcagaagcgcaggcgatgctgcgcacgctgccggaaagcctgcagcaaaaactgcagccgcgggtggtcatcggacagcccggcgattcgctgcgtcgccaggcgcaggagcaggccagcgccggtaacgtgacggcggctatcgccatgctgcgccaggggctttctcgctatccggacgatgcgtggatgcgcctcgatctggcccgtatgctgcaaaaagccggtaacgacggtgaggcaaatgcggttatgggcgccgcctggcgtcccggcgccggcgccagctcgctgtacgctgcggcactttttgccagcgagaacggcggctggcagcaggcgcaaaccctgctggcaagaattccccccgccagtcagaccagccagatgcgcgacctgaaacaacgggtgaactacaacctgcagctggcgacggcggagagctatctggcgcagggcaataccgttgccgctgctaatacgctcaggacgatgaccgcaacgccgcctgaagccccggcggatgtgggtaaactggcgcggctgctggcccagagtggcgatgtcaccaccgcggtatcgctggtgcgcaacaatattaacggcggtatctcaggtaatgccggggattatgccgatcaggtgacggtacttaaccaggtgggcctgacaaccgaagcgcagagtctgctcactaacccgcagctgcaggcaagcagtacgccgacgcagctggccagtattcgcaacggttatgtgattaacgaagcggaccatctgcgcgagcagggcaactacgcggcagcgtatgacaagctgatgggcgcgatgcagaacgacccgcaaaataccgatctgatgttcgctatggcgcggctctatcagagcggcaaaatgaacaaagaggccggtgtcgtctatgactatctgatgacccgcgatacgccgacgcaggatgcgcgcagcggggctattgatgtcgcactctcggcggggaatagcgaacgggcggcgcagctggcgggtggactgcgcccggataattcgccggaccgtttgctgctgctggcgcgcgttgccgagtcgcaggggcatcatcagcaggcgatgacttacctgcgcagcgcccgcggcaggctgctgggacaacagagcagcaatggcgcgcaaacgccgaccgtgggcggcgcgctggcggcggataatccgtttgtcggcgtttcgcgtacccccggggcgacgcgtgcggcctccgcctacgggcaatatatgccgtggcaggtctctcaggtatcgaccggggatggcggcgcgctgccggggatccagcgcaccgatctgccggtcgaaaccgcccagacccggatgctgcgccaggtggataccatgatggagacgttgcaggaaaaaaccggcacctggctgcaggggggcatggaggttcgcggtcgcgacggcgaatccggcaccagtaagctcagcgagataaaaaccccgctcacctggtcctcatcgccgtttggtgattcgcgtttcgattttaccgttacgccgattacgctgaacgcggggacggcgaccggcgacgcctggcggcgttacggcgcgaacccgctatccaatgcagtctccaatatgatttccaccgcgaccagcgagcaggcggcgattgcggcgatgaccgcgaccgagcgcacgacgtactttgccaacaatccgggggcggaagccttgagcggtctgggcacgctcaaggcctctgactttaatgccaccaccagcagcggcatggagaatctggcgaaactcggaacttacgattccgggcaggtcgccagctatctggcctcttccagcctgaagccgaatgtcgatcaggcgagcggctcaaccgattcacaaaaagccaacggcgtggagctggctctggcgctgagcggcgacgaataccgcgtcgatatcggcagcacgcctttgggccaggatctaaataccgtggtgggcggcgtaaagtggtcgccgaagctgaccaactatctgtcgttgatttttaccggcgagcgtcggtcgctgaccgacagtctgctctcctgggtagggctgaaggattcctactccggcaagacctgggggcaggtgaccaaaaacggcggtaccctgcagctaagctatgacgacggcgatgccggtttctacgtcggcggcgggggctatagctacctgggacaaaacgtcgccagcaataccagcataaacgccaacgccggagtttatttgcggccttaccacgatgagtatcgtcagctgcagaccgggttgagcatgagttacatggattactcgaaaaacctgagctacttcacctacgggcaagggggctacttcagcccgcagaactacgtcagcgtatcgctgccggtgagcctgacggaaaaatatgacaactggacgatgaaacttggcggctcggtgggctatcaatcctatagccaggataagagcgcttatttcccgactaacgccgggtggcagcaggccctcgagaccgcagtgagcaacggttttgccaaagaagcctactattcagccacttcgaagagcggtatcggctataccctacgcgccggcgcagattacaaagtcaacaaacaaatgacgctcggtggtcaggttggctatgacaccttcggcgattataacgagagcaccgctggtctctatatccgctacatgctgggagataactga

SEQ ID NO: 173451 - DNA, 2406 bp, Klebsiella oxytoca
atgaaatccttaacgacgctcgcgctgctggttggagtgctctctgcgccagcgctgcacagcgaggagatgcccgcagattcattgccggagcttaactttccgcttccagatgcggctgcgaacagcgcatcggcgcccgctagcgaagcgaattcaccggcgacgacggaagctgcgtcggcaaacgccgatcagccggattcgctacccgcgctgccgccgataacgcctgttgtccctgatacggtaccgcttacgccgatcgttggcggcaatcttaacctgatgcagatgggcatgccggacggcattatcctcagcggtggacaaaatcagggcggcgccagctttacgctcccctccgatcaggtggtcacccacgcccagctgatgctggaggtcaaggtttcgccggcgatggcgtcccgcaacgccacgctgcaattaatgctcaacggccagccgctcggcaccttgccgctgggggctgatggcgaggatgtttcgcactaccagctggatatcccggcggcgctgatggtgtccagcaacaacctgagctttaagattaacgacggcgatgcgctgcagtgccggctcgatattcacgacacctcgcgggtaaccattctgcccggctcccactttagctgggagagccagcagctcaatatcagcaacgatttgggccacttcccgcgcccgtttttcgaccgtatgcagatgacgccagcggatatcgctatcgcgtatccggagaaaccaacggcggatattttcagcgcagcggcgctggtgtcgtcatggctgggtattcaggccgactatcgcggtatcgcttttgacgcgctgcgcgatcgcctgcccgagaaacacgggattatcatcggtcatcccggggatcgggtgggcggcctgacgctgccgcaaaccgacaaaccgctgctgcggatcgtggaaaatcccggtaatccggcttataagctgctgctgatcgtcggccagaatgacgccgcactgcgcatggccgcgtggcgcctgacccgcggcgatttcgccccgcagacggccagcatgaccgtggatccgcaggcgattcccgtcggcaagccctacgatgcgccgcgctggatcgccaccgatcgtccggtaaaaatcagcgagctgatccgtcaggatcaaagtatgaccgttagcggcgtgtggcatgaaccgctgcgcgtggcctttcgcgccgcgccggatctttatctgtgggatggagaaactatccccctgcaaattggctatcgtttcccgtcggagagctggattaacgaggataagtcgctgctgagcgtgacgctgaacaacaccttccttaataatctaccgatgaacaaacaggggccgctggagaagctctggcggcatctgggcggcgacgcgcgtcaggaacggtttactatcccgctggcgccgtatctgatttacggtgataaccagctgtcgctctatttcaacctggtgccgaaggataacgcgccctgttcgctcctgctgaacagcactatcaagagtcgaatcaccgacgattcgtggatcgatttgagcggtacgcggcacttctcgctgctgccgaatctttcctattttgtcggcgcttcgttcccgttctcccggttagcggattattcgcaaactacgctgctgctgccggaacagccttcggaaacccaggtggcgatgatgctgaatctggcagcccgttcgggtaattcaaccggcaaagcgttagccaacaaccgcgtaatattgggcgttcctgacggcggcgccaatgcgccgctgctgcgcgatcgcgacgtgctggcggtcagttccctcgagcaacaagcgtttaaccagcgcctgctggcccattccccctacgccccggtcgataacctgctgagcgtacgtgaaccgacgctgtgggaaaagattcagcgcaggctgagcggcgactgggcttctgacggcgtcgatgccgaccgctatttctcctccagcagcgcctggcgcggttttatcagctatcgctcaccgtggaacccgcagcgggtggtggtggtggcgatggccagcagcgacgatcagctggcgaaactggaagacgatcttaattccccgcgtatcaatgccggtattcgcggcgatacggcagtgatcaccagcgataacggcgtgcgtagcttccaggtcagcacgccgttccccagcggccagatgccgtggtacatgatggcggtatggtacgccaatcagcactccgggctgctggcggtgctggggttgattatgacatcgattctgggtctggcgctgaccgccatgtttaaacgtcatgctcgtaagcgcctggattcgggagagagccaatga

SEQ ID NO: 173452 - DNA, 2112 bp, Klebsiella oxytoca
atgaaaaaaacgcttttctgggcgctggtattggtgcttgcgcccattgccgtgctggtggtgattacgccgatggacagccaaaagcagtctatttttggcctgctgagcatcggtattctctttgttatgggtttcagtaaaaaccgcagcgtttccgtcattatggtggtgacatcgctgttgatgtcgacccgttatatgtattttcgtctgacgcagaccctgcatttcaactccaccatcgaagcgattctgggaatggggttgtttctggcggaagtctatatctgggtgatgttgctgctgaactacctgcaaacggtctggccgctgaagcgtgaaatcgtcccgttgcccgatgatatgagccagtggccgacggtagatatctatattcccagctataacgaaccgcttgaagtggtgcgtgataccgtgctcgctgcgcaatgtattgattatccaaaagataaattaaaaatctatttgctggatgacggcaagcgtaacgaattcgcggtattcgccgccgacgttggggtagggtatatcacccgcaacgataacaaacacgccaaggcaggcaacctcaaccacgcgatgacgctaaccaacggcgagctgatctgcgtttttgactgcgaccacgtggcaacccgcgtcttcttgcaggcaacggtggggggattcctcaaagacccgatgctggcgctggtgcagacgccgcactatttttactcgccggatcccttcgagcgcaatctctccgtcggccgcaatattcccaacgaagggatgctgttttatggtccgattcagcagggaaacgacaactggaatgcgaccttcttctgcggttcctgcgcggttattcgccgcgctgcgctggagcagatcggtggctttgcggttgagaccgtcaccgaagacgcccataccgcgctgaagttccagcgtctgggctggaaatcggcgttcctggatattcctctggcggcaggtttggctaccgaacgcctggtggtgcacgtcattcagcgtacccgctgggcccgcgggatgacgcaaattttccgtctggataacccgctacttgggcgtgggctaacgttccagcagcgcctgtgctacctcagcgccatgctctattatcagttcgctctgccgcgcgtggtctttgtcaccgcaccgctggcctatctgctgttcaacctgaatatcatctactcctcggcgagcctgattgtttcctacgcgctgccgcatctgttcctcgcgatctatgtcggatcgcgcatgaacggccgctatcgctacagtttctggggcgaaatctacgatatcgtgctggccttccacctggtactgccaacgctggtcaccatgattttccccaaacgcggaaaattcaacgtgaccgataaaggcggcctgctggacgtgggctacttcgactttaccgtcgtcaggccacacctggtcgtcgcctgcctgctgggcctgggggtggtggttggtatcgtccgcgccatcggtcacgactattttggctcagacccgaacgttatcgcgctgaacgtcggttgggggatttacagcctgattttcctgctggccgccattgccgtggcgcgcgaaacccgtcaggtacgaaaaacgattcgtattgatgtcgatatcccggtgcttatccactacaccagcggcattgtctcccgcagccacaccgcagatctgtccatgggcggttgccgcgtaagcgcgccggataagcgtcacctggaggatgaaatcgaagagattgagctgattcttcagtccggagcgatttcgatcccggtacgccaggtcaccgctgacgatcggtttatccgcctgcaatttgatgaaaacattcagctttcccgtcgccgtgaactggtgcgggtggtgctggcccgcgccgatgcgtggattaacccgccgcgcccgcaggacaacccgttccgctctttcgccacgattttacgctgcgtatttgaactcttctggctgacgtggaagacgcgccgcagccagcgtcgtcagccctctgcggcaaaccccgcgcaggaggatggcagtcaatga

SEQ ID NO: 173453 - DNA, 804 bp, Klebsiella oxytoca
atgccgttgatctgcgtgtgttcgccgaaaggcggcgtaggaaagacgaccctggcggcaaacctggcctgggcgttggcccgcgcaggcagcaaagtcctcgctctggattttgatgtgcagaacgcgctgcgcctgcattttggcgtgcctctcggcgatgagcgtgggtatgccgcaaaagcgctggagctccatgactggagccagtgcgtgttaagcgccggcagcaatattttcgttttgccctacggcgaggtgagcgaggcgcagcgacaggcgttcgatgagcgtctgacccatgacgcgcatttcctgacgcgcgggctggcggcactgcttaactaccctgggctgattaccgttgccgacctgccgccgggtccttcacccgcgctaaaggcgctgacttcgctggccgacatgcatctggtaccgctgctggcggataccgcatcgatgtccgcattgtcgcacgtggaaaagcagcgcctgaccggaggcgctctcaacgctaaacacggtcactattttgtgattaaccagagcgataaccgtcgccaggtcagtcgcgatgtcacggcgttgatggaagaaaagctgggcgatcgtctgctgggcattattcatcgtgatgaaagcgtggtggaggcaaatgcctcccagaagtcgatcctcgactttaactcatcctccgcagccgcctttgatattgaaattattgccaaaaaaatctctgcgcagttgggtatcaatatcggcgacggcacggtgcacagccagcctcgcaggtcaggtctttaa

SEQ ID NO: 173454 - DNA, 588 bp, Klebsiella oxytoca
atgaaccattatgatgatttgcagcgctttaaggaaaagacgcggacacacagtctcccattcaaggacctctcatcagaaaccggcgccggtgaaaaaggcgattgggttattctcaatcagcttattcctgcggagcaagcatcctctttggctatgggaggatcggtatctttacccctgccgcagctggtgccggccaatatgtttcatcaggtggagcggacagccattcagaccgcgccggcggcatcgtcggttgcgccatcggtaatgattcccgaccctgtcgccccatccgcgccgcagcctgtgcccgcggtgagtcatattgctccggttgccgtagaaccgatagtgcaggcaggcgaggccgcgaccgggcaagcgttccggacagccgtatcgcaacctgttgcgccgctatctgaccacgtgccagctccggctgtcagacctcgcccggcgatagcgccgacggtggacggttttgcccatctctttgcggcaaaaacggtggcgccagcggcgaaagataaagatcagcccctgaaatcactcttagaaaggattgcgacatgccgttga

SEQ ID NO: 173455 - DNA, 1014 bp, Klebsiella oxytoca
atgagtacgcatgaggccaccacgcaacagcctctgttgctggccaccgatctgaaaaaatactacccggtgaagaaggggttgtttgcgccggaacgcctggtcaaagcgctggacggcgtttcgtttacccttgaacgcggtaaaacgctggcggtggtgggggagtctggctgcggcaagtcgacgctcggtcgtctgctgacgatgattgaaattcccaccggcggcgagctttactaccagggacaggacctgttgaagcacgatccgcaggcgcagaagctgcgccggcagaaaatccagattgtgttccagaatccctacggttcgcttaacccgcgtaaaaaggtggggcagattctcgaggagccgctgcagatcaacaccagcttgagcaaagagcagcgccgggagaaggcgctggcgatgatggcgaaagtgggtctgaaaaccgaacattacgaccgttatccgcatatgttctccggcggccagcgtcagcgtatcgcgattgcccgcggtctgatgctggacccggacgtggtgattgccgatgaaccggtctccgcgctggacgtttcggtgcgcgcgcaggtgctgaacctgatgatggatttacagcaggatctggggctttcttacgtcttcatctctcacgatttgtcggtcgtggagcatatcgctgatgaagtcatggtgatgtatctgggccgctgcgtggagaaagggacgaaggatcaaatcttcaataacccgcagcatccgtacactcaggcgctgctgtcagccacgccgcgtctgaatccggatgaccgccgcgagcgtatcaagctcaccggcgagctgccgagcccgctgaatccgccgccgggatgcgcgtttaacgcccgctgtcgccgccgttttggcccatgtacccagcttcaaccgcagttgaaagactacagcggccagctggtggcctgctttgcggtcgaccaggatcaaaacggcgagaagccgctgagctga

SEQ ID NO: 173456 - DNA, 984 bp, Klebsiella oxytoca
atggcgttattaaatgtagataaactctcggtgcacttcggcgacgaagggacgccgttccgcgccgtagatcgcgtgagctacagcataaatcagggcgaagtggttggtatcgtcggcgagtccggttcaggtaaatcggttagctctttggcgattatggggctgattgactatcccggccgggtgatggctgaaaagctggagtttaacggtcgcgacctgaagcgcatttccgaaaaagagcgccgccagctggtgggcgcggaagtggcgatgatcttccaggacccgatgaccagcctgaatccgtgctataccgtcggctaccagatcatggaagccattaaggtgcaccagggcggcaacaagaaaacccgcgtgcagcgggcgattgatctgctgacgctggtcggtatccccgacccggcttcgcgtcttgatgtctatccgcatcagctttccggcggtatgagccagcgcgtgatgattgcgatggccatcgcctgtcggccaaagctgctgattgccgatgaacccacgacggcgctggatgtgactatccaggcgcagatcattgagctgctgctggagctgcagcaaaaagagaatatggcgctgatcctgatcacccacgatctggcgctggtggccgaagcggcgcacaaaatcatcgtcatgtacgcggggcaggtggtggaaaccggcgacgcgcaggatatcttccgcgcgcctcgccacccctatacgcaggcgctgctgcgcgcgctgccggagttcgctcaggataaagcgcgccttgcctcgctgccgggcgtggtgccgggtaaatacgaccgtccgaacggctgtttgctcaatccgcgctgcccctatgcgacagacaaatgccgcagtgaagaacctgagctgaacctgcttaacggcggtcgccagtcgaaatgtcattacccacttgatgatgccgggaggcctgggctatga

SEQ ID NO: 173457 - DNA, 903 bp, Klebsiella oxytoca
atgtcacaagttactgaaaataaagttgtcgccgcgccggtgccaatgaccccgttgcaggagttctggcactattttaaacgtaataaaggcgccgtcgtggggctggcctatgtcgcggtgatgatcatcatcgccgtcttcgccaacttcctcgcgccttacaatccggcggatcagttccgcgatgcgctgctggctccgccgttctggcaggagggcggcagcatgtcccacctgctcggcaccgatgacgttggccgcgatatcctgtcgcgcctgatgtacggcgcgcgcctgtcgctgctggtaggctgtctggtcgttgtgctatcgctgatcctcggtgtggtgctcggtcttgtcgcgggctattttggcggcgtgattgactcggtcattatgcgcgttgtcgacattatgctggccctgccaagtctgctgctggcgctggtgctggtggccatcttcggcccgtcgatcgtcaatgcctctatagcgctgacctttgtcgccctgccgcactacgtgcgtctgacccgcgcggcggtgctggtagaggtgaaccgcgattacgtcaccgcttcccgcgtggcgggggctggcgcgatgcgtcagatgtttatcaacattcttcctaactgccttgcgccgctgattgttcaggcgtctctgggcttctctaacgccattctcgatatggccgctcttggcttccttggcatgggtgcgcagccgccgacaccggagtggggcacgatgctctccgacgtgttgcagttcgcgcagagcgcctggtgggtcgtcacctttcccggtgtcgctatcctgctgacggtgctggcatttaacctgatgggtgacggtctgcgtgacgcgctcgatcccaaactgaagcagtaa

SEQ ID NO: 173458 - DNA, 1020 bp, Klebsiella oxytoca
atgttgcagttcattctccgacgtttgggacttgtcatcccgacatttatcggtattacccttctcacttttgccttcgttcatatgattcccggcgacccggtgatgattatggcgggcgaacgtggtatttcccctgaacgtcacgcgcagctgctggccgagatgggccttgataaaccgatgtggcagcagtacgtcaactatatttggggcgtgatgcacggtgatttgggcatctcgctgaaaagccgtattccggtctgggaagagttcgtaccgcgctttaaagccacgatggagctgggcgtctgcgcgatgatttttgccgtcattgtcggtatcccggtgggcgtgctggcggcggttaagcgcggctctatcttcgaccacacctccgttggcctcgcgctgaccggctactctatgcccatcttctggtggggcatgatgctaatcatgctggtgtcggtgcagctcaatctgacgccggtttccgggcgtatcagcgataccgtcttccttgacgataccctgccgttgaccggatttatgctgatcgataccgcgatttggggcgagccgggcgactttattgatgcggtaatgcatatgatcctgcccgcagtggtgctggggacgattcccctggcggtgatcgtgcgtatgacccgttcgtcgatgctggaagtgctgggtgaggattatatccgtaccgcgcgcgcgaaaggcctgacgcggatgcgggtaatcatcgtgcatgctttacgtaacgcgatgctgccggtggtcacggttatcggcctgcaggtcggtacgctgctggcgggggctatcctgaccgaaaccatcttctcctggccgggccttggccgctggctgattgatgcgctgcagcgccgcgactatccggtggtgcagggcggggtgctgctggtggcgacgatgattattctcgtcaacctgctggtcgacctattgtacggcgtggtgaacccgcgtatccggcataagaagtaa

SEQ ID NO: 173459 - DNA, 1689 bp, Klebsiella oxytoca
atgaaatacattaaaacgatgacgcagctgaagctcagtatctggctggcgctgtacatcggctggtttatgaacgctgccgtactcttccgccgcttcgaagggtacgctcaggaatttaccatctggaaaggactctcaggggcagtggaactggtcgggactttcctggtcaccttctttctgctgcgtattttgtcgctgttcggacgccgggtctggcgtatcctcgcgactatcgtcgttctattctccgctgccgccagctattacatgaccttcctgaacgtggtgatcggctacgggattatcgcctcggtgatgaccaccgacatcgacttatccagagaggtgatcggctggcacctgatcctctggctggtgctgatgagcgcgctaccgctgctgcttatctggagcaaccgctgccgcttcacgctgctgcggcaaattcgtacccctggccagcggatgaagaatattacgattgtattgctggcgggattgatggtctgggggccaatccgtttgctggaggtccgtcagaagaacttcgagcggagctcagaggtcgatctgccaagctacggcggcgtagtggctaactcctacctgccgtcaaactggctttcggcgctggggctgtacgcgtgggcgcaggttgatgagtcatcggatactaaatccctgattaatccggcgaaaaaatttacctacgtggcgcccgaagggctcgacgatacctacgtggtgtttatcatcggcgaaaccacccgctgggatcatatggggattctgggctatagccgtaataccacgcctaagctggcgcaggagaaaaacctggtcgcttttcgcggatactcctgcgataccgcgactaagctgtccctgcgctgtatgttcgtccgtcagggcggggcggatgataatccgcagcggacgctgaaagagcagaacgtttttgccgttctgcatcagcttggctttaccggcgacctgtatgccatgcagagcgagatgtggttctacagcaacacgatggcgaacaatatcgcctatcgcgagcagattggcgcggagccgagtaaccgcggcaagagcgttgacgatatgctgctggtggacgaaatgaagcgcggtctggcgaagaatcccaatggtaagcatctgattattctgcataccaaagggtcgcactttaactatacccagcgctatccgcgcagttttgcgcagtggcagccggagtgcgttggcgtcgataataagtgttcgaaggctgagctgattaactcgtatgataacagcgtgacctatgtcgatcactttattgtcagcgtgctggatcagctgcgggataagaaagcgattgttttctatgccgccgaccacggcgagtccattaatgagcgcgagcacttgcacggtacgcctcgcaagatggcgccgccggagcagttccgcgtgccgatgatggtatggatgtcggataagtatctggcgtctcccgatcatgccgcctcttttgctcgtctgaagcagcaggcagccatgaaggtgccgcgccgccacgtagagctgtatgacaccattatgggctgtcttggctatacttcgccggatggcgggattaaccaatataacaactggtgccacgttcctgacgctgcggcgaaaaagccgtag

SEQ ID NO: 173460 - DNA, 1203 bp, Klebsiella oxytoca
atgaacgctgaaaaccgtcaatacacccgctggctcacgctgctcggcactatcattacgcaatttgcgctgggatcggtttatacatggagtttgttcaatagttccctttccgccaagctggacgaaccggtaagccaggtggcgttctcatttggcctgctaagccttggtctggcgctctcctcatccgtggcgggtaaattacaggaacgttttggcgtcaaacgcgtcaccatggcgtcaggcgttctgctgggcctcggtttcttccttaccgctcattcaaacagcctgatgatgctgtggctgagcgcgggcctgctggtggggctggcggatggcgccggctatctgctcacgctgtcaaactgcgtcaaatggttcccggaacgtaaggggctgatctccgccttttccatcggttcttatgggcttggcagcctgggctttaaatttattgattcccatctgctggcgacggtcggccttgagaaaacctttattatctggggcgctatcgtgctggtgatgattgtgttcggcgcgacgctgatgaaagacgcaccgaaccataccgctaccaccaacaacggcgtcgtcgaaaacgacttcacccttgccgaatcgatgcgtaaaccacagtactggatgctggcggtaatgttcctgaccgcctgcatgagcggcctgtacgtgattggcgtggcgaaagatattgcccaggggatggtgcaccttgatgtggcgacggcagctaacgcggtcacggtgatctctatcgctaaccttagcggtcgcctggtgctggggatcctgtctgataaaatgtcccgtattagagtgattaccatcgggcaggttgtttcgcttatcggtatggcggcgctgctgttcgctccgctgaacgccaccactttcttcgccgccattgcctgcgtggcctttaacttcggcggtacgattaccgtcttcccgtcgctggtcagcgaattctttggtctcaataacctggcgaaaaactacggcgtgatttatctcggctttggtatcggcagcatttgcggttccctgattgcgtccttgttcggcggtttctacgtgaccttctgcgtcatctttgcgctgctgattctctccctggcgctatcgaccaccatccgccagccgaaaagtgagatttatcacgaagcgcatgcctga

SEQ ID NO: 173461 - DNA, 645 bp, Klebsiella oxytoca
atgataataaagaaatgcaatggcctccggggattcctggtcccggcgtgcgtatccgtctgggcgtcgtgtgttgccggtgcgaatgcctggcaacaggaatatatcgctatcgatacaaaaagtaatacagcggaacgctatacatgggacagcgatcaccaaccgcgctatgaagatattctcgcggagcggataaatgcggccgacgatccttcaggactggcatttaataaggcagtctccccggcagatagcgcccgcgggatgagcgtcggctggaatttctctctgctcgagggcatgacgtccggtccggtagccagtttacataccgatttgacttcgccgctgcttagccgaaatgccgccggagccggctatgtgaatacgctgggctggcgggtcgattaccagaaattatggggcgtacatccgtgggcgcaggtgagctataaccagggattaacgacggattctggcgggccgaatcgcgcgcaggatggcgcctggcgggacgtgacctttggcgcggatatgtcgcttaacccccatatagccgcctgggcggcgctatcgcaggcggataatgtgccctccggggaaaactatctctatttaatgggcgtgagcgccaatttttaa

SEQ ID NO: 173462 - DNA, 582 bp, Klebsiella oxytoca
atgcaacgttgcggatgggtcagtcaggatcctttatacattgagtatcacgatagcgagtggggcgttgcggaaaagaatcctcgtaagctgtttgagatgatttgccttgagggccagcaggccggactatcgtggatcaccgtgctgaaaaagcgtgaaaactaccgcaacgcttttcaccagtttgacccggttcgcgtcgccgctatgggtgaagaagatattgaacgtctgcttctcgacgccggtattattcgccaccgcggtaaaatccaggccatcatcggcaacgctcgcgccttcctggcaatggaagaaaatggcgaacctttcgcagatttcgtctggtcgttcgtcgacaatcaaccgcaggtgacgaccgccgccacgctggtggagatcccgacaaccacccccgcttctgacgcgctatcgaaagcgctgaaaaaacgcggctttaagtttgtcggctccactatctgctactcctttatgcaggcctgcggtctggtcaatgaccacgtcaccggctgtttctgtcgcacaggaggccaggatgattcaccactgggacgctag

SEQ ID NO: 173463 - DNA, 447 bp, Klebsiella oxytoca
atgattcaccactgggacgctagcgaaaccggcccgctgcttgagctgtggctggaaagtacgatccacgcgcacccgtttatcgccgaaagctactggcatgatagcctggcgatagtgcgcgacgtttatctgcccgccgcccaaacctgggtatgggaacaggatggcatgctgaagggctttatcagcgtaatggaatcccgcttcatcggcgcgctgttcgttgcgccggacgccgtcagacagggtatcggcagcgcgctaatcggcgaagtcaaaaaacactacggctggctcagcctcgaggtatatcagaaaaacgttcaggcggtaaatttctaccatgcgcaaggcttccgcattgaagactgcgcatggcaggatgaaacccagcatccaacctggattatgcattggtcggcggatcaaatgccgtcagcgtaa

SEQ ID NO: 173464 - DNA, 2331 bp, Klebsiella oxytoca
ttgccaacctcatctgccaccaaaactattctgaccgccgcccactggggacccatactggtcgaaaccgatggtgaaaacgtcatctcgtcgcgcggagcgcttgatacgcctttcgccaactccctgcaaactgccgtgcgcgatcaggtgcacagcaaaactcgggtacgttacccgatggtgcgtaagggatttctcgcctcgccagaaagcccacaaggcgtgcgcgggcaggacgagtttgtgcgggtgagctgggagcaggcgctggatctgattcacgctcagcatcgacgcattcgcgacagctatggcccgagcgccatcttcgcgggttcctacggctggcgttctaacggcgtgctgcacaaagcggcgacgctgctccaacgctatatgagcctggcgggcggttataccgggcatctgggcgattattccaccggcgcggcgcaggcgatcatgccgtacgtggttggcggtaatgaggtttatcagcagcagaccagctggccaatggtgctggaacatagcgatgtggtggtgctgtggagcgctaacccattaaatacgctaaaaattgcctggaacgcttccgatgagcagggcatcccgtggttcgatcgtctgcgtcagagcgggaagcgggtgatctgcatcgatccaatgcgatcggaaacggcggaattctttggcgacgcggcggagtggatcgccccgcatatgggcaccgacgtggcgctgatgctcggtatcgcccatacgctggtggaaaacggctggcaggatgacgcgtttttggcccgctgcaccagcggctatgacgttttcgctcgctatctgaccggggagagcgacggaacggccaaaacggcggaatgggcggcggcgatctgcggcattagcgcggaaaaaattcgcgaactggcacaacttttccacgaaaacaccaccatgttaatgtccggctggggaatgcagcgccagcagtttggcgaacaaaagcactggatgctggtgacccttgccgccatgctcggccagattggcaccgagggcggaggctttggcctctcctatcactttgccaacggcggcaaccctacgcgccgcgcggcggtgctggcctcaatgcagggcagcgtggcgggcggtaccgatgcagtggaaaaaatcccggtcgcgcgcatcgttgaagcgctggaaaaccccggggcgtcttatcaacataacggtatggaacgccgcttcccggatatccgctttatctggtgggcgggcggcgccaactttacccatcatcaggataccaatcgcctgatccgcgcctggcaaaagccggagctggtggtgatttccgaatgcttctggaccgcggcggcgcgccatgccgatatcgtcctgcctgcgacaacctcatttgaacgcaacgatatgacgatgaccggcgattacagtaaccagcatctggtgccgatgaagcgggtggtcgcgccgcgcgatgaagcgcgcgatgatttcgaggtcttcgccgatctcagcgagcgctgggaagcgggcggccgggagcgcttcactgagggtaaaaacgatctgcagtggctggagacgttttaccagattgccgcccagcgcggggcggcgcagcaggtttccctgccgccgttcgcccagttctggcaggacaatcagttgattgaaatgccggaaaatcctgaaaacgcgcgtttcgcccgctttgccgccttcagggccgatccgctggcgaatccgctgaaaaccgccagcggaaaaattgaaattcactcgccgaccatcgccgggtttgcttatgcggattgcccgccgcatcctatgtggctggagccggacgagtggcacggcaatgcgcaggcaggccagcttcaggtgctttccgcgcatccggcgcatcgccttcatagccagctcaaccagacgtcgctgcgtgaacggtacgcggtggcgggccgtgaaccgttaacccttcatccgcaggatgcgcaggcgcgcaatattgccgatggcgatctggtgcgggtatggaattcacgcggtcaggtgctggccggcgcagtggtaaccgagggtatccgtccgggggttatctgcctgcatgaaggggcgtggccggatctcgacgctcaggcgggtatctgcaaaaacggtgcggtaaacgtgctcaccaaagatattcccacctcgcggctgggcaacggctgcgccggaaatacggcgctggcctggctggaaaaatataccggacccgagcttacgctgacggcatttgatccgccgaccaatgcataa

SEQ ID NO: 173465 - DNA, 663 bp, Klebsiella oxytoca
atgaaaaaacgcgtactcatgattgcggctatcgttagcggcgcactggtcatttctggctgtaccaccaacccctacactggcgaacgcgaagcgggtaaatccgggatcggcgcgggcattggttcattggtcggcgcaggcgtcggcgtgctctcctcttccaaacatgaccgcggcaaaggcgcgctgattggcgcagcggccggtgcagcgctgggcggcggcatcggttactacatggacgtgcaggaagcgaagctgcgcgacaaaatgcagggaaccggcgtaagcgtgacgcgcaacggtgacaatatcgtactgaatatgccaaacaatgtgaccttcgacagcagcagcgccaatctcaaaccggcaggcgccaataccctgaccggggtggcaatggtgctcaaagagtatgagaaaaccgcggttaacgtggttggctataccgacagtaccggtagccaggatctgaatatgcgtctttctcagcagcgcgcggagagcgtcgccagcgcgcttatcacccagggcgtagcggccagtcgcatccgcacgaccggcatgggtccggcgaaccccatcgccagcaacagcacggcggaagggaaagcgcagaaccgccgcgtggaaattaccctcagcccgctgcagtaa

SEQ ID NO: 173466 - DNA, 1017 bp, Klebsiella oxytoca
atggcgaaagcggcgcgagcaaccattagcgatgtggcgaaagccgcaaagaccggcaaaaccagcatttcacgctatctgaacggcgagaagcacctgctttccgacgatttgctgggacgcattgaaaaagccattgccgagctcgactatcgtcccagcctgatggcccgcggcctgaagcatggccgcacccgactgatcggcctgatcatcgccgatattaccaatccctactccgtcaacgtgctcagcggtattgaagcagcctgtcgtgaaaagggattcaccctactggtatgtaataccaacaacgagctggatcaggaactgcactatctcgacctgctgcgcagctaccaggtcgaggggattgtggtcaacgccgtcgggatgcgcgaggatggccttaaccgcctgcagcagtcggcgctgccgatggtgcttatcgaccgcaagattccggaattcgcctgcgatgtcgtcggcctcgataatacccaggccgccaccacggccaccgaacatctggtggagaaaggcttcgaagcgctgttgttcctcagcgagccccttggctcagtcaatacccgtcgcgagcgcctgagcgcgtttcgccagacgctccagcgccataccggcatcgtcgcggaaaacgccgaagtgccgttgaacgatggcgcgatgctggataacgtcctgcgtcatttccactcccaccatcgcggcatgcgtaaggcggtaatttccgccaacggcgcgctgacgctgcaggtggcacgctccctgaaacgcgttggcctgatttggggcagcgatatcggcctgctgggcttcgatgaactggagtgggccgagctggcgggcgtggggattactacgctcaaacagccgacctggcagattggcttcgccgccgtcgagcaggtggtgcgccggattgaaggcagcaccgacccggtctgcgaaagggtattttccggagagctgatcgtcagaggctcaacctcccgctag

SEQ ID NO: 173467 - DNA, 750 bp, Klebsiella oxytoca
atggccagaaagattattgtcgttaccgccgcgtacgggaatgaccacgttaaagcgctgggcgggcagtccgccgtcctgccgtttatcgccggttccggcgccgatggcgtagagatccgccgcgaactgttcacccctgatgaactgtcccgcctggcggaattagcggccgacattgagcggcgcggcctgctggtctgctattccgcgccggaagccctgtttgccgcagacggctcgctcaacccgcgtcttagcgactttttgctggaagcgcaaacgctcaacgcgctgtggctgaagctctcgctgggccactttagccaccacgatgacctcgaagccctgcgcgaaattctgcaggagagcgggatggcgctggtggtggaaaacgaccaaaccgactgcggccagctggcgccgatgcagcgcttcaaagccgcctgccgggttaatcagctgccgatcaccctcacctttgatatgggcaattggctatgggtcggcgactcgccggaagaggctgctcgccacctggccccggccgttagctatattcatgttaaggcggctgagccgcaccattcgcagtttcgcgccgtgccgccggatgaagcctccgcacgctggctggcgctgctcaacaacctgcccgccgatgccccgcgggggatcgaatttccgctgactggccatgacctgacggccgtgacccgccgctacgtcaagctgttacgcgaggattaa

SEQ ID NO: 173468 - DNA, 939 bp, Klebsiella oxytoca
atgcaaaaaccattagatgtcatcacgataggcgaagcgatggcgatgtttgtcgccaccgaaaccggcgagctggccgatgttgaacactttatgaagcgcgtggcgggcgcggagctgaacgtcgcgaccggtctggcccgcctcggcttaagcgtcggctgggtaagccgcgttggcgcggacagctttggccgcttcgtcctcaatacgctggcgaaggaggggatcgacgcctgcggcgtgagcaccgatagccgctacgctaccggctttcagctgaaatctaaagttgaaaatggaaccgatcccatcgtggaatacttccgtaaaggatccgccgccagccatctttcgccggacgactttaacgaatcgtacttcgccagcgcccgccacctgcacttaagcggcgtggccgccgcgctgtcggaaagttcatacgccctgctggaccgcgcggcacgcaccatgaaggcgcagggaaaaaccatttcgttcgaccccaatctgcggccggtgctgtggaaaagcgaagccgaaatggtggagaagcttaaccagctcgcattccaggccgactgggttctgccgggtttaaaagaaggcatgattctgaccggccagcaaacgccggaagctattgcggacttttatctccgccacggtgttcgcgcggtcatcattaaaaccggaaccgatggcgcctggtataaaaccgccgacggcgaacagggggccgtcgcggcaataaaagtggataacgtcgtcgataccgtcggcgcgggcgatggttttgccgtcggagtcatcagcgccctgttggaaggaaaaccgctgcagcaggcggtaaaacgtggaaataaaattggctccctggccatacaggttcagggcgatagcgaaggcttacccacgcgcgaggcgctggacgagtaa

SEQ ID NO: 173469 - DNA, 1281 bp, Klebsiella oxytoca
atgaatagttcaacgaatgcaacaaaacgctggtggtacatcatgcctatcgtgtttatcacgtatagcctggcatacctcgaccgcgctaacttcagcttcgcttcggcggccggtattaccgaagacctggggatcaccaaaggtatctcctccctgctgggagcgctgttcttcctcggctacttcttctttcagatccccggcgcgatttacgccgaacgccgcagcgtacgtaaactgatttttatctgtctgatcctgtggggtgcctgcgcctcgctgaccgggatggtgcacaatatccccgcgctggcggcgattcgctttatccttggcgttgtcgaggctgcggtcatgccggcgatgctgatttacatcagcaactggtttacgaaatctgaacgctcccgcgccaataccttcctgatcctcggtaacccggtgacggtgctgtggatgtcggtcgtatccggctatctcatccaggctttcggctggcgggaaatgtttattattgaaggggttccggcggtaatttgggccttctgctggtgggtgctggtaaaagataaaccgtcgcaggtcaactggctggcggaaagtgaaaaagccgcgttacaggagcagctggagcgtgaacagcagggtatcaaaccggtgcgcaactacggcgaagccttccgctcgcgcaatgttatcctgctgtgcatgcagtatttcgcctggagcatcggggtttacggtttcgttctgtggctgccgtccattatccgcagcggcggcgagaatatgggcatggtcgaagtcggctggctctcctcggttccctatctggcggcgaccatcgcgatgatcgtagtctcctgggcctctgataaaatgcagaaccgcaagctgtttgtctggccgctgctgctgattgccgccttcgcctttattggttcctgggccgttggcgccaaccatttctggatctcgtacaccctgctggtgattgccggcgcggcgatgtacgccccctacgggccgttcttcgccatcattcctgagatgctgccgcgcaacgtcgccggcggcgccatggcgctgattaacagcatgggcgcgctgggttcgttcttcggttcatggtttgtcggttacctgaacggcaccaccggcagccccgcagcctcgtacattttcatgggagtggcgcttttcgtctcggtatggcttactttgattgttaagcctgctaataatcaaaaacttccgcttggcgcacgtcacgcctga

SEQ ID NO: 173470 - DNA, 972 bp, Klebsiella oxytoca
atgaagccgtcagttattctctacaaaacgcttcccgacgacctgcaacagcgtctggaacaacactttaccgtcactcaggtgaaaaacctgcgtccggagaccgtttcgcagcacgccgacgcgttcgctgaagcggttggcctgctgggttccagcgaaaaagtcgataccgcgttactggagaaaatgcccaagcttcgtgcgacctcgaccatttccgtcggttacgataacttcgacgtcgaggcgctgaatgcgcgtaaggtgctgctgatgcacaccccgaccgtgctgaccgaaaccgtcgccgataccgtaatggccctggtactgagcaccgcgcgtcgggtggttgaggtggccaaccgcgtgaaggccggggagtggaccaaaagcatcggttcggactggtttggcaacgatgtgcatcataaaaccctcggcatcgtgggtatggggcgtatcgggatggcgctcgcccagcgcgcccacgcgggcttcggtatgccgattctctacaatgcccgccgccagcacccgcaggcggaagagcgctttaacgcccgctattgcgatctcgataccctgctgcaggaagcggattttgtctgcctgatcctaccgctgaccgacgagacttatcatctgttcggcaaagaacagttcgccaaaatgaagtccagcgccatctttattaacgccgggcgcggcccggtagtggacgaaaaggcgctgattgccgcgctgcaggaaggggttattcacgccgccggactggacgttttcgaacaagagccgctggcgaaagactccccgctgctgactatgccgaacgttgttgccgtgccgcatattggctccgcaacgcatgaaacccgctataacatggcggcctgcgcggtggataacctgattaatgctctgaacggtaaagtggaaaagaactgcgtgaatccgcaggtgaagtga

SEQ ID NO: 173471 - DNA, 711 bp, Klebsiella oxytoca
atggcgacaggaaagtcctgctctcgctggtttgcggctattgcggccctgttaatggtggttagcctgagtgggtgttttgataaagaaggcgatcagcgcaaagcgttcatcgatttcctgcaaaatacggcaatgcgtagcggcgaacgtctgccgacgctgaccgccgatcagaaaaaacagtttgggcctttcgtttccgattatgcggtgatttatggctattcacagcaggtaagccaggcgatggatgcgggtttgcgtccggtggtggatagcgtaaacgcgatccgcgtaccgcaggattatgtcacccagcgcgagccgctgcgtcaggcaaacggcgccctcggcgtactgagccagcagctggagaatgcaaaaatgcaggcggatgccgctcacggcgcgctgaagcagggggacgatctcaagccggtcttcgaccaggtgtataataaagtcgtgaccgcgccggcgaatgcgctacagccgcttattccggccgctcaggtctttacccagcagctggtgcaggtaggcgattttattgctcagcaagaatcccaggttagctttgcggcgaacggtattcagttcccgacttcgcagcaggccagccagtacaatacgctgattgggccgctggccgctcagcaccaggccttcaaccaggcgtggacggcagctgttaacgcgactcgttaa

SEQ ID NO: 173472 - DNA, 1359 bp, Klebsiella oxytoca
atgaagaaaacaaccatcgatattcaggcttttatcaatgaacatcccttcacgaaataccagtggatgattctggccttatgttttatcaccgtcgcgatggacggattcgataccgcgataatcggctttatcgcctctgacttggtgcaggaatggggcgtcgaaaaatcggcgttaggcccggtgatgagcgccgccttagtcgggctcgccgtcggcgcgctgaccgccggaccgctcgccgatcgcgttggacgcaaaaaagttctgattttgtccattgtggttttcggcggcttcagcctgctgaccgcctttgctaccagccttaatcagctaacgctgctgcgttttctcaccggccttgggctgggtgccgccatgccgaacgccgcgacgctgatgagtgaatatgcccctgagcgccgcagagcgctaatggtcaatctgatgttcgttggctttccaatgggctcctcgctgggcggttttctctccgcctggatgatcccccattacggctggcaaagcgtgctggtgctcggtggcgtaatgccgctgctgctggcggtcgttttgatcttttttctaccggaatccgcgcgctatatggtggtcaaacgccagcctgcgcagcgtatcgccgcgatcctgcgccgcatcgcacctgttcctgagcaggcggaatttgagctacgcgaagcgggccaggtaaaagagaaatcgtccatcggcgtgattttttctccgcgctacgccgtcggcaccgtgatgctttgcctgacctactttatgggcctgctgatcttctatttactgaccagctggctgccgctgctcatccgcgaaaccggggcgacgatgagccaggcctccattatcaccgcgctgttcccgctgggtggcggcattggcgtactcattctcggcgcgctgatggataagctcaatccaaacaaagtcgtggcggtaggctggctgctgacgggggtctttgtttgtctggtcggtttctcaacccataacctgctgctgatggggattatggtatttatcgccggcagcattatgaacggcgcgcaatcgtcgatgccggcgctggctgccggcttctatcccactcaaggacgcgcaaccggcgtggcctggatgctgggtattggccgctttggcggcattctcggggcgtttagcggcgcattcctgatgcaggcccagttctctttcgaaacaattttctccctgctggctatcccggcatttctgtcggccatcgccctgctggtgaaatataagctgggtcagcggcaacctgcggctgcgccaggcgaagtggagaagctgcaaaaggcgtaa

SEQ ID NO: 173473 - DNA, 294 bp, Klebsiella oxytoca
atggaatataaagatcctgcatttgaactgctgagcaaccttgaacaaattatttttaaagatcaggctcaggcggcctccctgacgcgtaagcccgccgcatgcattgaatttgaccagctacgcaaaggtaccgggctgaaaacagatgattttgccaacgccatgggcgtcagcgtagcaatggtacaagagtgggagtcaagacgcgtacggccttcgcccacggagcttaagctgatgcgcctgatacaggccaatccgcagctttcaagacagcttattgattcataa

SEQ ID NO: 173474 - DNA, 213 bp, Klebsiella oxytoca
atgtccggtaaaatgactggtatcgtaaaatggttcaacgctgacaaaggctttggcttcatcactcctgacgatggctctaaagacgtgttcgtacacttctctgctatccagaacgatggctacaaatctctggacgaaggtcagaaagtttccttcaccatcgaaagcggcgctaaaggcccggcagctggcaacgtaaccagcctgtaa

SEQ ID NO: 173475 - DNA, 1620 bp, Klebsiella oxytoca
atggctcattgtgcccagatcccctcttttattttgcatcaggtcacctgtcactttgcgacaggagataccctttttggtccgctgaatttatcgctggactcctctctttgtggccttgtcgggcgcaacggcgtcggtaaaacccggcttttacgcttgctggcgggccatgacacaccgtctggcggccacatcgagcgcatggtttccggaagctacgttgctcagctgcgggatagggcttcagagatgacgctggcggaattgctgggcctggagtccattttcgctgctctcgctcgccttgatcgaggagagggacgaagtaacgatcttgaacgtcttgatggtttttgggatctcccggatcgtctggatacggcgtttcttgcggctggcttaggtacattttctcctgcacggcccgcctcttcgctgagcggcggtgaaagagtgaaggcgcagctttgcggggcattcctgtccggcgccgattttcttctgcttgatgaacccaccaaccatctcgaccgtccgggacgcgagtggctgtatcagcagcttaaacaatggcgcggcggggcgctaattgccagccatgaccgggagttattagcggtcatgccgcgtatccttgagctgacgcctgcggctttgcgtcgctacggcggcaactatgcggattatcagcagcagcgtgagctggaacagcaggcggctcgctccgcgctggatcatgccgtcgctgaacggcgccgtacccgcgcgcggatgcacaaagagcacgatgcctgccagcggcgttccgcgcaaacgttacgcaccgtcgatacgctaaatatcgcgtcattcgagcgggttgcctggaaaggcgcggcaaaagaacgtcccggcagcctgcagcgccagcatcgacagcaaaatggcgcccttaacaacgcggtagtacaggcgcgggagagagtggaagaggagagcccggtgatgtttacgttacctggcaaccggatagccccgggaaaacaggtgctggaactggatgcggtgcggttggcgcatacgatgttggcaccgctgagctggcggatggatgggccaatgcgggtggcgctgcgtggtcccaacggctgcggtaaaaccacgttgctgaaaacgctgctgggtctggagctgccgatcgctggacgctgccgcttatcggttaacgcggcgtatctggaccagcatctgacccagctggacctgtcattatcggttatgaagcacctgaacctcggcgatacgcccttagaagaaggcgcgttgcgtagccagctggcgcagctacagctgggggcggataaagtcgatctgccgctatcggccctgagcggaggcgagagactgaaggcggcgctggcctgcgtactctggcggcgtgatgccacgcagcttctgctgctggacgagcccacgaatcatctcgatttggcctccactcaggcgattgaaaaagcgctggcccggtttcccggtgcgatgctggtggtctcgcatgatgaagctttcttgcaggcgctgaagctgacccacagtctgacatggcgggaagatggctggtgctttgagaggctataa

SEQ ID NO: 173476 - DNA, 213 bp, Klebsiella oxytoca
atgcatgaacaccataagagtagcctcttacctgttgaaaatcaacacgggaggcgaggaatgccgcaaaagtatctgttgtttagcttaatagtgatttgcttcactattttactatttacctggatggtgcgtgattcgctgtgtgaattacagctcagacaggggaatattgagctggtggcgttcttagcctgtgggattaaaacgtaa

SEQ ID NO: 173477 - DNA, 2070 bp, Klebsiella oxytoca
atgtctgagaaaactttcctggtggaaatcggcactgaagaactgccaccaaaagccctgcgcagcctggctgaatcctttgctgcgaacgtgaccgcagagctggataacgctggcctagcgcacggtaaagttgaatggtttgccgcgccgcgccgtctggcgctgaaagtggcgaatctggcggctgcgcaagcagaccgcgaagtcgaaaaacgcggtccggcgattgcccaggcgtttgacgccagcggccacccgagtaaagcggccgaaggctgggcgcgcggctgcggtatcaccgtcgatcaggcggaacgtctgacgaccgataagggcgaatggctgctgtatcgtgctcacgtgaaaggcgagagcaccgaagcgctgctgccgaacatgatcgcaacctcgttggcgaagctgccgatcccgaaactgatgcgctggggcgcgtctgacgtccacttcgtgcgtccggttcataccgtgaccctgctgctgggcgacaaagtcatcccggcaactattctgggcgtccagtccgatcgcgttattcgcggccaccgctttatgggcgaggctgagttcactatcgacaatgccgatcagtatccgcagatcctgctggagcgcggtaaagtcatcgccgattacgaacagcgtaaagccaaaattaaagccgatgcagaagaagcagcgcgtaaaattggcggcaacgccgatctgagcgaaagtctgctggaagaggtgacttcactggtggaatggccggtagtcctcaccgcgaagttcgaagagaaattccttgcggtgcctgccgaagcgctggtttacaccatgaagggcgaccagaagtacttcccggtttacgacaacgcgggcaagctgctgccgaacttcatcttcgtcgccaacattgagtcgaaagatccgcagcagattatctccggtaacgagaaagtggttcgcccgcgcctggcggatgctgagttcttcttcaatactgaccgtaaaaaacgtctggaagataaccttccgcgtctgcaaaccgtcctgttccagcagcaactgggtacgctgcgcgataagaccgatcgtattcaggcgctggccggctggatcgccgagcagattggcgctgacgtgaatcatgccacccgcgcgggcctgctctccaagtgcgacctgatgaccaacatggtcttcgagttcaccgatacgcagggcgtgatgggcatgcactacgcgcgccatgatggcgaagcggaagacgttgcggttgccctgaacgagcagtatcagccgcgctttgctggcgatgacctgccgtctaacccggtagcctgcgcggttgcgattgccgataagatggacaccctggcgggtatctttggcatcggtcagcatccgaaaggcgataaggacccgtttgcgctgcgccgcgccgcgctgggcgtgctgcgtattatcgttgagaagaacctcaatctggacctgcagaccctcaccgaagaagcggtacgtctgtacggcgataagctgaccaacggcaacgtcgttgatgatgttatcgacttcatgctgggacgcttccgcgcctggtatcaggatgaaggctataccgtcgacacgattcaggcggtgctggcgcgtcgtccgacccgtccggcagacttcgatgcgcgtatgaaggcggtttcccacttccgtaccctcgaagagtcctctgcgctggcggcggccaacaagcgtgtttctaacattctggcgaaatcagacgttacgctgaacgatatcgtccatgcttcggtattgaaagaagcggccgagatcaagctggcgggcaatttagtcgtgctgcgcgataagctgcagccgtacttcgccgaagggcgttaccaggatgcgctgattgagctggcgtccctgcgcgagccggtggatgagttttttgaaaacgtgatggtgaacgcagaagatcaggacgtgcgcgtaaaccgactgacgctgctgtccaagctgcgcgatctgttcctgcaggtagcggatatttccctgctgcagtaa

SEQ ID NO: 173478 - DNA, 912 bp, Klebsiella oxytoca
atgcaaaagtttgataccaggaccttccagggcctgatcctgaccttacaggattactgggctcgccagggctgcaccattgttcaaccactggacatggaagtcggcgcaggcacctctcacccgatgacctgcttacgcgcattgggtccagagccgatggcgaccgcctacgtgcagccgtctcgtcgcccgaccgatggccgttacggtgaaaacccgaaccgcttacagcactactatcagttccaggtagtgataaaaccctccccggagaacatccaggagctctaccttggctcgctgaaagagctgggtatggacccgaccatccacgacattcgcttcgtcgaagacaactgggaaaacccgacgctgggcgcctggggtctgggttgggaagtgtggctgaacggtatggaagtcacgcagttcacctacttccagcaggtgggcggtctggagtgtaagccggttaccggcgagatcacctacggtctggaacgtctggcgatgtatatccagggtgtcgacagcgtttacgatctggtctggagcgatggcccgctggggaaaacgacctacggcgacgtgttccatcagaacgaagtggagcaatccacctataacttcgaatacgctgacgtggacttcctgttctcctgcttcgagcagtacgagaaagaagcccagcagctgctggcgctggaaaacccgctgccgctgcctgcctacgagcgcattctcaaagccgcccatagctttaacctgctggacgcgcgtaaagccatctccgtcaccgagcgtcagcgctatatcctgcgcattcgcaccctgaccaaagcagtggctgaagcttactatgcttcccgtgaagcccttggcttcccgatgtgcaacaagaataaataa

SEQ ID NO: 173479 - DNA, 306 bp, Klebsiella oxytoca
atggtgatgaaatatgcgttttctggactactgctgtgcctgctggcgggctgtagcgcaacgccgcctcagcctacgcagaaggcgcagaaagcgcggataacgccgcagaccaccctcaatatggagcagctttgcaaggataatgccgccgtccgttataatacaggcgtgcgccaggtggacgtcagccatttcgaacagttccagggcagctttgagctttcgggcaagactgcgcggaatgaacgctttatctgttcttttgacccggacgggcagtttttacatctttcgatgcgctaa

SEQ ID NO: 173480 - DNA, 996 bp, Klebsiella oxytoca
atgcaggaaaaaatacactggattactaatttgcgcggcattgcctgtctgatggtcgtcatgattcatagcactacctggtatattacgcacccgcacgcgattagcctgctggagtgggatttggccaatatcctcaactctgcgtcccgcgtcagcgtaccgctatttttcatgatttcaggctatctgtttttcggtgagcgcagcgcccagccccgccattttctgcgtatcgcgctgtgcattctcttctacagcacgctatcgctgctctatatcaccctgttcacccatatcaacgttgagctgtcgctgaagaatttgctgcaaaaaccggtgttctaccatctgtggtttttcttcgccatcgtcgtgatatatctgctttcgccgctggtgcaggttaaacaggtaagcggcaggatgctgctggcgctgatgctggtactgggcattctggcgaaccccaatatggtccaggtaaaagccggaggcgttgaatggttgccgttcaatctttatatcaatggcgacacgttttactacgtgatgtatggcgtgctgggacgggctatcggcatgctggataccgagaaaaaatggctgaccgccctctgcgccgcgctgttcatcgccggcgtgtgggtaatctcacgcggcacgctgcacgagctgcgctggcgcggcgatttcggcgatacctggtatttatactgcggtcctgcggtttttgtctgcgccatcgctctgctgacgctggtaaaaaacacgctcaatcggcgtcagctgccgcttattgcgccgattgcgcgccattctttagggatttacggttttcatgcgctgatcattcacgcgctgcgcgccagcgggcttgaactaagccgctggccgttactggatattatctggatattcagcgccgcgctgctgggcagcttactgctctcggctctggttcagcggtttgatagccgccgtttcgtcagctaa

SEQ ID NO: 173481 - DNA, 381 bp, Klebsiella oxytoca
atgaaaaataagaatattgcgccgaaactgttgatggtcatcggggcgctggtgtatctgatggggatctggcacacctgtccgttatttagcggtaaaggctatttcctcggcgtactggtgatggggatgttcgccatgctggcccatcagcgcacgatgcaggaggagcgcagaaatgacgacgggtttgtatcgctatgccgactggtgctcctgctttcgcttggcctgttaatggtcggcgcgaggtttgtacctgccggttgggatgagaaaagcatctacgtggcggcctggtttgtgtgcatgtacggcgcgtcagccttgccgcataaagcactggcggcgggcgtggcgccgcaagaccctacggaatag

SEQ ID NO: 173482 - DNA, 1455 bp, Klebsiella oxytoca
atgtatatcgggattgatctgggcacctcgggcgtcaaagctattctgctcaatgagcagggcgaggtcgtggcttcgcatactgaaaagctcaacgtgtcacgtccgcaccctctatggtctgaacaggaccccgaacactggtggcaggcgacggaccgcgcgatgaaagcgctgggcgcgcagcactcgctgcgcgaagtcaaagcgttaggtattgcgggccagatgcacggcgcgacgctgctggataagcaacagcgcgtcctgcgcccggcgattttatggaatgatggccgctgcggtgaagagtgcgcgctgctggaagagaaagtcagccgctcgcggcagataaccggcaacctgatgatgccgggattcaccgcgccgaagctgctgtgggtacaacgccacgagcgtgagatcttcgagcgggttgataaagtcctgctgcctaaagattatctacgtttacgcatgaccggcgagtttgccagcgatatgtccgatgccgctggaacgatgtggatggacgtagcgcgaagggactggagcgatgagatgctcgccgcctgcggtctgaaccgcgacaacatgccgacgctgttcgaaggatgtgaagtgacgggggcgctgcgcccgacggttgcgcagtcgtggaatatgccggaagcgctggtggtagccggcggcggcgataacgcagccggtgcggttggcgtaggtatggcggatgcggggcaggcgatgctgtcgctggggacctcgggcgtctactttgcggtcagcgacggctttcttagtaagccggaaagcgccgtacacagtttctgccacgcgctgcccgggcgctggcacctgatgtcggtgatgctgagcgcggcttcctgtctggattgggcggcgacattaaccggccttggcacggttccggcgttgattgcggcggcggagtcggcgaacgagagtgccaatcctatctggtttctgccttacctctccggtgaacgtactccgcacaacaatccgcaggcgaaaggcgtctttttcggcctgactcatcaacatggtccggcggagctggcgcgggcggtgctggagggcgtcggttatgcgctggcggatggcatggatgtggtgcactcctgcggcgtgaagccggaaagcgtgacgctgattggcggcggcgcgcgcagcgcgtactggcggcaaatgctggcggatatcagcggtcagcagcttgatttccgcaccggcggcgacgtgggaccagcgcttggcgcggcgcgactggcgcagctggcgctgcataaaaacgtcgcattctccgatctgctgccgcagctcccgctggagcaggcccactgccctgatgacgaacgttttgcccgctacgccccccgtcgggagacattccgacagatttatcagcagcttttaccgctgatgtcgtaa

SEQ ID NO: 173483 - DNA, 1323 bp, Klebsiella oxytoca
atgcagacctattttgatcaactcgatcgcgttcgttatgaaggcccgacatccgctaacccactggctttccgtcattacaacccggatgaactggtgctgggcaaacggatggaagagcacctgcgctttgcggcctgctactggcacaccttctgctggaatggtgctgacatgtttggcgtgggctcctttaaccgcccgtggcagcagccgggcgaagcgctggaaatggcgaaacgcaaagcggatgtcgcgtttgagtttttccacaaactgaacgtaccgtactactgtttccacgacgttgacgtttcccctgaaggggcatcgctgaaagagtatgccaacaactttgcgcaaatggttgaagtgctggcggaaaaacagcagcagagcggcgtcaagctgctgtggggaacggcaaactgctttacgaacccgcgctatggcgccggggcggcaaccaatccggatccggaagtgttcagctgggcggcgactcaggtggtcaccgcaatggatgcgacccacaagctgggcggcgaaaactatgtcctgtggggcggccgtgaaggttatgaaaccctgctgaataccgatctgcgtcaggagcgcgagcagattggccgctttatgcagctggtcgttgagcacaaacacaagattggcttccagggtacgctgctgattgaacccaaaccgcaggagccaaccaaacatcagtacgattacgacgcttctaccgtctatggtttcctgaaacagttcggcctggaaaaagagatcaaactgaacatcgaagcgaaccacgcgacgctggccggtcatacgttccatcacgaaattgcgactgccattgctctgggactgtttggttccgttgacgctaaccgcggcgacccgcagctgggctgggataccgaccagttcccgaacagcgttgaagaaaacgcgctggtgatgtacgaaatcctgaaagcgggtggtttcaccaccggcggcctgaactttgatgctaaagtgcgtcgtcagagcaccgataaatacgacctgttctacggccatatcggcgcaatggacaccatggcgctggcgctgaaagttgccgcgcgcatgattgaaggcggcgagctggataaacgcgttgccaaacgttatgccggctggaacggcgagctgggtcagcagatcctgaaaggccagatgaacctggcggatattgctcgctatgccactcagcatgacctggcgccgcagcaccagagcggccatcaggaactgctggaaaatgtggtaaaccgctacctttttgatcgctaa

SEQ ID NO: 173484 - DNA, 993 bp, Klebsiella oxytoca
atgaagataaagaacctttgcctaacgctctgtgcttcactcctcctcaccagcctgtcgggcattgcgaaagaagttaaaattggcatggcgattgacgacctgcgtcttgagcgctggcaaaaagatcgcgatatttttgtcaataaagctgaatcattaggtgcaaaagtattcgtccagtcagccaatggcaacgaagaaacgcaaatgtcgcaaatcgaaaacatgattaatcgcggcgtcgacgttctggttattattccctataacggtcaagtgctgagtaatgtgataaaagaggctaaacaggagggaattaaagttctcgcctacgatcgtctcatcaataatgccgacattgatttttatatttcttttaataatgagaaagtgggcgaaatgcaggcgcaaagcctggtcgataaagtgcctcagggtaactatttcttaatgggcggctcgcccgttgataataacgccaagcttttccgcgctggccaaatgaaagtccttaagccctatattgatgaaggcaaaattaaagtcgtcggcgatcagtgggttgacggatggctacctgaaaacgcattgaaaattatggaaaacgccctgaccgccaacaataacaaaattgatgcggttgtcgcctctaacgatgccaccgctggcggcgccattcaggccctgagcgcccaggggctcgcaggcaaagtggcgatctccggtcaggatgccgacctcgccggcgtgaagcgcattatcgctggcacccaaacgatgaccgtctacaaaccgatcgccacccttgccaccaccgcggcggagattgccgtcgaactgggcaacgacaaacagccgaaggctgacgccacgctcaacaacggcctgaaagatgtcccttctcgtctgctgacgcccattgaagtcaataaagacaacattgaccagacggtgatcaaagacggtttccataaaaaaagcgagctgtaa

SEQ ID NO: 173485 - DNA, 1539 bp, Klebsiella oxytoca
atgtcctggttactcgaaatgaaaaacatgactaaaaccttcggcgcggtgaaggcgattgataatgtcagcctgcggctgaacgccggggaagtggtctcattatgcggagaaaacggctccgggaaatctacgctcatgaaggtgctttgcggaatatacccgcacggtagctatgagggagagattattttttccggagaaactttgcagccgggccatattcgcgataccgaacgcaaaggaattgccatcattcatcaggagctggcgctggtaaaacacctgaccgttctggagaatatttttctcggcgcggagatctcccgccacggtctgctggattacgaaaccatgaccttacgctgcgagaagctgctggcccaggtcaatttagccatatcacccgacacccgcgtcggcgatttaggccttggccagcagcagctggtcgaaatagcgaaagcgctaaataaacaggtacggttgttaattctcgacgaacccaccgcctcattaacggaacaagaaacggccattctgctgaatattattcgcgatctgcaaaatcacggtattgcctgtatttacatttcccacaaactcaatgaagtcaaagcgatatccaatactatctgcgtgatccgcgatgggcagcatatcggtacccgtaacgctgacggcatgaacgaagatgacatcatcaccatgatggtcggccgcgagcttaccgccctctatccgaacgaagcccatagctgcggcgatgaaatcctgcgcgtagaaaatttaaccgcctggcatccggtcaatcgccacattaagcgggtcaatgacgtctccttttcactgcggcgcggcgaaattctggggatagccggactggtcggcgcgggtcgtaccgaagcggtacagtgcctgtttggcgtctggccgggccgctggcaggggaaaattttcatcgatggccagcaggtgacgattcacaactgccagcaggccatcgcgcagggcatcgccatggtgccggaagacagaaagaaagacggcatcgtgccggtgatggcggtgggtaaaaatatcaccctcgccgcgttaaaccagtttaccggcccgctgagcagccttgacgatgccggagagcagcactgcattcagcaatccatccagcgtttgaaaatcaaaacctcatcgccagagctggcgatcggtcgcctgagcggcggcaatcagcaaaaggcgatcctcgcccgctgcctgctgctgaacccgcgcattctgatactcgatgagcctacccgcggcattgatatcggcgccaagtacgaaatctacaagttgattaatcagctggtgcagcaggggatcgccgtcattgtcatttcatccgaactgcccgaagtactggggctaagcgatcgggtgctggtgatgcatgagggcaaactgaaggccgatttgattaatcagggcctgacacaggaacaggtgatggaagccgcactgaggagcgaacgccatgtcgaagaacacgtctga

SEQ ID NO: 173486 - DNA, 1179 bp, Klebsiella oxytoca
atgtcgaagaacacgtctgaaatgaaactcaccccgcccgtctccggggctttttccgggctaaaagggatgaatctccaggtattcgtgatgatcgccgctatcgtggccattatgctgtttttcacctggactaccgaaggcgcttatctgagcgcgcgtaatatctctaacctgctgcgccagaccgccatcaccggcattctcgcggtcggcatggtgtttgtgattatttccgccgagatcgatctttccgtcggctcgatgatgggcctgctcggtggcacagcggcaatatttgacgtctggctcggctggccgctgccgctgacgattgtgatcacgctggcgcttggcctgctgctgggcgcatggaacggttggtgggtcgcctaccgtaaagtcccgtcgtttatcgtgacgctcgccggtatgctggcattccgcggtattctgataggtatcaccaacgggaccaccgtctctcccaccagcccggcgatgtcgcaaatcggccagagctatctgcctgatggtattggctttggtatcggcgtggcgggaatggcggcctttattatctggcaatggcgcggccgtatgcgacgtcaggccctgggacttgccacgcccgcttccgcttcgaccgtaggtcgccagacgattaccgccgttattgtgctgggcgctatctggctattaaacgactatcgcggcgtcccgacgccggtactgattctcgccgcgttgctgctggcgggtatgtttatggccacccgcaccgcgtttggccgccgcatctacgccatcggcggcaacctggaagccgcgcgtctatccggcattagcgtggaacgcaccaagctggcggtgttcgccattaatggcctgatggtggcgattgccgggttgattctcagttcgcgcctgggcgccggttctccttccgccggcaacatcgccgaattggacgccatcgccgcctgcgtgatcggcggaaccagcctcgccggcggcgtcggcagcgttgccggcgcggtcatgggcgcgtttatcatgtccgcgctggacaacggcatgagcatgatggatgtcgccaccttctggcagtacatcgttaaaggggtcattttattactcgcggtgtggatggattcagccaccaaacgccggagctga

SEQ ID NO: 173487 - DNA, 1179 bp, Klebsiella oxytoca
atgtttgaaaagcgtcaccgtattacgttgttattcaacgccaacaaggcctatgaccgccaggtcgttgagggcgtcggcgaatatttacaagcatcgcaattggaatgggatatcttcattgaggaagattttcgggcgcgaattgaaaacatcaaggagtggttaggcgacggcgttattgccgattacgacgacccggagattgaaaacctgctgctcgacgttaatgttccaattgtcggcgtcggcggctccttccaccgcccggagtgctatccgccggttcactacatcgctaccgacaacgccgcgctggtcgagagcgccttcctccatctgaaggaaaagggcattaaccgctttgccttttacggcctgcccacatccagctgtaaaggctgggccgcagagcgcgagcatgctttttgtcaactggtcgccagagagaaatatcgcggcgtggtctatcaggggctcgagacagcgccggaaaactggcagcatgcgcaaaatcgcctcgccgactggctacaaaccctgccgccgcaaaccggcattatcgccgtcaccgacgcccgcgcccgtcatgtgttacaggcctgcgagctgttgcatatccccgttccggaaaagctgtgcgttattggcattgataacgaagagcttacccgctatttgtcgcgcgtggcgctgtcttccgttgctcagggcacccgccagatgggctatcaggcggcaaagctgctgcatcgtctgctggagaatgaagagctgccgcttcaacgacagcttatcccgccgatgcgcgtagtagagcgccgctccaccgactaccgttcgctaaccgacccttcggttatccaggcgatgcactatattcgtaaccacgcctgtaaagggattaaggtagagcaggtactggacgccgtaggcatttcccgctcgaatctggaaaaacgcttcaaagaggaagtgggcgagaccattcatacggtgatccacagcgagaagctggaaaaagcgcgcagcctgctggtttcaaccaccctgtcgattaatgaaatctcgcagatgtgcggctatccgtcgttgcagtacttctattcggtgtttaagaaagagtacgacgtgacgccgaaggagtatcgcgatcggcacagtgaagtcatgatgtag

SEQ ID NO: 173488 - DNA, 564 bp, Klebsiella oxytoca
atgccttatattacgaaacagaatcaggtgattactgccgatcgtaactggctggtttccaagcagtacgatgcgcgctggtcgccgagcgagcgtacgcgcctgaaagagatcgcctcgcgctataaagtgaagtggtccggcaatactcgccatattccatggaactcgttgcttgaacgcgtcgatattatcccgaacagtatggttgcaaccatggcggcggcggaaagcggctggggaacgtcaaaactggcgcgcgttaacaacaatctgtttggtatgaagtgtggcggtggaaactgccgcggcgcggtgaagggctactcgcagtttgattcggtggaagagtccgttcaggcctacgtgagaaacctgaatacgcatccggcttattcatcgttccgtaaatcgcgtgcgcagctgcgcaaggccgatcaggaagtgaccgccagcaccatgattcataagctgaagggctattcgactaaagggtcgagctataacaactatctcttcgccatgtatcaggataaccagcggttgattgccgcgcatatgtaa

SEQ ID NO: 173489 - DNA, 2031 bp, Klebsiella oxytoca
atgaaactcgctgcgcttgcgtcgctgctgttgcctgggatggccttcgccgcctggactaccgcagacttccccgccttcaccgaagagggcaccggcagatttatcagtcaaaacgaggtagcaaagggtacgcgcccgctgcgaattaattttgaccaacagtgctggcagcccgctggcatgatcaagctcaaccagatgctctcgatggaaccctgtcgcgacccggtgccgcagtggcgcatctttcgcgacgggcgctataccctggaagtggacacccgttcgggtacgccaaccctgatggtctcccttgaggagaaacagtccgctgccgccgcgccgcagatcaagcagtgtccgaaatgggatggcaagccgctgaccattgacgtcagtaaatcctttgccgaaggcagtaaagttcgcgacttttacagcggcaatatcgcgaccgtcagcggcggtaaaattaccctccagccggcgtttaacagcaatggtcttctgctgcttgagcgcgcggaaaccgaatccgccgcgccgttcaactggcacaacgccaccgtctatttcgttctgaccgatcgctttgttaacggcaacccggccaacgacaatagctatggccgccacaaagacggcatgcaggaaatcggcaccttccacggcggcgacctgcagggcctgaccagcaaacttgattacatccagcagctcggcgttaacgcgctctggatcagttcgccgctggagcaaatccacggctgggtcggcggcggtacgaaaggtgatttcccgcattatgcctatcacggctactacacccaggactggactaagctggatgccaatatggggacggaagaagatttgcgccgtctcgtagacgaggcccacaagcgcgggattcgcattctgttcgacgtggtgatgaaccataccggctacgcgaccctggccgatatgcaggagtttcagtttggctcgctgtacatccagggtgacgaactgaaaaagacgctcggagagcgctggaccgactggaagcctcgcgcgggacagagctggcacagttttaacgactacattaacttcagcgacaaagccggatgggagaaatggtggggtaaaaaatggatccgcaccgatatcggcgattacgacaaccccggctttgacgatctgaccatgtcgctggccttcctgccggatctgaaaaccgaatccacggagccctccggcttgccgaacttctatcgccataagccggataccgccgctaaagcgatccccggctacacgccgcgcgattatttgacccactggctgagccaatgggtacgcgattatggcatcgacggtttccgggttgataccgccaaacacgtcgagcaggcggcctggctgcagctaaaaacccaggccagtgaagcgctggcggaatggaaaaaagccaatccggataaagcgctggataacgcgccgttctggatgaccggcgaagcctggggccacggcgtgatgcagagcgactactatcgtcacggctttgatgccatgctgaactttgattatcaggatcaggcagcaaaagcgacaagctgcctggccaatatggatctgacctggcaacaaatggcggagaagctccaggatttcaacgtcttaagctacctctcttcgcacgataccagcctgttccgtgaaggcggtagcacggcggcggaactgctgctgcttgcgcctggcgcagtgcagatctactacggcgatgaatcctcacggccattcggtccgaccggctccgacccacttcagggaacgcgttcagatatgaactggcaggacatcaacggcaaagccgcgcgtagcgtgacccactgggagaaactgggccagttccgcgcccgtcatccggccattggcatgggtaaacaaaccacgctatcgatggcgacaggctacggctttatccgcgagagcggtgatgacaaagtcatggtggtgtgggcaggacagcagtag

SEQ ID NO: 173490 - DNA, 1260 bp, Klebsiella oxytoca
atgacattttcactttttggcgacaaatttacccgtcattcgggcatcacccgcttgatggaagacctcaatgacggcctgcgtacgccaggcgccatcatgctgggcggcggcaatcccgcacagattccggaaatgaatgattacttccacagcctgctgagcgacatgctgaataacggcaaagcccttgatgcgctttgcaattatgacggcccgcagggtaaaagcgagctgctgaccctgctggcgcaaatgctgcgtgatgaactgggttgggagatcgagccgcagaatattgcactgacaaacggcagtcagagcgcgtttttctacttgtttaacctcttcgcaggacgtcgcgcggatggaaccacgcgtaaagtgctgtttccattgacgcctgagtatatcggctacgccgactccggcctcgaagaagagctgtttgtcgccactcgcccgaacattgaactgctgccggaaggccagtttaaataccatgtggatttcgaacatttgcaggtcacggacgaaacgggaatgatctgcgtttcccgtcccaccaacccaaccggtaacgtgatcaccgatgatgagctgatcaagctcgatgcgctggccaatcagcacggcatcccgttggttatcgataatgcctacggcgttccgttcccgggcattattttcagcgacgcccgaccgctgtggaatccgaatatcgtcctgtgcatgagcctctccaagcttggcctgccgggcagccgctgcgggattatcatcgctaacgaaaaaatcatcaccgccatcagcaatatgaacggcattatcagcctcgcccccggtggaatggggccggccatgatgtgcgagatgattaaacgcaacgacctgctgcgcctgtcggaaacggtgattaagccgttctactaccagcgcgttcaggagactatcgctattattcgccgctacctgccggaagatcgctgcttgattcataagccggaaggggccattttcctctggctgtggtttaaagatttgccgatatctaccgagctgctgtaccagcgcctgaaaaagcgcggcgtcctgatggtgccaggcgactatttcttcccggggctggataagccgtggccgcacacgcatcagtgcatgcgcatgaactacgtgccggatccggagaagattgaagcaggcgtgaagattctcgccgaagaagttgaacgcgcatggagcgaacagggcgcgtcatag

SEQ ID NO: 173491 - DNA, 489 bp, Klebsiella oxytoca
atgaaccggtttattatcgcggatgcgcaaaagtgcatcggctgccgtacctgtgaagtcgcctgcgtggtgtcccatcagcagaatcaggattgttctggcgtatccgctacgcgctttgcaccgcggatccgcgtggtaaagaatgatgaactttcgacggcgacgttgtgccgccagtgtgaagatgcgccctgcgccaacgtctgccccgagggcgctatccgccgagaaaattcggtctggcgcgtagatcagcgccgctgtattgggtgcaaaagctgcatgatggcgtgcccctatggcgcgatgacggtgatgcgggtggaggagggcgtacaggcgctgaagtgcgatttgtgcagccatcgtgaagagggcccggcctgcgtggcggcatgcccgacgcaggcgctacgctgcatagagcccatggagctggaaagaatagccgctgaacgtcgccagcggatggcgctggcgatgtag

SEQ ID NO: 173492 - DNA, 324 bp, Klebsiella oxytoca
atggatgaattcattaccgtttctttaaaaaaaatgagcgcgggcagtatttataatatcctgcttatcggcctgacctgctcattagtgccgctcggccttttaaacggcattctcgcggcggttggcgtcaatttactgacgctgcgctggaacggagaagctgtccatggcttcagcgcgattattatcagcccgatcttctgcttcatcctggcgctggtgttgaccggcatcgtcggcagcctggcctggctcggattatggatttacggccagtttcgcccgctgactctgcgcatctcttccaccgatcggggttaa

SEQ ID NO: 173493 - DNA, 1848 bp, Klebsiella oxytoca
atgattattgccaccgccggacacgttgatcacggcaaaaccacgttgctgcaggcgataaccggcatcaacgccgatcgcctgccggaagagaaagcgcgcgggatgacaatcgatctgggctacgcctactggccgcagcccgacgggcgggtactggggtttatcgacgtacccggtcacgaaaagtttttgtccaacatgctggccggtgtcggcggtatcgatcacgcgctgctggtggtggcctgcgatgatggggtgatggcgcagacgcgcgaacatctggcgatcctccagcttaccgggcagccgacgttaaccgtcgcgctgaccaaagctgaccgcgtagaagcaactcggatcgaggaggtaaaggcggaaatcgatgcggcgctggcggagttcggctttaccggcgcgaccctgtttaccgtcgcggcgacggaagggcggggcattgacgagctgcgcgagcatctcctgcgccttgccgcgcgcgcgcatccgcagcgtcagcgttttcgcctggcgatcgaccgggcatttaccgtcaaaggcgcggggctggtggttaccgggacggcgctatccggcgaggtcaacgttggcgagacgctgtggctgaccggcgtggataaaccgatgcgcgtgcgcggtctgcacgcgcaaaatcagccggttgagcaggcccgggccggccagcgtattgccctgaatattgtcggcgatgcgcaaaaagaggacctcaatcgcggcgactggctgctctcggtacagcccccggaagcctctgaccgggtcattgtcgagctccagtgccacacgccgcttagccagtggcagccgctgcatatccaccacgccgccagccatattaccggccgggtgtcgctgcttgaaggcgcgctggcggagctggtcctcgatacgccgctgcggctggcggataatgaccgtctggtgctgcgcgatatttccgcgcgcctgacgctcgccggtgcgcgagtggtggcgctcaatccgccgcgccggggcaagcgtaagccggagtatttacagtggctgcacgcgctggctgctgcgcaaagcgatgacgtccaggcgctggatattcaccttcagcgcgatgcggtgcgtctcgatgatttcgcctgggcgcgtcagctcagtagcgatggcctcaacgccctgattaaccgccctgactatctacaggcgggaaagagcctgttgagcgccccgctcgccgcgcgctggcagcgcaagctgcttgaagccctcgcgcgctatcacgatcagcatcgcgatgagccgggaccgggccgcgaacggctgcggcgtattgcgctgccgatggaagatgaagcgctggtgctgctgctgattgagcaaatgcgagaaagcggtattgttcatagccaccacggctggctgcatctgccggaacataaagcgggctttaccgacgagcagcaggccatctggcagcgggtcgccgggctgtttgccgatgagccctggtgggttcgcgatctggcgcgggaagcctgcgtggaagagtcgttaatgcgtgcggtgcttcgccaggcggcgcagcaggggatgattaccgcgatcgtcaaagatcgctactatcgcaacgatcggatcgtggagtttgccaaaatgatccgtgaactggatctggaaaggggttcaacctgcgcggcggatttccgcgatacgctgaacgtcgggcgcaagctggcgattcagatcctcgagtattttgaccgcatcggttttactcgccgtcgcggtaacgaccatattcttcgggataaggcattgttcataaaagaataa

SEQ ID NO: 173494 - DNA, 1389 bp, Klebsiella oxytoca
atgactaccgagattcgtgcgctttatacccggcttccggccatcgaccgtttactccgcgatcccgcattctcgccgctgctgatgcaatatggtcactcccagacggtggcgctgctgcgccagatgctggacgaggcgcgggaaaatatccgtcagaaccaggcgctgccgggctggtgcgatgactggatgcaggaaacgacgaggcggctggcgctgacgcagcagagcgcgctgcgtccggtttttaacctgaccggtaccgtgttgcacaccaatcttggccgggcgattcaggcggaagcggcggttgaggcggttgcccgggcgatgcgcgcgccggtgacgctggaatacgatcttgatgatgccggacgcggccaccgcgaccgagcgctcgccgacctcctgtgccgtatcaccggtgcggaagacgcctgtatcgtcaataacaacgcggcggcggtactgctgatgctggcggcgatcgccggcggcagcgaggtggtggtatcgcgcggtgagctggtggagatcggcggcgcgttccgtattcctgacgtgatgcgccaggcgggctgcgttctgcatgaagtcggtaccactaaccgcacccacgcgaaagattatcgtcaggcggtgaacgacaataccggcctgctgatgaaggtgcataccagcaactacagcattgagggcttcacgaaagcggtcgatgaagcggagctggccgagctggggcgcgagttgaatatcccggtggtggccgatctcggtagcggttcgctggtagatttaagccagtacggcctgccgaaagagccgatgccgcaggagatgattgccgcaggcgtcagcctggtgagcttctcaggcgataaactgctggggggcccgcaggcgggaatcatcgtcggcaaaaaatcgctaatcgcccgtttgcagagccatccgctcaagcgcgccctgcgggcggataaaatgaccctcgcggccctggaagccacgctgcgcctctatctgcacccggaaaagttggccgcagagctgccgactctacgcctgctgactcgtcaggcggatgatattcgtcagcaggccgaacgtatacgaacggctctggtcgcgcattatgctgattttgacctgcgggttgagccatgcctgtcgcagatcggcagcggctcgctgccggtggaccgcttgcccagcgcggcgttgacgttgactccgcgcgatggtcgcggcagccagctggaggccctggcggcacgctggcgtctgctgtccgtgccggttattggcaggatctatgatggccgcctgtggctggacctgcgctgtcttgaggatgaaacccggtttatggagatgttactgagatga

SEQ ID NO: 173495 - DNA, 609 bp, Klebsiella oxytoca
atgaaactgatcggcagctacaccagtccctttgtgcgcaaaatttccgtcatactgctggaaaaagcgatcccctttgagttcgtcaacgaattcccttaccacgagactaacggcgtggcgcagtataatccgctgggaaaagtgcccgcgctggtcaccgatgacggcgactgctggtacgattctcccattattgctcaatacctggagctgctcggcatcgccccggctatgctgcctgcggaaccgaaagccgcgctgaaactgcgtcaaattgaggcgctggcagatggggtgatggaggccgcgcaaactctggtacgggagaaagcgtggccagcggcgcagcagtcggaaagcgaactgctgcgccagcgcgaaaaggtcgcgcgcggtctcgatgcgctggaaggctatgcgagtgacggaacgttgcgccctgatgaggttaatctggcgaccatctccgcagcctgcgccatcgcttatctcaatttccgccgcgtcgcgccaggctggtgcgccacccgaccgaagctggtccgtctggtggattccctctttcagcgcgccagctttgcgcgcaccgaaccgccggtgagttga

SEQ ID NO: 173496 - DNA, 1137 bp, Klebsiella oxytoca
atggatctgctgattattttaacctacgtggcgatagcctggtcgatatttaaaatatttaagatcccggtaaataaatggacggttcccaccgcggcgctgggcggcgtattaattgttagcgcgcttgttttattaatgaactacaaccatccttataccttcactgcgcagaaggcggtgatttctattccgattaccccgcaggttaccggagtggtcagcagcgttacggataaagccaatcaacgagttaaaaagggagaggtgctgtttaccatcgacccgacacgttatcaggcgcgggtcgacagactccaggccgatcttgtgaccgcgctgcacagtatcaatacccttaaagcccagctttctgaggctcaggccaacaccacgcgcgtttcggcggagcgcgaccgtctgtataaggattatcagcgctacctgaaaggaagccaggcgcgggttaatccgttttcggaaagcgatatcgataatgcccggcaaaactacctcgcccaggatgcgatggtgaaaggatcggtggcggagcaggcgcaaattcagagtcagctcgacagcatggttaacggcgagcagtctcagatagtgagcctccgcgcgcagctggcggaggcgaaatataatcttgaccagaccaccgtgcgcgcgcccagcgacggttatattacccaggtcctgattcgtcccggtacctatgccgcctcgctgcctctgcggccggtgatggtctttattccgcaacagaaacgcctcatcgtggcgcagttccggcaaaattcgctgctcaggctggagcagggcgacgatgccgaagcggtgttcaacgcgctgccgggacaggtctttcgcggcaagctggtgagtatcctgccggtcgtgccgggcggaacataccaggcgcagggcacgctgcaggcactgacggtgacgccgggtaccgatggcgtgctggcgaccattgagctggagcccaacgctgccgtcgacgctctgcctgacgggatctatgcccaggtggcggtttactccgatcatttcacccacgtttcggtgatgcgtaaagtgctactgcgcatgaccagctggatgcactatctctatctggaccattag

SEQ ID NO: 173497 - DNA, 372 bp, Klebsiella oxytoca
atgtttctcaattattttgcgctcggcgttctgatctttgtatttctggtgattttttatggaatcatcattctccatgatattccttatctgatcgcgaagaaacgtaaccacccgcatgccgatgccattcatgttgcgggttgggtgagtctttttactctgcacgttatctggccgtttttatggatctgggccacgctttatcggcctgaacgcgggtgggggatgcagcacccgcgggatgagatgtcgccggaggcgacggaaagcgaggatgaacttagcgaactgcggcaacgggttattgcgcttgaaaagcagataacgggtattcagccatctacccaatcccctacggtggagaaataa

SEQ ID NO: 173498 - DNA, 1911 bp, Klebsiella oxytoca
atgtcatccgatatcaagatcaaagtgcaaagctttggtcgtttcctcagcaatatggtgatgccaaatatcggcgcgtttatcgcgtggggtattatcaccgcactattcattccgacaggatggttaccgaacgaaacgctggcgaagctggtcggtccgatgatcacctatctgctgccgctgctgatcggttataccggcggtaagctggttggcggcgagcgcggcggcgtagtcggcgcgattaccaccatgggcgttatcgtcggcgcggatatgccgatgttcctcggctccatgatcgccggtccactgggcggctgggctattaaaaaattcgacgtgtgggtagacggtaagatcaagtccggttttgagatgctggtgaataacttctccgcaggcatcatcggtatgatcctcgctatcctggcattcctcggcattggcccggcggttgaagttctgtcgaaaatcctggctgcgggcgttaacttcatggtggcgcacgacatgctgccgctggcgtctatctttgttgaaccggcaaaaatcctgttcctcaataacgccatcaaccacggtatcttctcgccgctgggcatccagcagtctcacgatctcggcaaatctattttcttcctgattgaagccaacccgggtccggggatgggcgtcctgctggcatacatgttctttggtcgcggtagcgcgaaacagtctgcgggcggtgcggcaattatccacttcctcggcggtattcacgaaatttacttcccgtacgtactgatgaacccgcgcctgattctggcggttatcctcggcggtatgaccggcgtgtttaccctgaccctgctcaacggcggtctggtttctccggcctctccgggctccatcctcgccgtgctggcaatgacgccgaaaggcgcctacttcgctaacatcgccgcgattgttgccgccatggccgtctccttcgtggtttcagccgtgctgctgaaaaccagcaaagttaaagaagaagatgatattgaggccgcaacccgccgtatgcaggatatgaaagcgcagtccaaaggcggcgccactccgctggccgcgggcgacgtggctaacgacctgagccacgtgcgtaaaatcatcgttgcctgcgatgccggtatgggctccagcgcaatgggcgcaggcgtgctgcgtaaaaaagtgcacgatgccggactgagtaatatctccgtcaccaactgtgcgatcaacaacctgccgccggatgttgacctggtcatcacccaccgcgacctgaccgagcgtgcgatgcgccaggtgccgcaggcgcagcatatttcgttgactaacttcctcgacagcggcctgtacaccagcctgaccgaacgtctggttgcggcgcagcgccacacggataacgaagagaaagttcgcgatagcctgaaagacagcttcgacgcgtctgacaccaacctgttcaaactcggcgcggagaacatcttcctcggccgtaaagcggcgacgaaagaagaagcgattctgtttgccggcgaacagctggtgaaaggcggctacgttgaaccggaatacgtccaggcgatgctggatcgtgaaaagctgacctccacctatctgggtgagtccatcgcggtaccgcacggcaccattgaagccaaagaccgcgttctgaaaaccggcatcgtcttctgccagtacccggaaggcgtgcgctttggcgaagaagaggatgaggtggctcgcctggttatcggtatcgccgcccgtaataacgagcatatccaggtgattaccagcctgaccaacgcgctggacgatgagtcggtgattgagcgtctggcgaaaaccaccagcgttgaagaagttctgacgctgctgaaagcgtag

SEQ ID NO: 173499 - DNA, 1149 bp, Klebsiella oxytoca
atgaaagcattacattttggcgcaggtaatatcggtcgtggttttatcggcaaactgctggcggacgcggggatacagctgacgttcgcggatgtaaatcaggtcgtgcttgatgccctgaatgcccgtcatagctatcaggttcacgtggtcggcgagaatgagcaggttgataccgtttccggcgttgacgccgtcagcagcatcggcgacgaagttgtcgagctgattgccagcgtggatctggtgaccaccgccgtcggcccggtcgtgctggaacgcatcgccccggcgattgccaaaggcctggccaaacgtaaggcgcagggggttactgccccgctcaacatcatcgcctgcgagaacatggtccgcggtaccacccagctgaagggacatgtctttaacgccctgggcgaagaagataaagcctgggttgaagccaacgtcggcttcgttgattccgccgttgaccgcatcgttccgccatcggcttccgctactcacgatccgctggaagtcaccgtggaaaccttcagcgagtggattgtcgacaagacccagttcaaaggcgaactgccgaacatccccggtatggaattaaccgataatctgatggcatttgtcgaacgtaagctattcaccttaaacaccggacatgctataaccgcctacctcggaaaactggcgggtcatcagaccatccgtgacgcgattcttgatgagaagattcgcgctgtggttaaaggggccatggaagagagcggcgcggtgctgattaaacgctatgcctttgacgcgcagaagcatgctgcttacatccagaaaattctcggtcgctttgagaacccgtatttgaaagatgacgttgagcgcgttggccgccagccgctgcgtaaactgagcgcgggcgaccgtttaattaagccgctgcttggtacgctggaatacggcctgccgcaccggaatctgctgaaagggatcgccgcggcgatgcacttccgtagcgaagaggatccgcaggcgcaggaactggcggcgctgattgccgagaaaggcccacaggccgcgctggcgcagatttctggtctggacgcggcaagcgaagtggtggcggaagccgttaacgactacaacgcgaccaaatga

SEQ ID NO: 173500 - DNA, 534 bp, Klebsiella oxytoca
atggaagaaacacaggcatttgaaaaccgtgtgcttgaacgtctgaatgctggcaaaaccgtacgaagcttcctgatcgccgccgttgaactgctgacggaagcggtcaatatcctggtgcttcaggtattccgtaaagacgactacgcggtgaaatacgcagtggagccgttgctggacggcgacgggccgctgggcgacctttccgtacgcctgaagctgatctacggccttggggtgattagccgcgccgaatatgaagatgccgaactgctgatggccatgcgcgaagagttgaatcacgatggtaatgagtacagttttaccgacgatgagatcctcggaccgtttggcgagctgcactgcgtcgccgccctgccgcccacgccgcaattcgatgatagcgatgcggagctgctggcaatgcaaaagctgcgctaccagcaggtcgtacgttcaacaatgatgctttctctgaccgagctgatttctaaaatcagcttaaaaaaagcctttcaaaaatcaacgctctga

SEQ ID NO: 173501 - DNA, 225 bp, Klebsiella oxytoca
atggcgaaaataggcgacggcgtaccgcgtattattgataaagccgtagattttatggcttcaagtcaggcttttatggaatatctaaaaaaatctccgcgtttgcagcatataccgccggatattccggctgataaagaagcgctgtttctgcgacgtcttgagtattatcgtcagctttatcggccgacgtgcgaccagcaagagtcagaatcagagcgttga

SEQ ID NO: 173502 - DNA, 363 bp, Klebsiella oxytoca
atgaaagaagtcgaaaaaaacgaaattaagcgcctgagcgatcgtcttgatgctatccgccaccagcaggccgagctgtcactggtcgaagctgctgacaagtacgccgaactggaaaaagagaaaaccaccattgagacggagctcgtccgcctgcgtgaggttcagggccagaagctgagcaaagaagcgcaaaagctgatgagcatgccgcatcgccgcgccatcaccaaaaaagagcaggccgatatgggcaagcttaagaaaagcgtacgcggtttggtcgttgtccacccgatgaccgcgctgggacgcgaaatgggcctcaaagagatgaccggcttctcaaaaaccgagttctga

SEQ ID NO: 173503 - DNA, 2574 bp, Klebsiella oxytoca
atgcgtctggatcgtcttaccaataaattccagcttgctcttgccgatgcccagtcccttgcgcttgggcacgacaaccaattcatcgaacctcttcatcttatgagcgccttgctgaatcaggaagggggatcggtacgtcctttattaacttcggctggcatcaacgccggagagctacgcacgaatattgaacaggcgctaagccgtttgccgcaggtggaaggtaccggtggtgatgttcaaccgtcccaggacttagtgcgtattctgaacctttgcgacaagctggcgcaaaagagaaaggacaactttatttcgtcagaactgttcgttctggctgcgcttgaatcacgcggtacgctgaccgaccttttaaaatctgccggagcaacaaccgccaacgtgagtcaggcgattgaacaaatgcgcggaggtgaaagcgtgaacgatcagggtgccgaagatcaacgtcaggcattgaaaaaatttaccgtcgatctgaccgagcgtgccgagcagggcaagcttgacccggtcatcggtcgtgatgaagaaattcgtcgtacgattcaggttctgcagcgtcgtaccaaaaataacccggtgctcatcggtgagcctggcgtagggaaaacggccattgttgaggggctggcgcagcggatcgttaacggcgaggtgccggaagggctgaagggccgtcgggttctggcgctggatatgggcgcgctggtggcgggtgccaaataccgcggtgagtttgaagaacgcttaaaaggcgtactgaacgatctcgctaagcaggaaggtaacgttatcctgtttatcgatgagctgcacacgatggtgggggcaggtaaagcagatggtgcaatggatgccggcaacatgctgaaaccggcgctggcgcgcggtgaactgcactgcgtgggtgccacaacgctggatgaataccggcagtatattgagaaagatgccgctctggaacgtcgtttccagaaagtattcgtggcggagccgactgttgaggataccattgcgattttgcgtggtctgaaagaacggtatgaactgcaccatcacgtgcagatcaccgacccggcgattgtggcggcagccacgctgtcccatcgttatattgccgatcgacagctgccggataaagccatcgacctgatcgatgaagccgcttccagcattcggatgcagattgactcaaaaccggaagagctggaccggctcgaccgccgtatcatccagctcaagctggagcagcaggcgctgaagaaagagtctgatgacgccagcattaagcgactggatatgctaaatgaggaactggcggataaagaacgtcagtactcagaattagaggaagagtggaaggctgaaaaagcctcgctttccggcactcagaccattaaggctgaactggaacaggctaaaatcgccattgagcaggcgcgtcgcgtcggcgatctggcgcgaatgtccgagctccagtatggcaagatccctgagctggaaaaacagctggcggcggcaacgcagtctgaaggcaaaacgatgcgcctgctgcgtaacaaagtaacggatgccgaaatcgcggaagtgctggctcgctggacgggtattccggtggccagaatgcttgaaggtgaacgtgagaaactgctgcgtatggagcaggatttgcatagccgcgttattggtcagaacgaagcggtggaagcagtatctaatgcgattcgccgtagccgtgctggtttatccgatcctaacaggccgattggctcgttcctgttccttgggcctaccggggtgggtaaaacagaactctgtaaagctctggccaactttatgttcgatagcgacgatgcaatggtacgtatcgacatgtcagagtttatggagaaacattccgtttcacgtctggttggggcgcctccgggatacgtgggctatgaagaaggcggctatctgaccgaggcggtccgtcgtcgtccttattctgtcatcctgctggatgaagtggaaaaagcgcacccggatgtctttaacattctgctgcaggtgctggatgatggacgtttgaccgatgggcaggggagaacggtcgacttccgtaatacggtggtcatcatgacttctaaccttggctccgaccttattcaggaacgctttggggcactggattatggccatatgaaggagatggtgctgggcgtggttagtcaaagcttccgtccagagtttatcaaccgtattgacgaagtggttgtcttccatccgctgggtgaaaaacatattgcttctatcgcgcagattcagctgcagcggttgtataaacgacttgaggaacgcggctacgaagtccacatgtctgatgaagcgctgaaattgctgagcgaaaatggatacgatcctgtttatggcgcacgtcctctgaaacgtgctatccagcaacagatcgaaaacccgctggcgcagcagatcctctccggtgaattgataccgggtaaagcagtgcaactggttgtgaaagatgaccggatagtggcagtgcagtaa

SEQ ID NO: 173504 - DNA, 732 bp, Klebsiella oxytoca
atgactaaactgattgtaccgcaatggccgatgccggaaggcgtggctgcctgtagttccacgcgcgttggcggggtaagtttatcgccatacgattcacttaatctcggcgcccattgtggagacaatctacagcacgtagaagagaaccgtcggcgtatgttcgccgctggcggcctgccgtcatatccggtatggctggagcaggttcacggtacggcagttttgcgactcgatggcggaccgtacgagtcaaagcgagcggatgcttcgtactgcaatgtgccggggacggtctgcgcggtgatgaccgctgactgcctgccggtgcttttttgtaaccgcgcgggtactgaagttgcggctgcgcatgccggttggcgagggctgtgcgaaggcgtactggaagaaaccatcgcctgtttcgccgataaaccggaaaatatcatggcctggcttgggcccgccattgggccggatgcgtttgaggtcggcccggaagtgcgggaagcttttatggcaaaagatgccctggcggaacgtgcatttcgtcccgcgggtgaaaaatattttgctgatatttatcaactggctcgtcagcgtctggcgggcgttggcgttgagcagatttacggcggtgaccgctgtaccctcagcgaaaaggatgattttttctcttatcgccgcgacaagatgacgggtcgtatggcaagtttcatctggctgatataa

SEQ ID NO: 173505 - DNA, 981 bp, Klebsiella oxytoca
atggcacaacgagtacaactcaacgcaacggtgtccgaaaatcaactcggacaacgcttagatcaggctttggccgaattgttcccggattattcgcgttcgcgcataaaagaatggatccttgaccagagagtgctggtaaacggcagcgtcagcgacaagccgaaagagaaagttctgggaggggagacgattgctatcgatgttgaaatcgaagaagaagttcgtttccaggcacaggatattccgctcaatatcgtttatgaagatgatgacatcctcgtaattaataaaccgcgcgatttagttgtgcatcctggcgcgggcaaccctgacggtactgtgctgaatgcgctgttgcactactatccggccattgctgacgtgccgcgtgcggggattgtgcaccgtcttgataaagacaccaccggtttgatggtggtcgcgaagactattccggcgcaaacccgactggtggagtccctgcagctgcgcgaaatcacccgcgagtatgaggcggtggcgattggtcatatgacggctggcggaacggttgaagaaccgattagccgccacccgaccaagcgtacgcatatggcggtacatcccatgggaaaaccggcggtaacacactaccggattatggagcattttcgcatccatactcggctgcgcctgcgcctggaaaccggccgtacgcaccagattcgcgtacatatggcgcacattactcacccgctggtgggcgatcaggtctacggcggtcgcccgcgtccgcccaaaggggcatccgaagagttcatcgctgccctgcggaagttcgatcgtcaggcgctgcatgccaccatgctacgcttataccatccgatcagcggaattgagatggaatggcatgcgccaattccacaggacatggtggatttgattgatgccatgcgcgcggattttgaagcccataaagacgatatcgactggctatga

SEQ ID NO: 173506 - DNA, 738 bp, Klebsiella oxytoca
atgacgcgcatgaaatacctggtggcagcagccacactgagcctggctttggtgggttgctctggctcaaaggaggaggtgcccgataatccgccgaatgagatctacgcgaccgctcagcaaaagctgcaggacggtaactggaaacaggcaataacgcaactggaagcgttggataaccgttatccctttggaccttattcccaacaggtgcagttggacctgatttatgcgtactacaaaaacgcagacctgccgctggctcaggcagccatcgatcgctttgtacgcctgaaccctacgcatcctaacattgattacgtcatttatatgcgtggtctgacaaatatggcgttggatgacagtgcgctgcagggcttctttggcgtcgatcgctccgatcgcgacccacaacacgcgcgtgatgcctttaacgacttctccaggctggtccgtggctatcctaacagtcagtactctaccgatgcttacaagcgtatggtgttcctgaaggatcgcctggcgaagtacgagctatcagtggtcgattactataccgatcgtggcgcatgggttgcagtagttaaccgcgtcgatggcatgctgcgtaattacccggatacgcaggccacccgtgatgcgctaccgaagatggaaaatgcctaccgtcagatgcaaatgaacgctcaggctgacaaggttgcgaagatcattgcggctaatagcaagaacacctga

SEQ ID NO: 173507 - DNA, 336 bp, Klebsiella oxytoca
atgacaatgaacattaccagtaaacaaatggaaattactccggcaattcgccagcacgtcgcagaccgtctcgccaaactggataaatggcaaactcacttaatcaacccgcatatcatcctctctaaggagccgcagggttttgtcgctgacgcaaccatcaatacgccgaacggtcacctggttgccagcgcacggcacgaagacatgtatgccgcaatcaacgaattgatcaacaagctggaacggcagctaaataaagtgcaacacaaaggggaagcccgccgcgccgccacatcggtgaaagaggcaggctttgtggaagaagaagagtaa

SEQ ID NO: 173508 - DNA, 1161 bp, Klebsiella oxytoca
atgaccgaggaaaacccattactggccctacgcgataagatcagcgctctggatgaaaaactgctggcgctgctggcggaacgccgcggcctggccgtagaggttggaaaagccaagctggcatcgcaccggccggtgcgggatatcgaccgcgagcgcgatctgcttgaacgcctgatgacgctgggaaaaaaacaccatcttgatgcccactacatcacacgcctgtttcaactcattattgaagactcggtccttacccagcaaacgctgctccagcagcatctgaataaaattaatccgcactctgcacgagtcgcgtttctcgggcccaaaggttcatactcgcatcttgcggctcgtcagtatgccgcccgccactttgaacagtttatcgaaagcggctgcgctaaattcgcggatatctttgagcaagtggaaaccggtcaggctgattacgccgtcgtccctattgaaaataccagttctggcggcatcaatgatgtttatgaccttctgcagcacaccagcctatctatcgttggcgagctgacgctgcctatcgatcactgcgtgctggtttcaacatccaccgatgcgcaacagattacgacggtctacagccatccgcagccgttccagcagtgcagccagtatctaagccgctatccgcactggaacattgaatataccgatagcacgtcttcggcgatggaaaaggtcgctcaggcaaaatcgccaaccgttgccgctctgggcagcgaagcaggcggagcgctgcacggtttgcaggtactggaacattgccaggctaaccagacgcaaaacatcacccgcttcctcgttctggcgcgtaaagcggtggaggtctccgatcaggtgccggcgaaaaccactctgttgatggctaccggccagcaagccggggccctggtagaagcgctactggtgctgagaaaccataacctgattatgaccaagctggaatcgcgtcctattcatggcaatccgtgggaagagatgttttatctggatatccaggccaacctggagtcaatgccaatgcgtaaggcattaaaagagctggccgagataacccgttcaatgaaagtactgggatgttatgccagcgaaaacgtggtgccggtcgatccggtttaa

SEQ ID NO: 173509 - DNA, 873 bp, Klebsiella oxytoca
atggctgaaccacaaccgctgtttgattacaccgggcatttaccggaatgtccgacctggagcgaagccgaacaggcattgtactgggccgatattatggagtgcgagattcatcgctacgacgtgcagacgggcgatcatcaggtactgcagtttcccgaagagcccggctgttttgcactacgcgaaaagggcggttttatcgtcgctttacgtagcggtatctggctcaccgatgttcatggattactgcagcgaaaagtctgcgataaccccagtaatccgcaattagcccgttttaacgatggcggaaccgatcgcgatggccgcttttatgccgggactttctgggggccgggagattttaacggcgcgctcttgatgcgcattgataacgatctctctccgcaggttattcagtgcgatattcatggcgccaacggtctggcatttagtgaagacaagcggtggatgtatacctcggatacgcccaatgccgttatctatcgtacaccgctggatgagcagggcgaggtgggtaaacgcgaggtctttcgtcgctttcagcccggtgagggcattcctgatggcgcggccatcgatactgaaggttgctactggagcgcgatgtttgacggttggcgtattgcgcgcttttctccgacgggcgagcaactggaggagtaccgtctaccggtgcgttgcccgacgatggtgtgctttggcggagcggatatgaaaacgctctatatcacgaccacgcgggagaatatggatgctgaagagctggcgaaatatccgctttccggcgcgatcttcaccctgccggtgaccgtggcagggatgaagaagttgccgtttacagaacgttaa

SEQ ID NO: 173510 - DNA, 1122 bp, Klebsiella oxytoca
atggttgctgaactgaccgcgttacgcgatcaaattgatgaagtcgataaagcgctgctggaactgctggcaaagcgcctggagctggttgcggaagtcggagaagttaaaagccaatacggtctgccgatttacgtccctgaacgtgaatcggcgatgctggcctcccgccgtgaggaggctgaggcgctaggggttccgccggatcttatcgaagatgttttgcgtcgcgtcatgcgtgagtcttactccagcgagaacgataaaggttttaaaacgctttatccgaatctgcgtccggtggtgatcgtcggcggcggcgggcaaatggggcgactgtttgaaaaaatgctgacgctttccggatatcaggtgcgtatcctcgagaaagacgactggtctcgggccgaggagatcgtcgccgatgccggaatggtcatcgtcagcgtaccgattcacaaaacagcggcaacgattgctcaactgccgccgctgccggcggactgcattctggtcgacctggcctcggtgaaagcggaaccgctacaggcgatgctggccgcgcataacggaccggtattgggattacaccccatgtttgggcctgacagcggcagcctggcgaagcaggtcgtggtgtattgcgatggccgccagcctgaggcgtaccagtggttcctggaacaaatccaggtctggggcgcgcggctccatcgtattagcgccgtcgaacacgatcagaacatggcctttattcaggcgttgcgccactttgccaccttcgcttatggcctgcacctggccgaagagaacgtgcgacttgagcaacttctggcgctgtcgtcaccgatttatcgccttgaactggcgatggttggccggctgttcgcccaggatccgcagctctacgcagatattattatgtcctcagaaaacaacctggcgctgattaagcgctactaccagcgcttcggtgaagctatcggcctgctggaacaaggggataaacaggcattcattgacagcttccgtaaggtcgagcactggttcggtgattatgcccagcgcttccagagcgaaagccggacgttgctgcgtcaggcaaatgataatcggcagtaa

SEQ ID NO: 173511 - DNA, 1071 bp, Klebsiella oxytoca
atgcaaaaagacgcgctgaataacgtacatattactgacgaacaggttttgatcacgccggatcagttgaaagctgaattccctctgagcgttgagcaggaagcgcagatcgcgcagtctcgtcagaccatctctgacatcatcgccggtcgcgatccgcgcctgttggtggtatgtggtccttgttcgattcacgatcctgaaaccgccattgagtacgctcgtcgttttaaagcccttgccgaagaggtcagcgatagcctctatctggtcatgcgcgtctattttgagaaaccccgcaccaccgttggctggaaagggctgattaacgatccgcatatggatggttcgtttgatgtagaaggcggcttgaagattgcgcgtcgtctgctggttgagctggtcaatatggggctgccgttagcgacggaagcgttggatcctaacagtcctcaatacctcggcgatctgtttagctggtccgccatcggcgcgcgtacgacagaatctcagactcaccgcgagatggcctccgggttgtcgatgccggtcggttttaaaaacggcaccgatggcagccttgcaacggcaattaacgccatgcgcgctgccgcaatgccgcaccgcttcgtcggtattaaccaggccggtcaggtgtgtctgctgcaaacgcagggcaatccaaacggacacgtcattctgcgtggcggtaaagcgcccaactacggcccggaagatgtcgcgaagtgcgaaaaagagatgactcaggcgggactgaaaccctctctgatggtagattgcagccatgggaattctaataaagactaccgccgccagcctgcggttgctgaatccgtcgtcgcgcagattaaagatggtaatcgttccattattggtctgatgattgagagcaatatccacgaaggaaaccagtcctctgagcagccgcgttgcgatatgaaatacggtgtctccgtgaccgatgcctgcattagttgggaaaccaccgatgcgttgctccgcgaacttgataaggatctgcgaggccatctggcggctcgtctggcgtaa

SEQ ID NO: 173512 - DNA, 510 bp, Klebsiella oxytoca
atgacagttcttcaccgtctctttttgactttagtactatcgctcgtgggtatctctgctgttgcctccgaaccgtctgaaaatgttcggacgatcgtttcgggaatcgtgacctatacacgctggccgcagttatccggcccgccaaagctttgtattttttcgacatcacgttatatccatagcctggccgaagaagcaccggaattattgccttataaacccgtgattgttcgtaatacggaagaagccttacagacgacctgcgatggtttttattttggcagtgaatctccgactcagcagtctgaatttacagctaaatatggaaaccggcccctattgcttattgcggaacaaaacaccgattgctctattggcagcgcattttgcctgcttataaacaatgagagagtcagattttccgtaaatctggatgtactgacgcacagcggcgttcgggttaatcccgatgtgctgatgcttgcccggaaaacatcacatgaataa

SEQ ID NO: 173513 - DNA, 1224 bp, Klebsiella oxytoca
atgaataaggatttttctcaggccccgcgccccacatttaaaagagcgctacgccgtatcagcatgataagcgttgttatctctatgacactggtctggctattgctctgcgccgcttccatattcacactcaagcaatacgcacaaaaaaatctggagctcaccgccgccacgatgggccgtagtctggaagccgcgctggtctttggcgatagcgcggcggctgaagataccctggccacgctgggcaagcagggacagttttcgcaggcaatcctggtcgacggtcggcagaagccctttgcctcatggcataacgatggcctggccaggcaggataaagtcagcgacgttatcagcaaatggctattcccggaacccacggtacaacctatcctgcaccagggaaaagttatcggtgaacttcgtctgaccgcgctggacaggctgataagctatttcctcggtatctcaattattgtgctaaccggcagcatttttctcgcctcatgcattgcattgctgcttacccactcgctgcatcgcggcatcgtggctgcgctgcagagtattaccgaggtagtccatgatatccgcgaaaatcgccatttctctcgtcgggtccccgaagagcgtattgaagagtttcacctctttgcccaggactttaatagtctgctgggcgagatggaggactggcagcggcagcttcaggctaaaaatgcccagcttctgcgtagctccttgcacgatccgttgaccggcctggctaacagagccgctttccgcaacgttattaatgcgttgatgaaagacgaaaccgtccatggtagttctgcgctgctgtttcttgacggcgataatttcaagctcattaacgataactggggccatgctgccggcgacaaggtgttaattgaggtcgccagccgcctgatggcctttgtcggcaaacagcaccaggcgtggcgtctcggcggcgatgaatttgccgttctgctgcgcaatgttcatacagaggctgaagttcaggcactctgcagcgcattgtcggaacagtttatcccgccgtttaatctccacaacggccacaccgtcaggctgtcgctgagtattggttacgcattaacctgggaacatgcctccgcggaaaatctgcaagaacttgccgaccaaaatatgtatcggatgaaacaccagcgcttacagcgaacgcaaaaataa

SEQ ID NO: 173514 - DNA, 483 bp, Klebsiella oxytoca
atgatcgggaaatattttgctcctgctttactggccgcactttttctaagcggctgtcaggctccgcaaggaaaattctctgcagaacaaattgcagcaatgaagtcatacggctttactgaagccaatggcgactggtcattaggaatatctgactccatattattcgacaaaaacgactatcacctgcgtgccgatagcaaacagcaaattcgcactatggcttcgcgtctggccaccaccggaattacccatagtcgtctcgaaggacatactgataattacggcgaagacgcttacaacgaaatgttatcgcttaaacgcgcgaacagcgttgcggatgcctgggccgaaggggcaaatattccgcgcaccaatttgaccactcgcgggctcgggaaaaagtatccgatagccagcaacgctaccgcacaaggacgcgctgaaaaccgccgcgtcacggtggttatcagcacgccttaa

SEQ ID NO: 173515 - DNA, 1371 bp, Klebsiella oxytoca
atgactacctgcacctcgcgcgcggcatggctgaacctgctgcgtcgtcttcatttctatatcggactgtttatcggaccgtttatcttcgtggcggctctgaccggtacgctctatgtcgccaccccgcagctggaaagctggctctataaagagactctggaggggacgctcagcggcgaaaagcagccgctgagcgcgcaaattaccgtagcaatggaggcggtccagggaaacctccgtttgcacgcggttcgaccggggattatggctggcgatactacccgagtgatgtttattgatccaaatcttggcgagtctgaaactcgggcaatttttgtcgatccggtgacgttacgcgtgacaggtgatatgccggtttacggcaccagcggtattttgccgctgcggcagtggattgattatgcccatcgctctttgctgctgggtaacttaggccgactgtacagcgagctggcagcctcctggatgtgggttgccgctcttggcgggatcgcgctgtggtcgatgacccgaccgcgtcgtcgtataaataatagagtgcagaataaccgtcgcctgcatgtttctctcggctgggcgctgttaatcggtatgctgttattctctgcgaccggtttgacctggtcacaatgggcgggcagtaacgtcgacaagatgcgcgccgcctttggctggttgacgccgcaggtgaacgcgcagctggaaagaaccactccggcaatacaggatccacatgcggaacatcatatgagacacggggcgatggagaagacgaacgtcccacttcgcgtagaggattttgacgaggtcctgcaggctgctcgcaagtccgggctggaagcaggcaagctggagattcgtcctccgtcggcctccggacgggcgtggacggtaaatgaaattgacagaagctggccgacacaggttgatgcggtagcgatcgatggttcaaatatgcaggtcgtggaccgcactcatttttccgactttccgctgatggctaaactaacccgctggggcgtggatttccatatgggaattttgttcgggcttgccaatcagctactgcttatcgtattcgggattgcactctgcgtgatgatcgtggtggggtaccgtttgtggtggatacgccgtcccgcgagttcggcctttaacccggctaatacgctgctccacgcgtggctgggcttagcatggcctgctcgtctgtcgatcggcgttatcacagtgatgttggggctggcgctgccgctaatggggattagcctcgcgctgtgtctcgccgttgattatctgcgctggcgcgcagcaacggcgatgacagaggctaagtcagtcgaatag

SEQ ID NO: 173516 - DNA, 438 bp, Klebsiella oxytoca
gtggtcagcactatttttcatcacccggcatcacaacggcacgccgcgtggctggcgctgtttgcgatcctgctgatcgtggtggcgccgctgatctctgtcgcgctgcaaaaagatccgatgagcggtatgcaccatttaacgatggaaatgacgcaagagatgccatcacatcagatgcccatgatgcatactgacgcctcgattgcggaacacgcgcacagcatgccggtcgatcatgctgaagcctgcggctactgcgtactattagcccacgtgccagggatgatttttgcgctggtactgctgatcagcctggtgcttcgacgctatagcgcaccggttttccgtccggaacggaaacactggcactactttccctggctttaccctcatacccgcgctccgccgcaacagtctgcttgcttccttaactaa

SEQ ID NO: 173517 - DNA, 348 bp, Klebsiella oxytoca
atgagcaacattattaagcaacttgaacaagaacagatgaagcaggacgtaccttccttccgtccgggtgataccgtggaagtgaaagtatgggttgttgaaggttccaaaaaacgtctgcaggcattcgagggcgtggttatcgctattcgtaaccgcggtctgcactctgcattcactgttcgcaaaatttccaacggcgaaggcgttgagcgtgtcttccagactcactctccggtagttgacagcatttctgtcaaacgtcgtggtgctgtacgtaaagctaaactgtactacctgcgtgagcgtaccggtaagtctgctcgtatcaaagagcgtcttaactaa

SEQ ID NO: 173518 - DNA, 768 bp, Klebsiella oxytoca
gtgtttataggtatcgttagcctgtttccagaaatgttccgcgcaattaccgattacggggtaactggccgggcagtaaaaaatggcctgctgagcatccagagctggagtcctcgagatttcgctcatgaccggcaccgtaccgtggacgatcgtccttacggcggcggaccggggatgctaatgatggtgcaacctttgcgggatgcgattcatgcagcaaaagccgcggcaggtgaaggcgcaaaggtgatttatctttcacctcaggggcgcaagcttgatcaagctggcgtcagcgaactggcaacaaatcagaagctgattttggtgtgcggtcgctacgaaggcgtagatgagcgcgtaattcagaccgaaattgatgaagaatggtcaatcggcgattacgttctcagcggtggtgagctaccggcaatgacgctgattgattccgtttcccggtttattccgggggttctgggtcatgaagcttcggcaatcgaagattcgtttgctgaaggattgctggattgcccgcactatacgcgccctgaagtgttagaaggtatggaagtaccgccggtattgctgtcgggaaaccatgcggagatacgtcgctggcgtctgaagcagtcgctgggccgaacctggcttagaagacctgaacttttggaaaacctggctctgactgaagagcaagcaaggttgctggcggagttcaaaaaggaactcgcgcaacagcaacataaacatgatgggatggcgtaa

SEQ ID NO: 173519 - DNA, 549 bp, Klebsiella oxytoca
atgagcaagcaacacaccgcacaagcacctgttgatccgattgtattgggcaaaatgggttcttcctacggtatccgtggttggctcagagtgttttcctccaccgaagacgccgaaagcatttttgactatcagccctggtttatccagaaggcgggtcagtggcaggttgttgagctggaaagctggcgccaccacaatcaggatatcgtcattaagctgaaaggcattgacgatcgcgatgcagcgaatctattgactaattgcgaaattgttgtggattcatcgcagctgcctgcgcttgaagagggtgactattactggaaagacctgatgggctgccaggtagtgaccactgaaggctatagcctcggtaaagtcatcgacatgatggaaaccgggtctaatgacgttctcgtcatcaaggcaaacctgaaagatgcatttggtatcaaggagcggctggttccgttcctcgatgggcaggttatcaagaaagtcgatctcgctactcgtactatcgaagtagattgggatcctggtttttaa

SEQ ID NO: 173520 - DNA, 249 bp, Klebsiella oxytoca
atggttactattcgtttagcacgtcacggcgcgaaaaagcgtccgttctaccaggttgttgttaccgacagccgtaatgcacgcaacggtcgcttcatcgagcgcgttggtttcttcaacccgatcgcttctgcgaccgaagaaggaactcgtctggatctggatcgtatcgctcactgggttggccagggcgcgactgtttccgatcgcgtagctgcgctgatcaaagccgctaacaaagcagcttaa

SEQ ID NO: 173521 - DNA, 1368 bp, Klebsiella oxytoca
atgtttgataatttaaccgatcgtttgtcgcgtacgctgcgcaacattagcggccgcggacgccttactgaagacaatattaaagatactctgcgcgaagtgcgcatggcgctgctggaggcggacgttgctctgcctgtggttcgcgacttcatcaaccgtgtaaaagagagcgcagttggtcatgaagttaataaaagcctgaccccggggcaggagttcgtcaaaatcgtgcgcaacgaactggttgccgcgatgggcgaagagaaccaggcgctcgatttagccgcgcagccgcctgccgtagttctgatggccggtttgcagggggcgggtaaaacgaccagcgtcgctaagctgggtaaattcttgcgtgaaaagcacaagaagaaagtcctggtggtttccgctgacgtttatcgtcccgcggcgatcaaacagctggaaacgctggcagagcaggttagcgtcgatttctttccgtctgacgttggccagaaaccggttgatatcgttaatgccgcgctgaaagaagcgaagctcaaattctacgacgtgctgctggtggataccgctggtcgtctgcacgttgatgaagcgatgatggacgagattaagcaggtccatgcaacgcttaatccggtagaaaccctgttcgttgtcgatgcgatgaccggccaggatgcggcgaataccgcgaaagcgtttaacgaagcgctaccgttaaccggtgttgtattgaccaaagtggacggcgacgcccgcggcggcgcggcgctgtcgattcgtcatatcaccggcaagccgattaaattcctcggggttggcgagaaaaccgaagcgctggagccgttccatccggatcgtatcgcttcccgtattctcggcatgggcgatgtcctgtccctgatcgaagatatcgaaagtaaggtcgaccgcgcgcaggctgaaaagctggcctctaagctgaaaaaaggcgatggttttgacttgaccgatttccttgagcagctgcgtcagatgaaaaacatgggcggtatggccagcctgatgggcaagctgccgggcatggggcagataccggacaacgttaaatcgcaaatggacgacaaagtgctggtgcgtatggaagccatcatcaactcgatgacgctgaaagagcgcgctaaaccggaaattattaaaggttcgcgtaagcgccgtatcgccgcaggctgcggaatgcaggtgcaggatgtgaaccgtctgctcaagcagtttgacgatatgcagcgcatgatgaagaagatgaagtcgaaaggcggcatgatgaagatgatgcgtggaatgaaaggtatgatgccgccaggtttccccggaggccgatag

SEQ ID NO: 173522 - DNA, 792 bp, Klebsiella oxytoca
atgcctgtttttgctctactcgcccttgtcgcctactccatcagcctcgcgctgatcgtccctggtctgttacaaaaaaacagcagctggcggcggatggcgattctttccgcaactattgcgttgatttgtcacgcctttgcgctggagtcacgcatttttcccggcggcgaaagcgggcaaaacctcagcttattaaacgtgggatcgctggttagcctgatgatctgtacggtgatgaccatcgtcgcatcgcgcaatcgcggctggctgctgctgcccattgtctacaccttcgccctgatcaacctcgcgttcgccacctttatgccgaacgagtacatcacgcatctggaaaccacgccggggatgttggtccacatcggcctgtcgctcttttcttatgctacgctgattatcgccgcgctctacgctctgcagctggcgtggattgactatcagttaaagaacaaacgattgaccttcagtagcgaaatgccgccgctgatgagcatcgaacgtaaaatgtttcatatcacccagataggcgtggtgctgttaaccctgacgctgtgtaccgggctgttttacatgcataacctgtttagtgcggaaaacattgataaagccgtactctctatcgtggcgtggttcgtttatatcgtcctgctttggggccactatcatgaagggtggcgcggacgccgggtcgtctggtttaacgtgactggcgcaggcctgctgacgctggcctactttggtagccgcgtattgcaacagttcatgagctaa

SEQ ID NO: 173523 - DNA, 1290 bp, Klebsiella oxytoca
gtggaacatatctccaccaccacgctgatcgtaacgctgatcatcatggtggttatctccgcctatttctccggttctgaaaccggcatgatgacgctaaatcgctatcgcctgcgtcatatggccaagcagggcaatcgtcaggcaaaacgcgttgaaaagctgctgcgcaaacctgaccgtctgattagcctggtcctcattggcaataatctggttaatattctcgcttcggcgctcggcaccatcgtgggtatgcgcctgtacggcgatgcaggcgttgccattgccaccggggttctgacgttcgtggtgctggtatttgcggaagtgctgcccaaaaccattgcggcgctctacccggaaaaggtcgcctatcccagcagccttctgctcgcgccgctgcaaatactgatgatgccgctggtgtggttgctcaacaccatcacccgcattctgatgcgcatcatgggcattaaaaccgatatcgtcattagcggggcgctcagcaaagatgaactgcgtactatcgttaatgaatcacgctcgcaaatctcccgccgcaatcaggacatgctgctgtcggttctggatctcgagaaagttagcgtggacgacatcatggtcccgcgcaatgatatcgtcggtattaatattaacgacgactggaagtccattgtccgccaactgacccactctccccacggccgcatcgtgctgtaccgcgacacccttgacgatgccatcagcatgctgcgggtacgcgaagcttatcgcctgatgacggagaaaaaagagttcacaaaagaggtaatgctgcgcgccgccgacgaaatttacttcgtgccggaagggacgccgctcagcacccaactggtaaaattccagcgcaacaaaaagaaagtgggcctggtggtggatgaatatggggatattcagggcctggtcacggttgaggatatcctcgaagagatcgtcggcgattttacgacctccatgtcgcctacgcttgcagaagaggtaacgccgcttaacgatggttcagtgattatcgacggtaccgccaacgtacgtgaaatcaataaagcatttaactggcatctgccggaagatgaagcgcgaaccattaacggtatcattctggaagctctcgaagagatccctgcccccggcacccgcgtgcgcattgaacagtatgatatcgatattcttgatgttcaggagaatatgattaaacaggtgaaggttatgccggtaaaacccattcgtgaaagcgtggcggagtcatag

SEQ ID NO: 173524 - DNA, 591 bp, Klebsiella oxytoca
atgagtagtaaagaacagaaaacgcctgaggggcaagccccggaagaaattatcacggagcagcacgatgacgttgaggcggtagagcctgaggtttcggctgagcaggtggatccgcgcgatgaaaaaattgcgaatctggaagctcagctcgttgaagcccagaagcgcgaacgtgaagtattgctgcgtgcgaaagccgatgaagataacctgcgccgtcgtaccgagcaggatatcgaaaaagcgcataagtttgcgcttgagaagttcgtcaacgaactgttgccggtcatcgacagcctggaccgcgccctggaagtggctgataaagccaacccggatatggcgccgatggttgaaggtatcgaactgacgctgaagtcgatgctggacgtggttcgtaagtttggcgtggaagtcattggcgatactaacgtgccgctggatccgaacgtgcatcaggccattgcgatggttgagtccgaggacgtaccggcaggtaacgttctgggcattatgcaaaagggctacaccttgaatggccgtactattcgcgcggcgatggtaaccgtagcgaaagcgaagtaa

SEQ ID NO: 173525 - DNA, 879 bp, Klebsiella oxytoca
atgaagaatcacttcaagtgtataggcattgtgggacaccctcgtcacccaaccgcgctgaccacacatgaaatgctctggcgctggctgtccagcaaaggttatgaagttctggttgagcagcaaatcgctcatgaattacagctcagcaatgtgaagaccgggacgctggcggaaattggccagcaggcagacctggccgtcgtggttggcggcgatggtaatatgctcggcgcggcgcggacgctggcgcgctacgatattaacgttattggcattaaccatggaaatctcggctttctgaccgacctcgatccggacaacgcgctacagcagctcgctgatgtgctcgaaggccactatatcgccgaaaaacgcttccttctggaagctcaggtctgtcagcaggattgccagaagcgtatcagcacggcgattaacgaagtcgtcctgcaccccggtaaagtagcgcatatgattgagtttgaagtctatattgacgaggtgtttgctttctctcagcgctcagatgggctcatcatctccacgcccaccggctccacggcctattccctctccgccggcgggccgatccttaccccttcgctggatgctatcaccctggtgcctatgttcccgcatacgctttcggcccggccgctggtgatcaacggtgacagtactattcgcctgcgtttttcgcagcgctgcagcgacctcgaaattagctgcgatagccagatagcgctgcccattcaggatggagaagatgtgctgatccgccggtgtgattatcaccttaatctcatccatcctaaagattacagctatttcaatacattaagcactaagcttggctggtcgaaaaaattgttctga

SEQ ID NO: 173526 - DNA, 1662 bp, Klebsiella oxytoca
atgttggcacaactcactatcagtaattttgctatcgttcgtgagctggaaatcgattttcacagcggtatgaccgccattaccggcgagaccggcgccggtaaatcgatcgctatcgacgcgctggggctgtgcctgggcggtcgggcggaagccgatatggtgcgcagaggcgccagccgggctgatttatgcgcgcgcttctccctgaaagacacgccggccgcacaacgctggctggaacaaaaccagctcgaaagcgggcgtgagtgtttacttcgccgcgttatcagcgcagacggccgctctcgcggctttattaacggtacggcggtgcctttatcccagctccgcgaactgggacagcttcttatccagatccatggccagcatgcgcaccaactgctgactaagcccgaacatcagaagactttacttgatggctataccggtgagtatgcgcttactcagctaatggctgaacgctatcgtcagtggcacaaaagctgccgcgatctggcgcagcatcagcagcaaagccaggagcgcgccgcgcgtgcggatctggtgcagtatcaactaaaagagctcaacgagtttaatccgcagccgggcgaattcgagcaaattgatgaagagtacaaacgtctggccaacagcggtcaattgctgtcgacctgtcagcatgcgctgtcggtgatggcagacggcgaagaatccaatctgcaaagccagctctatgccgcaaagcagctggtgagcgagctggttggtatggacagtaaactctccggagtgctggatatgcttgaagaagcatctattcagcttagcgaagccacggacgagctgcgtcattatcacgatcgcctcgatctcgatccgaatcgtctgttcgaactggaacaacgtatctcccgacaaattgtcctggcgcgcaagcatcaaattacgcccgaggagcttccagaattttaccagtcactgctggaagagcagcgtctgctggatgatagcgccggttccctggaatccctcagtcagatggtcgtggagcatcatcagttagcccttgagacggcgaagcagctacatgccctgcgtcagaatagcgctgatgagctgactcggttaattacggagagtatgcactcactttcaatgccacacggtgtattctccattgatgtcgcgtttgatgagcgtcatctcaccgctgaaggcgcagaccatattgaattccgggtaaccaccaacccgggtcagccgctgcagccaatcgctaaagttgcttccggaggcgaactctcgcgtattgcgctggcgattcaggtgatcactgcgcggaaaatggaaactccggcattgatttttgatgaagtagatgtcggtatcagtggccctacggcagcggtggtgggcaaactgctgcgccagctaggtgagtcaacccaggtgatgtgcgttacccacttaccgcaggtggccggttgcggacatcatcatttcttcgtctgcaaggaaacagacggtgaaatgaccgagacgcatatgcaccctctggataaacgcgctcgcttgcaggaactggcccgtctgctgggcggcagtgaagtcactcgtaacactctggcaaacgcgaaagagttgcttgccgcgtaa

SEQ ID NO: 173527 - DNA, 342 bp, Klebsiella oxytoca
atgcgctgtaaaacgctgactgctgccgcagcggttcttcttatgttgaccgcaggctgttccactctggaacgagtggtttaccgtcctgacatcaaccagggtaactatctggcaccaaccgatgtagcaaaagttcgtgtcggcatgacgcaacaacaggttgcctatgccttgggtacgccgatgatgtcggatccgtttggcactaatacctggttctacgttttccgtcagcagcctgggcatgaaaaagttacccagcagacgcttaccctgacctttaacagcagcggtgtgctgaccaacattgataacaaacctgccctgacggcggagtaa

SEQ ID NO: 173528 - DNA, 291 bp, Klebsiella oxytoca
gtgccggctaaaatcgtggttgaagtggcctacgcgttgccggaaaaacagtatctgcaaagcgtcaagcttgaggagggggcgacggtcgagcaggcgattgttgccagcggtcttctggcgctacgtgacgatatcgatctgacgaaaaacaaagtgggaatttatagccgcccggctaagcttcaggatcgcgtccatgatggcgatcgggtcgaaatctatcgtccgttgattgctgacccgaaagagctacgtcgtcagcgggcggagaaaaacgccggaaagtaa

SEQ ID NO: 173529 - DNA, 438 bp, Klebsiella oxytoca
atgcctcagattagccgtaccgcgctggtgccgttcagtgctgaacagatgtatcaactggtaaatgatgtaaagtcctaccctgattttctgccgggctgtaccggtagccgggttctggagcttgggccgacgcaaatgactgcggcggttgacgtatccaaagcgggtatcagtaagaccttcacaacgcgaaatacgctcaccagtaaccagagcatcctgatgagtctggtcgatggtccgtttaaaaagctgattggcggctggaaatttatccccttaagcccggaagcgtgcaaaattgagtttcatctcgattttgaattcaccaataagctgattgaaatggcgtttggtcgtatcttcaaagaactggccatgaatatggttcaggcattcacgacgcgcgctaaagaggtctacagtgccggctaa

SEQ ID NO: 173530 - DNA, 483 bp, Klebsiella oxytoca
atgactaagaaaaaagcccacaaacctggatcagccaccattgcgctgaataaacgcgctcgtcatgaatactttatcgaagatgaatacgaggcgggtcttgccctgcagggatgggaagtaaaatctctccgcgcaggtaaagccaatattggcgacagctatgtcattttgaaagatggcgaagcctatctgtttggcgccaacttcacgccgatggcggtagcgtccacccactacgtatgcgacccaacgcgtacccgtaagcttctgctcaatcagcgtgaactggataccctatacggacgtatcaaccgtgaaggttacaccgtggtcgctctttccctgtactggaagaatgcctggtgcaaagtcaaaatcggcgtagcgaaaggtaagaaacagcacgacaagcgcaccgatataaaagatcgcgagtgggcagttgataaagcccgcattatgaaacacgcaggtcgttaa

SEQ ID NO: 173531 - DNA, 1242 bp, Klebsiella oxytoca
atggcaagaaaaaccaagccgttaaccgatacggaaatcaaagccgccaaacctaaagatgccgattaccagctttatgatggtgatgggctgaccctgttaataaagtccagcggtagtaagctctggcagttccgttactatcggcctctaaccaaacagcgaaccaagcagagcttcggtgcctaccctgctgtctccctttctcatgcgcgtaaactcagagctgaatctcgagttttgttggcaaaagatattgatcctcaggaacaccagaaagaacaggtgaggaattctcaagaggccaaaaccaacaccttcttgttagttgccgagcgttggtggaatgtgaagaaagccagcgtaacagaggactatgccgacgatatctggcgctcgcttgagagagatgttttcccagcaatcggtgatatcagcgtcactgagattaaggctcatactctggttaaagctgttcagccggttcaggccagaggtgcattagagactgttcgccgcctttgtcagcgtattaacgaagtcatgatttatgcgcagaacacaggcctgattgatgcagttcccagtgtaaatatcggaaaagcgttcgagaaaccgcaaaagaaaaacatgccgagtatccgtccggatcagcttccacagttaatgcaaacaatgcgtacagcaagtatcagtatgtcaacgcggtgcttgttcatgtggcagcttctcaccattacccgccctgccgaagccgctgaggcacgatgggatgagatcgatttcagtgctaaagaatggaaaattccagcagctcgtatgaagatgaaccgagaccatacggttccactatcggatgaggctctttctattctggaaatgatgaagtcactcagtggtggccgagagtttatctttcccagtcgcatcaaaccaacccagccaatgaacagccaaacagttaatgccgcacttaagcgtgctggcttaggaggcgtactcgtatcacacggtttacgctctatcgctagtacggcactcaatgaggaaggattcccgcctgatgtcattgaagcagcactggctcatgtagacaaaaatgaggtacgtcgcgcttacaaccgcagtgattaccttgagcaacgtcgtccgatgatgcagtggtgggcttactttgtgaaaaaggcagatagtggcagactcactgacgttgaattaacaacattaaagctcactggatga

SEQ ID NO: 173532 - DNA, 348 bp, Klebsiella oxytoca
atgttactttccttccactttctgcaattatggcccgaactggaattgaaaggggtcactggagtcaccggtaaaaatgccgcaataactcacttctggctggaagtggaagattacgttattgatatcaccggagatcaatataacatcatcaacgcccgtaaactaaacgaaaatatcgtaagaaacaggccctttatgcctgttcacgtcgctcatcgaaaggacagctatctctatgatttatttaaaatacaagggacagaactcttaacctatgggtttccgacaatcggtaatgattttattgatgagatggaatgtgattatcgccagcttgtcgggtga

SEQ ID NO: 173533 - DNA, 474 bp, Klebsiella oxytoca; identical to SEQ ID NO: 85977

SEQ ID NO: 173534 - DNA, 1527 bp, Klebsiella oxytoca; identical to SEQ ID NO: 85978

SEQ ID NO: 173535 - DNA, 225 bp, Klebsiella oxytoca; identical to SEQ ID NO: 85979

SEQ ID NO: 173536 - DNA, 1845 bp, Klebsiella oxytoca
gtgcatacttttgcaaacctgatgtacgacgtttacgagtccttcggcctgttccagaaaggggctcgccaagcagacatacgtggatccgctaacttttcaggtcaccagcgttttttcgataacaatgatgacgaagagctaatgcaagaaaaacgctatgatgaaatcatcagacaccttgatgaggagggggtgttcagtacggagcaaagaaggaagattttttataaatatgagcaactttataatgctctgatgactcggcctgtttttactgaattaagtcgtaaacaaatacaaatccgctacgcccagtatatactccctaggctcatcgcacttgatatctataaaacttacaatgctgaaaacaaaaatagcttttatcaccatatacacattttcttgcagaaagagtactgcccatgctgggaggagaaaaaaaaaggtgctttttctgccgttcggcagtatctgaagaattcagtaagagaactagaattctctcatacagaaaatctgacacctctttttaaagtcattgaaaacatccgccctggtaacacacagaaaaaaggtgcgctggatacatcaattatagaatgccttgaggcgtattctggtattgtcgacgataagacactgaacagcatcagagtcaaccttgataatataaaaaaggcccattactccctgaccgtactcctgaatactgagcgaaaactccctgtcattaatatcatctcacggtactacagaaaccatgtagataatggaataaaacccggaaatatatcagcaatgttatgcagactactgtatgaaccagaaccccaagattttatccatcatgataccatgattaactcaattgcgaattattatcataagagagcaataaaaccgatttctctgaatataaacgaggaatgtttacagagtatcagcgcattaaaaaacatcgttttcaacttcaataataaaaccattatctccgaagcacagttaactgacatcgctgtaaaattaaaaaaagacccccatgaacaagttattcaaccgtattttgaactctggaaacttatagatttaatcagtaaaggggaaacagaggaagcctatgagaaagtcaaaattttttctctggatgatttacctgtaggatacctggcatccgcttttttagttatccatattgcattacgcataaagttcgagaggaaaaccgttaaaaaaggtgttttctcatcatctgtaacaactattcttgaaaatcagggaatttatactgactatatccccgtcagttgggcttatatagaaacccaaagtgacggctctgttatgaaaagcccccttctttctgaatccattttatcagatgccaacaatctgaccatcatgcgttcggtaaggatgtataataacatggtcaggagaataagtgactggaatgaccttgagctggaaggtatttatccagagtctgtttacgggcttcttgataaatttgacactatcctaggtaagatactcaacattatctttgttgaaaaaatcacttccagccatgatttagctttcattctgaaaaataaaaaagttttggctcgaggtgaactgaatgatagccttatcggcatactgattaactgccctcttttgacgtgcgtacgggacctgaagagcttaataaaatatcttcgctgtccgggagaggaaataaaaaatataattctttcagttgacaaaaaaacctggaatttgacacatggagccctgaagattctggaggaagaaagaaagatacaggcgggaaaaacacagggaggtagaaaataa

SEQ ID NO: 173537 - DNA, 3123 bp, Klebsiella oxytoca; identical to SEQ ID NO: 85981

SEQ ID NO: 173538 - DNA, 849 bp, Klebsiella oxytoca; identical to SEQ ID NO: 85982

SEQ ID NO: 173539 - DNA, 1845 bp, Klebsiella oxytoca; identical to SEQ ID NO: 85983

SEQ ID NO: 173540 - DNA, 507 bp, Klebsiella oxytoca; identical to SEQ ID NO: 85984

SEQ ID NO: 173541 - DNA, 1131 bp, Klebsiella oxytoca; identical to SEQ ID NO: 85985

SEQ ID NO: 173542 - DNA, 876 bp, Klebsiella oxytoca
atgaaaaaatcagaaggtctgcaggccatcgaaaagccgttagcgtcactcccacatgctattggcaaacatatttttggccatattcaaaagctcattcactacgagccggtgattggaatcatgggtaaaaccggtgtcggtaagtcatctctctgcaatgccctgttccagggcgaagtcacgccggtcagcgatgtggcggcctgcacgcgcgatgtgctgcgcttccggtttcgcaatggcaatcacagcctgatgattgttgatttacctggtgttggtgaaagcgagcaacgtgacgaagaatacaccgcactgtatcgtcgcatcctacccgagatggatttggtgttatgggtcatcaaagctgatgatcgggcactgtcagtggatgaacacttttatcgcaaagtgatgctggcgtatcagcgccgtgtgctgtttgttgttaatcaggctgacaaggctgccccctgccatcagtggaataccaccagcaatacaccatctcatagccaacaatcgactattgaggccaagcggagcgcagtacagcagctctttctgccgcatcatccagtcagtgttatatcggcccaaactggttgggggctggatgcgatggtagagacgatgatgcacagcctgcctgaccgggccaccagtccactaacgacacagttgcatggcaggctctgcacagagccagtaaaaaagcaggcacgcgagcgctttggtaatgcagtggatgaaatgattggcactgtggagtcatcatcttttctgccagcgcctgtaagggctgtaattcggaccgttcgggaagccgtggtgaccgctgcccgtgccgtctgggactggattttctcatga

SEQ ID NO: 173543 - DNA, 705 bp, Klebsiella oxytoca
atgtcccagactgagcgtcgccatgagcggctggcggttcggctatccctcattatcagccgccttgttgctggcgaaacactggatatgggccttcttgccgcagagtttggtgtatcgatccgtaccctccgccgggattttcgtgagcgactgatgtacctggacctggaatatcgcgacggcacctgtcgtctgctctcaggtagccatcagcgcgaactggcggtgctgacttttgctcgtcagtcaggtgtggaggccttgtttcctgacatggatagccacatggtcagctcactgctgagtgggcccggtgagtctccgtgcctcatatgggcagaatcggagtcattgtcgccgcccaggccaggcatatttacacgccttgtcagggctatatcagagcatcgtcgcgtgacgctgctggctgaaggttgtcgttgctcagggcttgcaccataccgcctcgtactctgcggcgggcattggtatctgactggagagcatcatcatcgcgtggcagtgtttccgctgaacgatatccatgcggttaccttgcacccggaactgttcgtgcccgaccttcagattcgtaacgttctcgccgaaccggaattactcagagcccttcctcattttcacgtttttcactcactgctcgccagaactggcgacggtcttttacctcataaggaatcatga

SEQ ID NO: 173544 - DNA, 570 bp, Klebsiella oxytoca
atgaagaaattactgattacaacggcactggccgtcagtctctgcgctggcgctacctttccgacgtctgccgaaactgtcgtgggtaccgtcaaattctggcagtacatgcaggcggatggctggaagtcggccgatggcatggataacgacacgctaaacaatacgctctatcaggccagtgtgattggcaattatccctggaccaggcaattcctgctgcgtcagcggggtggtggtgcttattttctcgccgataagaaaacgcatactgtgcgcaagctgaatctgaaacctgccagcggttattactccgacctgacatcggtctatcagggcgaagaccaggggaaagggtgttacttcactatcatcgatacccagtatcagctggagctggctgacgaacctcacagcaaccagatacttgctgcattcccggaaaactgtgtcaacaaacagcagcaggctgccctggcggcgaagcgttctgcctcagagcagaaactgcagcagtgggtagcccagcagagtctggctgagttgtgccgacgaactggcaactgctga

SEQ ID NO: 173545 - DNA, 453 bp, Klebsiella oxytoca
atgaagaaattgtatcgacctgttctcactgttttgatagttatcggtgccatgggggtttctggctgcgaccgcaaggaagatgcgggtgtgaaaacgatagccagttttaaggacctgactccgccaccgttcagcaaggttgtctcgcataaatccgatattgcccaggaatgggtaaagaaggatgctttcggcacaccgcaatatacggtgatgaaaaccaaccagtcgccggaaggctgtgagtcaggcaattattactacattgcggatatgcagcagaaaacggtgcagcctctgattgctgccctgtgtcttgcggacaatatcaccctgagcttccggattgaaaccgacagctacacgggtgaaaaatcggtggtgtattcgcacgatggcaaggaaatggggaaactctatctgccggagaatcaggagaaaaatccatga

SEQ ID NO: 173546 - DNA, 450 bp, Klebsiella oxytoca
atgaagaagctgaaaggcgttatctcagttttcgctctgagcctttgtctgctttcaccggctcaggccgaagaacagcgttacatcagcatccgcaacacagacatgatctgggtgccgggcaatgtctgcgtgtggcagtttcgcctggacaacggcggaagtggtgaaggattcgggcctctgacactttccctgcgtctgaaagataaagggggaaacacgctggccatggggaatatggcagtggctgcatttggcgacagcgatgccactcgctctcaggaagcctcgctggagaacgaatgcgtggaaaacgttagctccgtcgaaatcatgaaggcaacagaagagcgtaatggttaccagattgacctgccgctttccgttttcgacccgcagtactaccgacctgtacaagtcacggttgtcggtggtaaggcatcttag

SEQ ID NO: 173547 - DNA, 231 bp, Klebsiella oxytoca
atgactgaactcactgaattgcctgatggaccgtttactcgccagcaggcagaggcggttgcgtctcaatattccaacgttgctatagaggacgacctggggacacatttccgtctggttgtccgtcatgagcgttgcatggtctggcgagcctggaactttgagccggatgccggttactggctgaaccggtatatcactcgttatggcatccgcaaatttcctgcataa

SEQ ID NO: 173548 - DNA, 822 bp, Klebsiella oxytoca
atgcgattagccagccgctttggccgtataaaccagatacgccgtgaccggcctctgacctacgaagagctgatgagtcatgtccccagcgtgttcgggagtgacaaacatgaatctcgttcagacaggtacacctacatcccgaccatcaccatccttgaaagcctgcagcgtgaaggctttgagccgttctttgcctgccagacgaaggttcgggaccagagcaagcgggagcacaccaaacacatgcttcgcctgcgccgtgccggacaactgacagggcatcaggtaccggaaatcattctacttaacagccatgacggctcatcaagttaccagatgctgccggggctgtttcgaggcgtgtgtaccaacggcctggtctgcggacagtcatttagcgaagtgcgggtaccacataaagggaatgttgttgagaaggtgattgaaggggcttacgaagtgctcggggtctttgaccgggtggaggagaagcgcgatgcaatgcagtcactggcgctgccagccccggcccgtaacgccctggcgaatgccgcgctgaagtatcgctttggtgaagaccaccagccggtcacggtatcgcagttgctgaccccacgtcgccgggaggactacagcgatgacctgtggaccgtctaccagcgcgtgcaggagaacctgatgaaaggtggattgtcagggcgaaccgctcaggggaaaagcagccgcacccgtgctgttaccggtattgatggcgatgtgaagctcaatcgcgccctgtgggtaatggcagaaaacatgctcgattttttcgggcgttaa

SEQ ID NO: 173549 - DNA, 444 bp, Klebsiella oxytoca
atgaatacacaaaatcatcagttcgcgaagcatacagcaattactgcctcggtggtccctgacgagttacgcatcggcttctggccgcagcactttggctccatcccacaatggataacccttgaacctcgcattttcgcctggatggatcggctatgtgccgattaccagggtggtatctggcgcttttcgacactcagcaacggcggtgctttcatggctcctgagtcagagcacgataagacgtgggcattgttcaacagcatgaacggcaatggagcaaaactcaccagtgaagcagcaggaatagtcgcctgtctgatgacatacagtcaccacgcctgtcgcaccgagtgtgatgcgatgactgagcactattatcgcttacgcgacttcgcgctgaaccatccagagtgcaactccattatgcatctcatcgactga

SEQ ID NO: 173550 - DNA, 543 bp, Klebsiella oxytoca
atgagtaccgcgttatcccaattgtcatcacagcctgaactctttccgctgtcggttatggctcaacatggttgcctgcttcccgcgacttccggattgacaccctatgcccaacagaccattcgccgggctatcaatctgctggataaatatctgcgtcagcccggtatatcttttacctcaagtgctgctgcccgtgactggcttcggttacagctggcaggacaagaacgggaagtgtttatggtgctctatcttgataatcagcatcgtttactggagagcgaaacgctgtttgccggttcagttaatcatgtccaggttcattcccgcgaggtggtgaagtcggcgcttcgtttcaatgctgcagctgtcgtactcgcgcataaccatccctccggagatccggagcccagcaaagccgatcgccagatgactgacaggctaaaggaggtactggagctggttgatgtgaagacgctcgatcatctggttgtcggccaggatggcattgtgtcgttcgctgagcgagactggatatga

SEQ ID NO: 173551 - DNA, 222 bp, Klebsiella oxytoca
atgaaaatcatcagtaagcgccaggccatggctctgtaccgacagcatcctgactcccgcctgtttcgcttctgtaccggcaaatataaatggtcaggcagtatctgccattatgctggccgggaagttcaggacatacacggcgttctggccgtgtttgctgaacgtcgtcaggaccgcaatggtccctatgtcattcttcgaagtgtcactctcaattaa

SEQ ID NO: 173552 - DNA, 366 bp, Klebsiella oxytoca
atgaacaatcactcagaatccggtaccaagccggagaatcccgccatccagcagtggggactgaagcgcgatataacaccgtgttttggcgcacgtctggttcaggagggcaaccgtctgcattatctggctgaccgtgcaggattcagcggggcgttcactgacgatgttgcaatgcgcctcgatcaggcatttccgcttatgatgaaacaacttgagctgatgctgaccagcggcgagcttaacccccgccatgcacattgcgtcacgctgtaccacaacggcctcacatgcgaagccgatacactcggctcctgtggctatgtctacattgctatctatcctgagcagactaagccgcagtaa

SEQ ID NO: 173553 - DNA, 330 bp, Klebsiella oxytoca
atgcaaaccatatcatcacacccgacgcgggcgactcagccctgcctgtcacccgttgaaatctggcagttgctgctaactcatctgttatcgcagcactatggcctaacgctgaatgacacaccgttcagtaatgaaaccaccatacgggaacatattgatgctggagtatcgctaagcgatgcggtgaactttctggtagaaaaatacgggcttgtccgtatcgatcggaaaggattttcgtggcaagagcagaccccgtatctttccgtagtggatattttgcgagcaaggcgctctaccggcttgctaaaaactaatgtgaaataa

SEQ ID NO: 173554 - DNA, 567 bp, Klebsiella oxytoca
atgctctctggcactcatcggcattgcacgggcttgacgtcgcaggatggcgaaaaagacgttacacgccccattttcacaggatcaattttgaatatttactcaaaacgctgcgtgatacgaccgtttaacgccgatgatatcgagccttttatggcatatcgcaacgatgccgaatggatgcagtaccaggggtttaagggcctgacaaaggaagcttatgccgaggcgttgctgggaaacgcttctcttacgcagggcatgcagctcgcggcgatcgataccgcgaccgggactttgattggcgatctctacttaaaacaagaaaacgagaccatctggcttggctacaccgttagcccacggtatgcaggtcagggttacgcccttgaaactgcgatggcggtcattgactggtgtaagcagcaaggttttttagccgtaaaagccggcgttgtggcagataatcttccctcaataaatttactgaacaaactcggattttcctgttcctgcacggaggatgatgagcagatttttgttttaaacatacaatccgctcattaa

SEQ ID NO: 173555 - DNA, 552 bp, Klebsiella oxytoca
atgaaacgagctgtgaatgccctacaaaactttggaaaatccctctatgggccggtacttatcttgccgatagtgggtctgtttatcgcttttggcaacgtgttgggcaacggcaaccttgcggaatatctgcccttgctcggccatccttttattcagaatatcggccagctcattgctaaatcagcggtatcggtactggtgaacctggcgctgatcttcgctgttgggatccccgtaggcctggccgcccgcgataaaggctacgcggcgctcattggcctggtgacgtttatcgtctttatcaacgccatgaatatcacactgcagctgcagggtcagctcgcggcgccggaaaagatgaaagcagtcggccagagcatggtgctgggcggccaggtgcttaagatgggggtcttctccgggatcctcaccggcgcgctttcgggctacagtcttatatcggttacgggtatgaatcttacgtattcggcctgccaccctgcgaatgcgccaatctgccggtgcccgctatcgacgatcagggaatga

SEQ ID NO: 173556 - DNA, 1767 bp, Klebsiella oxytoca
atgatgagccttaaggggaaactgaaattatacgatctcagaggtcttgcgattgtatttgctctctctaccctttttgtcatgctccctgctcgttccgaggggggagacttccttgataatatcaagaaacttgaaattaaggatccgccggcctcaggcgccgctagcgcggagtcggcctcgtctaatcagaataacgagagccgtgataaaaaaatgccgccgaagcaggatggcgtcagcaaaagaataaatcagagcaataaaacgcaaagtacgattaacgctctgcgcaaacagaatgcggagctgagcgcggcagccaaagcggcggagaaaaaactcgctgaaacaacgcgcgaactatcggcgcaaatcgccgcgctgaaggcgcagagtagccagggtgtacagaaagaggggggcgatcctgccgcggtgagcgcgctgactaaaaagaacctcgaactggccgccactgctgaagcggcgcagcaaaagctggatgagaccacccgcacgctgtcggcgcagattgcggcgttaaaggcgcagcgtgcacaggacgaaaacgggcataagagtgctcttgaagcactgcgcaaaaagaacgctgaactgaactccgctgccgaagcggcgcagaaaaagctggatgatacgacccgcacgctgtcggtgcagatcgccgcgttgaaaactcagaaagggcaaagtgagaacgctcagaaatcaacgatagacacgctgatgggcaagaaccttgaactgagcgctgccgccgcaatggcgcagaaaaagttggatgagaccactggcacactatcagcgcagattgccgcgctgcaaaagcagaacgcccaggataaaagccagcagaaatccgcgctcgacgcgctgaacaaaaagaatgctgagctgagcgctgcagccgaagcggcgcagaaaaagctggatgagaccacccgcacgctgtcggcgcagattgccgcgctgcaaaagcagaacgcccagggcgaaagtcagcacaaatccgcgctcgacgcgctgagcaaaaaaaatgctgagctgagcgccgcagccgaagcggcgcagaaaaaatatgctgagtcagttgctgctttgaacaatcaaaatcagaaattacagtctgcccttgatagccaggccataaaggaaagtgagttaaagcttactgataaaagcattaaaaatgcctacgcactcggcgttttctatctgactcaggcgctatcggatgtgaataaaatggctgacaatgatgtgaagctgtcgccttcggcgctggtttcaggctttaacgatgcttaccataaaaagctgaaaatcaaagaaggtgaaatagaaaccatcgttaacacccttaatgaacaaatgtcatctaagtacgttgatattgaaaaaagaatcatggccaaaattaaaaataaaaaatatgaggttttgcctaatggtgtctatttcgtgattgataaacaagggaagcaagcttacaagcagaatgagtccttatccctgaatatactggagaaaaagcttgatggtaccccgatactcaatacgatgaattccaggatgatatacgacaaacaaatcgatcccctgatggccaaagttttaactgcgggcttaaaaggcggcgcggtcacgctatatggtcaggctggttcgctgtacagcacgacgcccgctgacataaatcctgatacgttaatctcaattacctttgaactcattccctga

SEQ ID NO: 173557 - DNA, 405 bp, Klebsiella oxytoca
atgataagaaatagcttattggcattggtgtgtatttctgtgggtgtattgcaggggtgtactaatattaaaaaaacagatagcgcactaataaagaaagatgtgagtcaaaccgaacagcctgcacaagttcctgctttacagcagtgtatccaggatgcggatgctttagttaagctggataacaagttccagaaagattcaagtgaactctatggcttaattaacgacgctaagttttatgcctctgtttcggggcaaacctcagccagcgtaaaatcaaccattaccccgctttttgaatataagataaatgataagtgtaatagtatttctcagaaattaatcaaggagttcgaaacccgcgcccggaaagccgatgttaaagatgggctgaccagatga

SEQ ID NO: 173558 - DNA, 975 bp, Klebsiella oxytoca
atgtgctggactttaaatcgtccgccgcaaatacttagttcatttattagtgaactaaatgccatgcttaacgacgcgacgctaaacattcgacagctccaggtttttgaggcggtggcccgccttgagagctatggccgggcccagcaggagctggggatttccgtttccgcgatcagcaacgcgatgtcgcagctggagggccagctgggctttagcctgtgccagcgcggacgcggcggctttgcgttaacggagaaagggcagcattttttacagcaggcgatccgcgtgctgagcgaactgaacgagctggagcgccagtcggcgctgctgaaaggcgagcatagcggcacgatttgcatctcaacgcttgactccatcgaaacggaaaccgcgctgtcgctgccggtggtgctgcgcagctttagcgataagtttcctaacgtacacatcaagctgattattcgcaccccggcggaacagctgaacggcgtactgaataaccatatcgatctcgccatcggtagctacaattcgcgggtgcataacatcatcagcgaaccgctctaccgcgagcagcactggctctactgcagcgacctgcatccgatgttctttagtcgccagctcgataaagatctcatcagccagtgtccactggtgacgcgcagctactggaataccagcgatctgcggcggcgcgggttcagcaagggcagcgccacggttgaaaccgtcgatgcgcagctgctgttgatcctgtccgggaaatacatcggctatcttccagaacactacgcctggccgtggattaaagagaatcgcctgcgcgtgctgctacccaatgagtttggctttcaatctcccttctcggcgatctgcaagcgcgggcgcagcaatgaaccttatctcaaggagtttcgcaatcttctgaagaagaataccgtagccaggccgaagtggagtgcatga

SEQ ID NO: 173559 - DNA, 951 bp, Klebsiella oxytoca
atggataacgtctttcatcaaccgcagggtggcaatgagatgccgcgttttggcggccgcgccacgatgatgcgcctgccatttattgaggatttacaggggcttgatgccgcatttgtcggcatccctctggatatcgggacctcgcagcgttccggaacgcgctacggaccgcgctatattcgtaccgaatcggtgatgattcgcccgtacaacatggctaccggcgccgcgccttttgattcactgtcggtggcggatatcggcgacgtaccgattaacacctatagcctgctcaaatcggtgcagattatcgaggattactacaccggtttgaatagtttttcgctcatccccctgacgcttggaggcgatcacaccattaccctgccgattctgcgcgcgttgaccaaaaagcacggtccggtaagactgattcacgtcgatgcccacaccgataccaacgatgaaatgttcggcgaaaagatcgcccacggcaccaccttccgccgcgccgtcgaagaggggctgcttgatcttaaacgcgtcgttcagataggccagcgcgcgcagggctacgccgccggcgacttccagtggggcgtcgatcggggctttcgtctggttcaggcggagcagtgctggcacaaatccctggcaccgctgatggccgaagtgcgtcaacaaatgggagatggcccggtttatctcagttttgatatcgatagcctcgatccgatctgggcccccggcaccggaaccccggaagtaggcggcctgacgtcaattcaggcgctggaaattgtgcgcggctgccgcggtctgaacctgattggctgcgacctggtcgaggtctcgcccccctatgacgtcagcggcaacacgtcccagctggccgccaacctgctgtatgaaatgctctgcgttctcccgggcgtgaaatatccatag

SEQ ID NO: 173560 - DNA, 849 bp, Klebsiella oxytoca
atgcagcttaacgtctttcgcacgctgtggggcgtcaccaccccgtggcagcaaacggttagcgaactacagagcgtcggctgctgcggcatcgaagcgcgagtgccgctgacgacagaagagcagcgaacgctggcccggcgcctcgaagcgtccgcgcttcagtatatcgccattgtcttcagcggcggcggcgtcattccggcccaggccgagacgcccgcgcagcatctggagcgcttaaaagaacgttttgcggcggcaaaagcgcttaatccgcgcttcgtcaatctactggccggtaacgaccgctggccgctggcgcagcaggtggattttctcggcagagcgcatgaactggccgccgagtatgagctgctctgtagctttgaaacccatcgcgccacctcgctgtatagcccgtggctgacgctggagattattcaacagctgccgcagctgcgctttaccgccgatatcagccactggatcgtggtcagcgaacgcctgctggatgacccttacgatgacttcagcgcctttatcgaacgggtccaccatattcaggcccgcgccggatacgaccaggggccgcaagtgccacacccggccgcgccggaatatcaggcggccctgcggtttcaacagcgcttctgggagcaaatctggcaatcgcagcgccggcgcggctaccagcacaccacgctgaccccggagtttggtcccgatggctatctgcatcacctgccgtttaccaacgttccggtcgccgatctctggtcgctgaacgcctggatggcccggcgtgaacagcaacattttgtcgaattcacctcgctaactgcataa

SEQ ID NO: 173561 - DNA, 1077 bp, Klebsiella oxytoca
atgaccgctgcaaaaagttcttttactgaattaccgaccatcgacatcagcgacctgacctgcgccgatctcacccgacgacaggcggtggccgacgccatcggtcaggcggcccgcgaggtcggctttttctacatcaccggacacggcattgcgcccgagctgattgccggcatccgcgcggcggcgaaagagatttttgccctgccgatggagcgcaagatggcgtactacatcggacagtcgaaaagccataagggctacgttcccgaaggcgaagagatttacggctccggcaagccggatcgcaaagaggcgtttgatatcggcttccaggccgccgacgaccacccgttggtcgtggctaacacgccgctgattggcgccaacgaatggccggatatacccgaatttcaatcccgggtactggcctggtatgacgcggtcttctcccttggacatcgcctgtttgacgccttcgctctggcgcttggcctgccggaaggttatttcaggtcgatggtcacctgcccaccgtcaaagctgcgcctgatccactacccctttgacgccagcgccgaagatgttcccggtattggtgcacataccgactatgagtgcttcactctgctgctcgccgaccagccgggccttgaagtgttgaacgaagatagcgtctggatcgacgccccaccgctgaagaacgcgaccggagaagaggctttcgtgatcaatatcggcgacatgctggaagtgctgagcgctggcacatttgttgcaacagcacaccgcgtacgtaaggtgccgcaggaacgttactccttcccgctgtttttcgcctgcgactaccacacgctgatccgcccgctgccgggcttccttaaggcgggcgaagccagcgagtatcaagaactgagcattggtgaacatatgtggagccaggcgttacagacctatcgctacctgcgcgagaaagtcacccgcggcgagctccagctccccgaacgcgcccgcggcaccaacacctttggccatctgaaaaaacaagcccagcaaaaaaccgttaataacccgtga

SEQ ID NO: 173562 - DNA, 804 bp, Klebsiella oxytoca
atgaaaagaacgctaaaaaaactctcgcgccgtgtggctttgaccatcgccgtcaccgcttgtttttcaccgctgactcaggccgcagagctgctgaccgagggcgtatttaaggtcgggatggaggtgacctatccgccgtttgagtcctacgacagcaataataatatcgtcggcatcgacccggaatttgcagcgctgatcgccgaacagctgaaagccaaaccgcagcttatcgacacgaaattcaccagcctgattttaggtatcggtaaaaaatacgatgcggtgatttccggaatgtacgtgactcccgagcgtcagaagcaggcggatgcgattccttacgccctgtccggcgcatccattattgccctgaaaaacagcaccattcagcccaaaaccgaagatgaactgtgcggcgtgaaggtcggtctgcaggcgggtaccgcctgggtttccagtctcaaaaaacactccgacgagtactgcctgaaaaagggtaaaccggcgattagcgttcaggagttccccaccgcgccggaagcctcccaggccctgctgtcgaaaaatatcaacgcccagttagaaatcgccccggcggcgcaaattatcgtcgagaaaagccgcggccgcctggccattagctcaaatcgtctggtctatccgctgccgctggggatctacgtcgccaaaggcaataccgagctggccgaggccattaaatcaacgttagccacccttaaagccaacggcaaatatgacgccatcatcaagaaatacagcttagaaagcatcaattaa

SEQ ID NO: 173563 - DNA, 1518 bp, Klebsiella oxytoca
atggagttcgattggggatattttttctcattatttagcgttggggcattctggcaggcgtgcattaccgtcattgtcgtcagttcattgtcctggtttattggcctgatattaggttttcttttagcctgcgctaagctctccggcccgcgctggctgaaggttcccgtcgaactctatatttggttttttcgcagcgtaccgctgatggtgctgctggtctttgtctataacctgccgcagctgtttccggccacccagccgctgctcggcattccgtttatcgccgggctggtatcgatgacggtgaccgaagcggcttatatggcggaaatccatcgcggcggcctgctttcggtcgccaaagggcaaagcgaagccgggcatgccttaagctttagctttatcggaattcagcgcttaattattattccgcaggcgtttcgtatctccctgcccacgctgatcaacgaatatatcactatcattaagctcagctcgattctgtcggttatttcgctgccggaactgctgctgaccggccagcgcctgtacgcgcagaattttctcgtaatggagacgctgctggcggtcgcggtctattacgtcatggtggtcacggcctttacctggctcttccgggcgctggaaaacctgctggatattcagcgcaaacgtccgcaaacgctcaatgaaacggaatgcgaaaccctgcgtcaaaacctgaagccgccggtgcagacaacaaaagcgcagtccgcccgcggcaacccgccggcgctcgatttgcagggcatcgaaaaatcctggggccagcaccacgtcctgaaggggattgacctgaaagtagaaaacggcgaggtgatcagcatcatcggcccgtccggctccggcaaaaccaccctgatccgtaccattaacgctctggaaagcattgatggcggcgagatcattctttacggcgaggattatctcaagggcgcctccattatcgataaacagcaaatgcgcgcgggcgtgcgccgcatcggcatggtctttcagggcttcaacctctttcctcaccgtacggtgctggataacgtgatgctcgccccgctctatcacaagctccttgaccgccccgccgccagagagcaggcgctctggctgctggatcgcgtcggtctgctggcgcacgccgaaaaatacccgtaccagctctccggcggtcagcagcagcgcgtggccatcgcccgcgccctggcgctgaaaccggacatcatgctgtttgatgaacccacctcggcgctggacccggagctggttggcgaagtactcaaggtcattcagtccctcgcccgtgaaggcatgacgatgctgatcgtgacccacgagatggacttcgccttatcgatttctgatcgggtggtgatgatggaaaacggcgtcgtgcagagcgatgtgccgccgcagcgtattcgcagcgatgccgccgaaccgtccctggcccgcattcgtgaatttatgggagtgtaa

SEQ ID NO: 173564 - DNA, 729 bp, Klebsiella oxytoca
atgacaactgaactggaattacgccagcagctggcgggcgcctatcgtctggcggcgctgttcggctgggaagacacgctctatacccacttctccgttcgcctgcccggcgacggggagccgcgatttttgattaaccccttcggcatgatgtttgatgaagtgaccgccagcaacttaatcgtggtcgacatgcagggcaaggtcgtcgaaggcagcgcgccggcaaactcggcgggctttacaatccacagcgcggtccatatggctcgcgaagacgcccactgcgtgatccacacccacacgctgccggggatggcagtcgccgcctgtgcggaagggctgctgcagctcaaccagatcagcaccgagttttatcaacgcgtcggttatcatccttatgaaggcgtggccttcgatctcgatgaacgcgtgaggatccagcgctcgctcggcgagaatatcgccctgatcctgcaaagccacggcctgctgtcggtcggccgcaccgtcgccgacgcgttttacatcatgtattacctgaaccgcgcctgtgaaatccagatggccgccgcgcagctggcttcgctcggctccattcatacgatccccgatcgcctgagccagcacgcctgcgagcagctgatgggagtcgaacatgaacgccagctggtgtggcaggcgtggctgcgtcgcctcgaccgtcttgatacttcttataagagttaa

SEQ ID NO: 173565 - DNA, 933 bp, Klebsiella oxytoca
atgactccgttcactatcgtcgtggattgtaacgatcctcaatatgcccaggagatttgcgccgctttcgcgccatttccgcaggcaaaagcggtcctgcctgaccaccccgccgctcgcgaggcgcaatacgcctgctgctggtttcccgatccgcagatcctggcgcgatcgccgcagctaaagctgatccaggcagcgtccgccggcgtcgatcatctcccggccagcattttcgccagcgatgttccgctctgccgggtggttgacgatgattttcgccacggcatgtttgaatacgcgctgtggggcgtgctgtggtttcagcgccgctttgaccgggcgctggctcaccagcgcaagcgcatctggaagatgtatccgcagcgcgcggcggccgattatcacgttggcgtcatgggcctcggtgaaattggcggctatatcgcctcgcagctcgccgggatggggtatcgggtttccggctgggcgcgtagcgagaaatcccttgccggcgtgcgctgctttcacggcgacgcgctggccggtgaatttcttggtcagctggatgtgcttatcaacgtcctgccgttaaccgagcagacgcgaggtatcctcgcacaccctttactggatcggctccccaacggcgcggcgttgataaactgcggccgcggcgagcatatggtgaaccaggacgtgatccgggcgctggatagcggcaagttatccagcgcggtgctcgacgtcttccccgtcgagcctcttccccaggaagacccgctgtggcaacacccgcaggtagcaattacgccgcatatggcctccatcgcccagacggaggcgatcgcccgccagctgctggataacatccagcggctacatcgggcgctgccgctgaaaaaccgggtgaacaaacagagtggttattaa

SEQ ID NO: 173566 - DNA, 795 bp, Klebsiella oxytoca
atgaatattgatctatcggggaaagttgcattggttaccgcctccaccggcggcattggtttcgccatcgccaaaggtctggcggcaagcggcgcggaagcgatcgtgaatggccgcagcgagcgtagcgtgaatgcggccattgcccgcctgcagagcgaggttcccggcgcgaagacccgaccggcgatagccgatctgagcgacgcagaaggcgtgaatcagctgatacaagcggtaaacggcatcgacatactggtgaataatgcgggtatttacggcccgcaggatttctatgccaccgacgatgcaacctgggaaagatactggcaaaccaacgtgatgtccggggttcgtctttcccgcgcgctgctaccggccatggtacagaaaggctggggtcgggtggtttttatcgcttcggaatcggcacgcaacatcccggcggatatgattcactacggggtcactaaaaccgctcagctatcgctggcccgcgggctggcgaaatatgttgccggcagcggcgtcaccgtgaacagcgtcctgccgggaccgaccctctcggatggctttgccgagatgatgaaagatgaagtcgctaaaaccggcaaatcgctggagcagttggccaaagagtttgtgatggcaaaccgccccagttcggtgattcagcgcgcggccacggtagaagaggtcgccagtatggtggtttacgtctgttcgactcaggcttcggcgacgtcaggcgcggcgctgcgcgtggatggcggcgtagtggatgatatcgtctga

SEQ ID NO: 173567 - DNA, 1194 bp, Klebsiella oxytoca
atgagcgctgaaatgacgttgcccgtcaggcagcaaaaccagaatattgttcgcctggcgacggcgcaggcgctggcaggggcaaactcggtggtgttctacgctaccggggcgattgttggcaacgccatcgcgccctctccaaccctggccacgctgccgattaccatttttgtgctgggcatggcggcctgtattttgccgtttggcgcgctggccagaaggcgcggacgcaaaacggtgtttatggtcgggaccggggccggtatgttgacggggctgctggcggcgacggcggtggtcatgagttcgttctggctattctgcatcgcggcctttttcggcggcgcctatgcggcggtggcggtttcctttcgctttgccgctactgacggcgtcagcggcgaacggcgcgcgcgtgcgctctccctggtgatggggggcggagtggcggcaggggtcatcggtccgatgctggtgaccggcaccatgaatctttggccgccgcacacctttgccatgacctttattgctcaggggctggtggcagcggtatcggcgtgggtattactgggagtaaaaaccgccgaaccggcggcgcaggtgacgtccggcgggcgtccgctgggcgaaattgtgcgccagcccgggttttcccgaacggtatttagcggcgcaatcgcctacatggtaatgaacttcctgatgacagccgcaccgctttccatgcatatgcacggcctgtcgcagcaggcgtcgaatctgggtatccagtggcacgtaatcgccatgtacggccccggatttttcaccggcaaattgatcgctcgtttcggcgcccggcgcattaacgctgccgggttgattctgctggcgctctcggtgatggttggcctggccggtattgatgttatgcactactggctgttgctgatcctgctgggcatcggctggaattttggttttaccggcgcgtcgacgcagattatggatttccaccgaccggaagagaaaaaccaggtgcaatcgctgaacgattttatcgttttcggcgtcatgatgattggctcattttcctcgggcgcgttgatgaacctctttggctggaacgccgtattgtggggatcgctggtgccggttgtggttgcgctggcgctgctgctggtcggcgaaagggcagcgcgcaggcgctaa

SEQ ID NO: 173568 - DNA, 777 bp, Klebsiella oxytoca
atgaacacagcgtttgccggtaaaaaattgttagtggttggcggaaccagcggtatggggctggcaacggccagacgggttgttgaacagggcggtcaggtcgtgctggtgggcaatcgccagcagaaggctgagcaggcccgtcaggcgctggcggctgagggtaacgtggagatcatcgtcgctgacctgatgagcgaagcgggtatggcgcgggttatggagagcatcaacgcgaaacatcaggatatcagcctgctggttaacgccgctggcgttttcttcccgaagccgttcatcgaacatgaaatggccgattacgatcggtatatgaatctcaaccgcgcgaccttttttatcacccgcgacgtggtgcgcaatatgctggccaataatatcaaaggctcaattgtgaatattggatcgatgtgggcgcagcaggcgattggcgcaacgccgtcgtcagcctactcaatggcaaaagcgggtctgcatgcgttgaccaaaaatctggcaattgagctgggcagcagcgggattcgcgtcaatgcggtatctccggcggtagtgcatacaccgatatatgaagcctttctacctgaagatgctgtgaaggatgtgatgagtagcttcgacggcttccatcctattggccgcgtcggtacgcctgacgatatcgcgcaaaccgtagcgtttctgcttagcgatagcacccgctgggtgaccggcgcggtatgggatattgatggcggcgtgatggctggtcgaaatgcctga

SEQ ID NO: 173569 - DNA, 945 bp, Klebsiella oxytoca
atgcgctcgcttaaccgactgaaatggcttcacgcttttgaagccgccgcccgccacggcagctttaccggcgcggcccgagagctgggcgtgacgcctgccgccgtcgggcaactggtcagggcgctggaggattgggttggccatccgctgctgcaccgcacccgcagcggtaaagagcgtctcactctggtgaacgaggcgcaggaggcgctgcaggatattactcaggggctggataagctggaaagcgggctgaataaacttcgcggtcgccgggcgcgttccgtggtagtgatcaccgcctcacaggtgctgatgatgaactggctgatggagcggttaaaccgcttttccgaagcctatgaaaacatcgacctgcgcctcaacgttacggaaaagctgatggatgttgcccacggcgaagcggatttaggcatccgctgcggtcgcggcgactggcccggtgtggataaaacctggctaatggatgaagaagcggtgctggtgtgcagcccgctgatcgttccagcgggcaaatccgcctgcggcgactggctggcacagcaaaagctgatccacgatgatacgccgcacccgggagcccgttttccttcctgggaggaggttctgcaggccgctcaggccccagcggcgcgcgatagcgggctgcatatcaactcaacgtcggcggtcattctggccgcgctcagcgggcgcggcgtcgccattgtccgccgggcgctggtaaaacagcttctcgccaccggtcagctcgttcagctacatccggcctaccgctggcccctcagctggtcctactatatcgtgacgccccggcatgcggccatgcgcccggaagtgaaggtatttcatgactggctgcttcacgatgtgctggcggagagcgggaacgctgattttctgccgctgaccccgccatag

SEQ ID NO: 173570 - DNA, 774 bp, Klebsiella oxytoca
atgaagttgaagtcaggtattgctttcgtcatcgctgctgtcgccttcggcgcccaggcgcgcgacatgaacagcattcaacaaagcggcgaacttaaagtcggcgtaccgggagattacgcgccgctggcgtttcataataaagccggagaactgctgggatacgatgttgatatggcgaaggatctcggcaagcggcttgggctaaaggtaagctttgtgccgaccagctggccaacgctctctgcggacctgaaagcggataagtttgatattgctatgggcggggtgacggaaactgcggcccgggcgaaggaatttgccttaagccagccggtcgtgccgaacggcaaaattgcgctggctaactgcgcggcggcgcccgctctcggcagcttggaaaaaatcgaccagccaaacgtgaaggtggtagtgaacccgggcggcaccaatcaaagctttgtggatgaacatctcaagcaggcgcagattattcgggtgaaaaataacgtggataaccttgaagcgctgcggcagaaaacggcggatatgatggtaaccgacctgatcgaaggcgtgtattaccaaagcaacgaaccaggcgtgttttgcgtggccaatgagcaacccttcccgggcaccgccagcttcaaagtctatatgatgaataaagataacccgcagctgctggaaaaggtaaatcagtggctggatagccaggacaaaaatgtgctcaaacagaagtggcgcatccatgaccaggtcaacccataa

SEQ ID NO: 173571 - DNA, 795 bp, Klebsiella oxytoca
atgaaaatcacctttggggagcttaaacccctgttgcaggcgcagcgaatttttgtcggcgggcagaagctggtctgcgcccacgccttttaccgtgacgatctgccgatcgagataccggaaaatttaaccaccgaggcgtataccacctactgggggcgctgcggcgaacggctggcatcattgggcgcttttagctatacgcgaaccctgctgccggcgctgattaaagtggggcgctacacatcgattgccgaccggttacaggtacttggcgatcggcatcccctggagtgggccagcgccagcccggttttttatgcccatcactccggcgtgatggcgacgctggctgccgatagcggcaggcccaaccagttttatccttttgaaaaaactccccgaccgataaccatcggcaacgatgtctggattggccagaacgtcactctggcgcagggcatcactattggcgatggcgcagttgtcgccgccaacgcgctggtggtcaaagatgtcgcgccttacgccatagtcggcggtaacccggcgaaagttatccgcatgcgctttagcgaggcgattatcgagcagctgctggcgctacggtggtggcgtttttccgcccaggatattgccggctgtccggttaatcaggttgagcgcttttgcgagcagctcgccgggcaagcggccgacggaacgatctcgcgtttttcgccgccggtattgacggcatccatgattaaagattttatgaacgataaacagaatccgctgcgcagcgcaggataa

SEQ ID NO: 173572 - DNA, 1095 bp, Klebsiella oxytoca
ttgcgcatagtatcgtttttattcctgctgatagcgggcatctatagccacagcggctgggcggaaacctgcaaaggggatatcggccagatgaccgttaacgtccagaatatcaagtacctgcccacgctgccgctgaatacgcagatgaccggcgtgatggcggataacggcagcgggattcatttctcctgcgatcttcaggtgccgaaagcggcggcaaagcgtctggtttatcggcagctaaaaacggcctcatcgccgctttccatcggcggtcagcacgtgttcccctcggcgctggagggtatcggatactcactgggcttccagtgcagcggcggcgcggttcgctttattgatggcagccacgcggctgataatgcggaatccgtgacggtgtgtgacagccaggagatggctaacctgctgaaccagcagcagattgtggtgaaagtctttgtgacgttttataagaccggggacgtcgccctggtcagcggtaaccacgctaacgttccggcgcagccgcagattggcgaactgacgatccagcagcaggccgacagccgcgccggttttgtcgccagctcgccggtcacgctcgatatggcggcgctgaacgtcgatatcggcagcagcggcagctgtcaggtttcaaccacgaatattcacgttagcctggggacggtgaataaagcggagttcaagggcaaaagcaccaccggcggcagcgcgaaaagcttctccataccggtcttttgctccacgccaaccgatatccgcatcggcttttttggcgtcacctcaccaggcggcggtacggataccctcgcgttaagcaaagccaacgcctctgcgagcggggtgggcgtcaggctcacgtacggcaataacagcgccccggcgcctgcggcagggaccagcgtcaaaatcaacgaggccagcaatctcccggtgctaaagcgggttaacgccagcagcgccggcagcgcggagaatatcaacttcaacgcccagtacgttcagaccgatgatgcggtgaccgccggcaccgccaatagcatggtgacctttgcgctggagtataactga

SEQ ID NO: 173573 - DNA, 2544 bp, Klebsiella oxytoca
gtgaaaaataacccctctggtatgacttccggttatacggcgatcgctgcgccaaccggcgggatttcattattagcgacggtgccgacggcgcttttcctgctttgtcaaagcggcatcgcgcgggcggatgagtacttcgatccggcggccttagaatttgccaatccgcagcaaaagaccgctgacttacgctattttgcaaaatcaggcggccagcagccggggacttattcagtcagcatttgggtgaataatcaggaaataacccggggcgaggtgacgtttatcgacagcaacggcgcgctgcagccgcagttaaccccggcgcagctggcggaatatggcgtgaacgtcagcgctttttctgcctttcaatcgctgcatgaggggcaagcgttcacccacatcgagcgctacattcctgatgccagtagccgtttcgattttgccgatcagcgcctgatcttaagcattccccaggcggccatgaacgtccagagccgcggatacgtggatccagcgcgctgggacgacggtatcccggcggcgtttgttaactacaacctgaccgggtcgcaaacccggcagtcggatgacaatagccaatccagctatctgaacctacgcagcggggttaaccttggggcctggcgcctgcgcaacgtatcgtcgatggagtacgatcgcacccggcgctggaattcgcagagcacctggctacagcgcgatgtgaaatccctcaaaagcctgctgcgaatgggcgatacctttacgaccggcgacgtttttgacagcgtgcagtttcgcggtattcagctaatgtccgatgatgaaatgctgccggacagccagcgcggcttcgctccaacgatccgcgggatggcgcatagtaatgcgaaggtgacgatatcccagcatggctacgtgatctatgaaacgttcgtctcgccgggggcgtttgcaataaacgatctctatccgacggcgcaaagcggcgacctcgaagtccaggtgaaagagagcgacggttcggtgcgaacctttacgcaacctttttcagccgtaccgtttatgctgcgcgaagggcgggttaaatacaacttgagcgccgggcgcttccgttcagcgcagcgccaggggcagtcgccgacgtttttacagggcacgctgttttatgggctaccggctgaattcacgctctacggcggtagccagctggcgcaggattaccaggcgtgggcgcttggcgtcgggcgcggtttgggcgaactggggtcgatcggaggcgatgcgacgtggacaaacaccacagcgccgtcgggaaagcgctcggcaggtcattcggtgcgcgtgcagtatcagaaggattttgccggcacggggacttcattcagtctcgccagctatcgctactcctccagcggctactatgacttcagcgaagcgaatgcgcttgaaagccgcaacgggctgctcgacaacaagcgcagccgcgaagaaatatcgctttctcaggcctttggcggtatcagcagcctggcgatatccgcctggtcgcaggagtactggcacagtcatagccgcgatgaaacgctgcatctcggattttacagcgcctggcgaggcgtgacgtggggcgtgggttattactacacccaatcatccgatcgacaaaaagccgatcgttcgtggtcctttaatctgagcgttccgcttttcggcccgctatccgagagcgcgatcagctacagcacgacctccgacaatagcggacgtacttcgcagcaggcgtcgctgttcggttcgcttccacatcatcccaatctctactactccctccagcagggctacgttaacggcggccagggcagtaacagcagcgccgcactggattaccacggcggctacggaaccgcgcagctcggctatcgccacgatagcgccagtcagcagcttacctggggcgcatcgggctccgttgtcgcccatcctcatggcgtgacgctcgggcagaccgtcggcgaaagctttgccatcgtgcgtgcgccgggcgctgctgaggtggcgattcagaacggcagcaatgtgcataccgactggcgaggctatgcggtggtgccttcgctgacggcctatcgcaaaaataccattacgcttgataccgaatcgctggccgacgatgccgatgtcgaacttgaaggacagacggtgatccccggcggcggggcggtggtgcaggcgaactaccagacccatatcggcagccgcgtgctgtttaccctcagcgatagtcacgggccgctgccgttcggcgccagcgttcgcttgcggaaagctgaagacgatcctggcggggccccgggcggcatggtggccgatggcgggcaggtctatctgagcggcattccgcaggaagggacgctggatgttgcctggaatgccgacaacatctcacggagatgcgcgctgcatttccatcttaccgataccgtacagcagaggcagagtccggttaaaaccgtctctggcttctgccagtag

SEQ ID NO: 173574 - DNA, 666 bp, Klebsiella oxytoca
atgattatgaaacgaacgatcgccgcgctagccttgttaatattatccactgcggcccacgccggtattgtcatgggaggaacccgggtaatctatcaggaagggaagcgagaggccgcaatatcagttactaatgcagatagccattcgccttatctggtgcaatcgtgggtggaaaattatgcggagaataataagagccgggtgccgtttatcgttacgccgccgttattccggctcgatccagaacagcagaacgtgttgcgtattaatttcattggcgcaacgctgcccgcggatcgggaatcggtattttggctcaatgtaaaaagtattgcgccaacgaaaaaagatgaagtgaataagctacaggtcaatattaaatcaaaatttaagatcttctatcgcccgaatggcctgacgggtgacccagccgatgcatggcgcaagctgacatttaaaattgacggctcacggctggtagcacaaaacccgacgccctattttgtttcattttttaccctttcggtgggcggcaaggagattactgaacccggcatgattggaccctttagccagcaagagtggccgattcatcgcaccggcattattaagtggcgcgccattaatgatttcggcgggatgacggatttcgcgcaacagtaa

SEQ ID NO: 173575 - DNA, 597 bp, Klebsiella oxytoca
atgaaaaagcaatttcgtattatggcaatgtttgtcggtgctctggtgtctggcagcgcattatccacgccttcacagccggccagttcggcaatgaccgtgaatcccggctcgaatgcgggcacgcaaggaacgggcggtcaggtggaatttaccggctccattaccgactcctcctgtaatgttgatagcaccagcgcgaatcaaagcgtcgatctgggaaaatgggcgagcagctattttaccggcacgggtacagaaaccaccaaaacctcctttcatatcaaagtcaaagattgtccttccaccgtcaccaccgtctcggtgctgtttgacggtacccgcgatagcaacaatagcgatctactggcgattcacggtaccgcaaaaggggtagcgattaagctgtatgaagatgacaaatcgacgccggttgagcttggcgacgtttctcgcggccatagcgttaccgccggtgccagcggcaccactaccggaaccgccgatctcgaattctttgctgactatgtctcgaccagtgcggttaccgcgggttctgccaacggtacagctaacttcaatatggtttacaactaa

SEQ ID NO: 173576 - DNA, 1521 bp, Klebsiella oxytoca
atgcgttatgcacatcctggcacgccgggcgctttggtttcactgaagtctgcttacggtaactttattgatggtaaatttgtcgagccgattggcggcgaattctttatgaacacctccccggtcgacggtagcaacattggtcagtttccacgatcggatgccaaagatatcgacttcgccctggatgcggcgcatcgggccgccgacgcctggggcaaaacgtcggctcagcagcgcgccaatctgctgctgcaggttgccgaccgtattgaggccaacctcgagtatctggcggtggcggagagctgggataacggcaaaccgatccgcgaaacgctcaacgccgacctgccgctggcggtcgatcacttccgctacttcgccggctgcctgcgcgcgcaggaagggagcacggcggagattgatgaaacgacggtggcttaccatttccatgagcctcttggcgtggtcggacaaattatcccgtggaactttccgctgttaatggccgcctggaaactggcgccggcgctggcggcaggtaactgcgtggtactaaaaccggcggagcagacgccgctcagcatcacgctgctgctggagattattggcgatctgttcccggcgggcgtccttaacgtggttcagggttttggcaaagaggcgggcgaagcgctggccaccagtaaacgcattgccaaaatcgcctttaccggctcgacgccggttggccgccatattatggcctgcgcggcggaaaacattatcccttgcaccgttgagctgggcggtaaatcgccgaacatctactttgccgacgtgatggagggggaagaagagtatatcgagaaggcggtggaaggcctggtgctgggcttctttaaccaaggggaggtttgtacctgcccgtcccgcgcgctgattcaggagtctatttacgaaccctttatggcgcgggtcatggacaaagtggcgcaaattcaccgcggcgacccctttgacaccggtacgatgatcggcgcgcaggcgtcacgtcagcagttcgataaaatactctcgtatatcaagatcgctcgcgatgaaggcggtaccatcctgaccggcggcgaacgcgccagcatctctgccgaactggataacggctactatattcagccgacgctgattcagggacgcaacgatatgcgcagcttccaggaagagattttcggcccggtgattggcgtgaccacctttaaggatgaagctgaggcgctgtctatcgctaatcagacccagttcggccttggggctggggtgtggacgagggataccaatcttgcctatcgcatggggcgcggcattaaagccggccgggtgtggaccaactgttatcacatctatcctgcgcacgccgcattcggcggttacaaacagtccggcgtagggcgtgaaacgcataagatggccctcaacgcctaccagcagacgaaaaacctgctggtcagctacggtaccgcgccgctgggcctgttctga

SEQ ID NO: 173577 - DNA, 1776 bp, Klebsiella oxytoca
gtgccaggaaatccatttgccctgacgccagagatcaaagcgagcccgctgctgagcgactcctggtgccgcagccagcgctatggcatcgaccccgctactgacgacttccctcgcctgcacgccagcgagctggccgacaggctcgccagccatagtcgtctgcaaaagctggcccagccggtggttaatgccttgtccagcaaggtcaacgatctgcaatcggtggtgatcctctctgacgccagcggactggttttgcaaacctttggtgagacgcaggccatgcagaaagcgcagcgcttcgctttagccccgggcaacctgtggagcgaaagcggacgcggaaccaacgccatcggcaccgcgctggcgatagacgacagctgcgaaattgatggccgtcagcatttcctcaccagcaaccagggcctgtattgcgccgccgtaccgctgcaaaatcccgaggggaaaatagccggggtgctggatatctccggcccggcccactatccgcacgcccggacgctggcgtgggtaaaaggcgccgcgaagcaaatagaatatctatgggtgaaacagagtctgcacccgcagcagtggctgatgagcctgcatccccgggcggaaaaactcgacagcgtagacgaacggctgctggtctttaccgataacgtgctgacggcggctaaccggctggcgatgcgcgaattcgacctcgacgccgcccggtttggtcatctcactttccagcagcttttttcgcagctgcggcaaaccgccgttagtatcccgctgccggtcgccgtcggagggcacaactactattaccgtctgcgtgctcccgcgaccgccagcgtggcgacgaccgcgcgcccggcactcgatctgccgttctccagcccgcatgaatcagaaaagctgctgcgtctgcttaatgccgggattggcttatgtatcgaaggagagaccggctgcggcaaagagtacgtcagccgcacgctgcaccggcacagccgctggagcagcggcaaattcgtcgccatcaactgcgccgctattccggaatcgctaattgaatcagaactgtttggctaccagcccggcgcgtttaccggggcaaacaaaaacggctatatcggcaaaatccgcgaggccgatggcggcattctttttcttgatgaaattggcgatatgccgttagcgctacaaacccggctgctgcgggtcttgcaggagaaagaggtcacgccgctaggcgccagccggagctcgccggtgaacttcgcggtcatttgcgcgacccatcgcaacctggcgcagcgggtggccgaaggcgtcttccgcgaagacctgctctaccgcctgcgtgagtttgccctgacgctgccgccgctgcgcaagtggcctgaactgcctgcgtttattcagcggctgtggcgcgagcagggcggagagaaacgtcgcatcacgctggccccggaggttatacaacggctggcggctcagccctggccaggcaatgtgcgccagctgcaaagcctgatgagagtattgctggcgcttgccgaagatggcgaaacgctgggggtcgatgatttgcctcatgagtaccgaaccccgaccgccgcgccgggtgggctacagcagcacgatgcgcagctgattgccgacaccctggcaagctataacggcaatatcagtaaggccgcgcaggctttaggcgtcgcacgcagtacgctctatcgccgcgccgcccgccgcggaggccagtga

SEQ ID NO: 173578 - DNA, 300 bp, Klebsiella oxytoca
atgaatacaccagaacagctacaggccagcgcgggcgaagccgccgcgctgctgaaagccatgagccatcccagcaggcttttgattctgtgcatgctgtgcgattcgccgggcaccagcgccggcgagctggcgcggatcaccggattaagcccctccgccacatctcaacatctggcgcgaatgcgcgatgaagggctgatcggctgcgagcgtcaggcgcagcggatccactacttcattacccggccagcggtgcagcaaatcgtcaccgcgctaaagtcaatttactgtccttaa

SEQ ID NO: 173579 - DNA, 522 bp, Klebsiella oxytoca
atgactatcgctacactttctcccgccgaagcccgggcgctcatcgacagaggcgcccggctggtcgatatccgcgatgccgatgaatacgcccgtgagcatattcccggcgcacaactcgtcccactggaaaccttgaacaaaggcgcagcgctgcacgccagccccgaggagacgattgtttttcactgtcaggcaggttcgcgcactcagaataacgccgcccgtctggccgcctccgccgcgccggcgcaggccaggctgctggctggtggaatacaggcctggaaagcggcaggtctgccggtggaagaggataaatcacagccgctaccgctgatgcgtcaggttcaaatcgccgcaggcgtcctgattttgcttggcgtcgctttaggttatacggttaacagcggcttttttttgcttagcgcattcgtcggcgccggactcgccttcgccggtatcaccggcttttgcggcatggcgcggcttttggcgctgatgccctggaatcgtcgttga

SEQ ID NO: 173580 - DNA, 180 bp, Klebsiella oxytoca
atgtttacagtcggtgacctggtacagccgcgcgcaggcggaccaaaactcaaagtcgttgaagtccagggcgacagcattattgccgttcaggccggtaacgagcagggggagaaatatacgctgaaagcaaccgaggtaacggcttataaagaagacggcgattttggcgtgtgctga

SEQ ID NO: 173581 - DNA, 402 bp, Klebsiella oxytoca
atgtcattactattagagaaactgaataatattcgttcactccgcgccatgtctcgtgaattctccattgacgtgcttgaagatatgctggcaaagctaaggaccgtcactgaagaaaaacgcgctgaagagcaggctgctcaggcacagcaggcggaatatcaggaaaaaataaacacctggctggaattaatgaccgctgacggtatcaccccagaggaattagtgggccacgcgaccgcgacttcaaaaggcggcaaaaagcgccagccgcgtccggctaaatatcgttttaccgatcataccggcgccgagaaaacctggaccgggcagggacgtatgccgaagccgctcgctaaagccgtcgctgagggtaaatcccttgagagcttcctgatctaa

SEQ ID NO: 173582 - DNA, 450 bp, Klebsiella oxytoca
atgttctctgcgcagtcccgcttgcgtcatgcggtagcagacacctttgcgatggtggtttactgcaccgttgtgaacatgatgatcgaaatctttctctccggaatgagcttcgagcagtcgttatcttcaagactggtggcgattccggtgaacattattattgccgtcccctacggtttttatcgcgattttgcgatgcgccaggcgcgccgcgtcagcacatcaggctggatgaagaacattgcggatgtggtggcctatgtgactttccagtcgccggtctacgtggcgattttgctggttgtcggcgctgactggcatcagattgccgcggcggtaagttcaaatatcgtggtgtcgatgatgatgggcgcagcgtacggctacttcctcgactactgccgacgccttttccgcgtcagtccctaccagcaggccaaagcctga

SEQ ID NO: 173583 - DNA, 351 bp, Klebsiella oxytoca
atgtatttaagacccgatgaggtggcgcgagttcttgaaaaagccggcttcaccatggatgttgtgacgcaaaaagcctatggctatcgccgtggcgataattatgtttacgtgaaccgtgaagctcgtatggggcgtaccgcgttaattattcatccggctttaaaagaacgcagcactacgcttgcggagcccgcgtcggatatcaaaacctgcgatcattacgagcagtttccgctgtatttagcgggagacgctcagcagcattatggtattccacacgggttcagttcgcgcatggcgcttgagcgttttctgagtggcctgtttggcgaagcgcaatacagctga

SEQ ID NO: 173584 - DNA, 327 bp, Klebsiella oxytoca
atggccaaccgagcaaaccgcaacaacgtagaagagagcgctgaagatatccataacgatgtcagccaattagcggatacgctggaagaggtgctgaaatcatggggcagcgacgccaaagacgaagcggatgccgcgcgtaaaaaagcgcaggcgctgctaaaagagacccgcgcgcgccttaacggcaacaaccgcgttcagcaggcggcatgcgacgccatgggctgcgctgacagctacgtgcgcgacaaaccgtggcaaagcgttggcgctgcagcagccgttggggtatttattggcgtattgttgaatttacgtcgataa

SEQ ID NO: 173585 - DNA, 1362 bp, Klebsiella oxytoca
atggatgccaaaaaaatcccgcattaccagcgtatcgcccgacagctcaagcaggcaattgagcgcggcgagctggcgccgggcagcaggctgccggcgagtcgggtctatgctcaggagcttggcgtatcgcgagcaacgattgaaaacgcctggggagagctggtagcgcagggctggctggagcggcgcgggcaggcgggaacctttgtcagcgatcgcctcagcccacagcaaagcgtgcctgaacgctctgttaccggcgatgaaccgacggcgccgctgccgcttcagcttgggctgcccgcgctggatctgtttccacgcggtctgtggacgcggatcatggggcgccggctgcgtacgcaaacgcgtttcgatctcgcgcccggcgatccctgcggggacccgatgcttcggcaggcgatcgtcgattatttgcgcctgtcgcgcagtatagagtgtcgtcctgagcaggtgctggtgacgggtagctacgcggcgtcgatgagcctcattctgcgaacgctgacccggccgggccagcaaatgtggatggaggatccgggatttccgcttatccggccgatcgtgagcggcgaaggggtggcgatctgcccggttccggttgacgaagacggaatggatattggctgggcgcagcggaattacccaaacgcgaattttgcgctgctgacgccggctcatcaaagcccgctcggcgttgcgctctcattgacccggcgcagacagttactgctatgggcggcgcagaataacgcgtggattatcgaagatgattacgatagcgaattccgctatcgcggcaagccgctgccgccgttaaaaagcctcgacgccccgcagcgcgtcatctacgccggtgcgttcagtaaaacgtttttcccggcattacgcgcagcgtggctggtggtgccggaaccgctggtggcgcagtttcgccaacaggcggcgctgatgagctgtagcgtgccgacgttgtggcagcagacgctggctgattttatccgcgaaggccatttctggcgccatctgaagaaaatgcgcgccagctatgctcagcgtcgtcagtggcttgaatcggcgctgcgggagcacggtatcgcggtggttccgcaagcgggcggcattcagatggtcgtcagggtaagcggcgacgatcgtcaactggccctgcgcggcagacaggccggtctggccatccaggcgttaagcgactggcgaatggatagccggggagaaggggcgctgctgatgagcttcaccaatttaacctcagcggagatggcgggcgaggtggtacgaaagctgactcgggctctcgcttctcaggacaaataa

SEQ ID NO: 173586 - DNA, 432 bp, Klebsiella oxytoca
atgaacacactacgtcagccgtacaatgaactgagcccggaagtctataacgctctggttaaggccaagattacgctggaaaaaagcgagctggacggcgcgctgatagaactggtgtatttgcgggtatcgcaaatcaacggctgcgccttctgcctggagatgcacagcaaagccctgcgtcaatccggcgtggcgcaaaacaaactggacgccctggcaggctggcgggtgagcgcccatttcagcgatgcggaacgcgcggcgctggcgtgggctgaatcggtcacccatatcgccgaaagccatgcggaagacgctgtttatctaccgctcctcgatcattttaacgcccggcagattagcgatctgactttcgccatcagcctgatgaacgcctttaaccgcctggcggtaagcatgcgtctgtaa

SEQ ID NO: 173587 - DNA, 246 bp, Klebsiella oxytoca
atgcgcattactatttacactaaaaatgactgcgtgcaatgccatgccacgaaacgggccatggaaacccgcgggtttgagttcgacatggtcaatattgaccatcatcctgaagccgtcgatatgctgcgcgagcaaggcttccgccagctaccggtggtgattgccggagagacccgctggtccggcttccgtcccgatatgattaaccgcctgcgtccaacagcctcagcggccagcctatga

SEQ ID NO: 173588 - DNA, 411 bp, Klebsiella oxytoca
atgagcctgatcgtctacttctccagcagttccgaaaacacgcatcggttcgtccagcgtctggggctgcccgccgtgcgtataccgcttaacgaacgcgagcgcattcaggtagacgaaccctacattcttatcgtccccagctatggcggcggcggcacggcgggcgcagtaccccgccaggcgatccgttttctcaacgatccgcataaccgccagctcattcgcggcgtcatcgctgcgggtaaccgcaatttcggcgaggcctacggtcgggcgggtgacgtcatcaagcagaaatgcggcgtaccgtacctctatcgctttgagctgatgggcaccccgcaagatgtcgacaacgtgcgtaaaggagtaagcgaattttggcaacgacaaccgcagaacgtataa

SEQ ID NO: 173589 - DNA, 2145 bp, Klebsiella oxytoca
ttggcaacgacaaccgcagaacgtataaccaccgaggcgccggatttccatgccctcaacgcgatgctgaacctctacgacagcaatggtcgcatcccgtttgacaaagatcgccaggcagtggcggcgtttatggccaaccacgttgagccgaataccgtgcccttcgccagccaggacgacaagctgacgtggctggtcgccgaaggctattacgatgccagggtcctggcgcgctacgatcgccagtttattcttgagctgtttacctatgctcaaaacggcggttttcgcttccagacctttctcggcgcatggaagttttataccagctacgcgctgaaaacctttgatggtaagcgctaccttgaaggctttgccgaccgcacctgcatggtggccctgagcctggcgcagggtaacgaggcgctggcccaccagctaaccgatgagatcctctccgggcgtttccagcccgctacgccgacgttcctcaacgccggtaaacagcagcgcggcgaactggtctcctgtttcctgctgcgtatcgaagataatatggaatcgattggccgggcggtgaattcggcgctacagctatcgaaacgcggcggcggcgtggcgtttctgctctctaatcttcgcgaagccggggcgccgatcaagcgtatcgaaaatcagtcctccggcgtcgtaccggtgatgaaaatgctcgaagatgccttctcctatgccaaccagctcggcgcgcgtcagggggccggcgcggtctatctgcatgcccatcatcccgatatcctgcgtttcctcgataccaaacgcgagaatgccgatgaaaaaatccgcataaaaacgctctcgctcggggtcgtcattccggatattacctttcagctagcgaaggaagacgcgcagatggcgctgttctcgccctacgacgtcgaacgtctgtacggtaaaccgttcggcgatatcgcggtaagcgaaatgtatgcgcaactggtggccgacgagcgggtatgcaagcgctggatccgcgcccgcgatctgttccagcggctggcggaaattcaatttgaatccggctacccgtacatcatgtttgaagacacggttaaccgcgcgaacccaattgccgggcgcatcaatatgagcaacctgtgttcggagatcctgcaggtcaacgcgccttccacctttgatgaaaacctggattacgccagcatcggccaggatatctcctgcaacctcggctcgctgaatatcgcccacaccatggactctcccgactttgcccgcacggtcgaagttgccgtgcgcggtctgacggcggtgtccgatatgagcgatatccgttcggtgccgtcggtcgcggcgggtaatgccgcttcacacgccatcggcctcggacagatgaatctgcacggctatctggcgcgcgagggcatcgcctacggtagcgaggaagggctggatttcaccaatttctatttctataccattacctggcacgcgctgcgcacttcaatgctgatagcacgtgaaagagggacccgttttgccggattcgagcagtcgcggtacgccagcggcgactatttccggccctacctggaagtcgactggcagccgaaaacggcaaaagtccgcgcgctgtttgcccgctccgcgattaccctgcccgaccgcgatatgtggcggcagctgcgcgatgacgtgatgcgctacggcatctataaccgcaacctacaggcggtgccgcccaccggatctatttcgtacatcaaccacgcgacctccagcatccatccgatcgtgtcgaagatagagatccgcaaggaggggaaaaccggacgcgtctattatccggcgccgtttatgaccaacgacaacctggcgctgtatcaggatgcttacgaaatcggcccgcagaagatcatcgacacctacgccgaggcgacgcgtcatgtcgatcaggggctgtcgctgactctgttcttccccgataccgcgaccacgcgcgatatcaataaagcgcaaatttacgcgtggaagaaaggcatcaaaacgctctattacatccgtctgcgccagctggcgctggaaggtaccgaaatcgaaggctgcgtgtcctgcgcgctgtaa

SEQ ID NO: 173590 - DNA, 963 bp, Klebsiella oxytoca
atgacccatttatcgcgcgtcagcgccatcaactggaacaaaattgaagacgataaggatctggaggtctggaatcggctgaccagcaacttctggctaccggagaaggtgccgctgtctaacgatatccccgcctggcaaacgctttccccggcggagcagcagctgacaattcgcgtcttcaccggcctgacgctgcttgataccatccagaataccgttggcgccccggcgctgatggccgacgccctcaccccgcacgaggaggcggtactgtcgaacgtcagctttatggaggcggtacacgctcgctcctacagctccattttctctactctctgccagactaaagacgtcgatgccgcttacgcctggagcgaacaaaacgcgccgctgcagcgtaaagcgcagctgatgctggagtactaccaggctgatgaaccgctgaagaaaaaaatcgccagcgtttttctcgaatcattccttttctattccggcttctggctgccgatgtacttctccagccgggggaagatgaccaacaccgccgatctgattcgcctgatcatccgcgatgaagcggtacacggttattacattggctacaaattccagaaagggctggaaatagtcagcgcccagaagcgtgaagagatgaaaaacttcgccctcgatctgctgatggatctgtatgacaacgagctggcctatacccgcgagctgtatggcgatagcggctgggttgaagaggttaacgccttcctgtgctataacgccaacaaggcgctgatgaatctcggctacgaggcgctgttcccggcggaaatggctgccgtcaacccggcgatcctcgctgcgctttcgccgaatgccgacgaaaaccacgacttcttctccggctcgggttcgtcgtatgtcatgggaaaagcggaagaaaccgtcgatagcgattgggacttttag

SEQ ID NO: 173591 - DNA, 1203 bp, Klebsiella oxytoca
atggcaattaaattagaaatcaagaatctctataagatatttggcgagcacccgcagcgggctttcaaatatatcgaaaaaggactatcgaaagaacaaatactggaaaagacggggttgtcgcttggcgtaaagaacgccagtctgaccattgaagaaggcgagatattcgtcatcatggggctctccggatcggggaaatcgaccatggttcgccttctcaatcgcctgattgaacccacccgcggccaggttctgatcgacggtgtcgatatcgctaaaatctctgaggccgagcttcgcgaagtgcgcaggaaaaagattgcaatggtttttcaatcatttgcccttatgccgcacatgaccgtactggataatgccgctttcggcatggagctggccggcgtgccgactcaggaacgccaggagaaagcgctggaggcgctgcgtcaggtaggtctggaaaactacgctcacgcctggccggacgagctctccggcggcatgcgtcagcgcgttggtctcgcccgcgcgctggcgatcaaccccgatattctgttaatggatgaagccttctcggcgctcgatcccttaattcgtacggaaatgcaggatgagctaactaaattacaggccagacatcagcgcaccgtggtatttatttcccacgaccttgatgaagccatgcgaattggcgatcgcattgccattatgcaaaatggtgaagtggttcaggtcggtacgccggatgaaatactcaataatcctgccaatgattatgttcgaaccttcttccgcggcgtcgatattagccaggtattcagtgccaaagatattgcccgccgtagtccggttggcctgattcgtaaaacgccaggtttcggcccgcgttccgcgctgaaattactgcaggatgaagaccgcgaatatggctacgtcattgaacgcgggaataagtttgttggcattgtttccatcgattccctgaaagccgcgctgagcgagggtcagggaattgatgcggcgttaatcgactccccacaggcggtggatgcgcaaacgccgctcagcgagctgctctctcacgttggccatgcaccgtgcgcggtgccggttgtcgatgaagggcaccagtacatcggcatcatttcaaaacgcatgctgctgcaggctttagatcgcgagggggcaaacaatggctga

SEQ ID NO: 173592 - DNA, 1065 bp, Klebsiella oxytoca
atggctgatcaatctaacccgtgggacaccgcaccggcggcggatagcgccgcgcaatccgccgatgcgtggggtacttctacgccagcaccggccgatggcggcggtgccgactggctaagcagcgcgcctgcgccgcagccggaacacttcaatataatggacccgttccataaaacgctgattccgctcgatagctgggtcacgcacggcatcgactgggtagtgatgcatttccgtccgattttccaggggatccgcgtaccggtggattacatcctgagcgccttccagcagctgctgctgggcatgccggcgccggtggcgattattattttctcgctgattgcctggcagatttccagcatcggcatgggcgcggcgacgctgatttcgctgatcgccatcggcgctatcggcgcctggtcgcaggcgatggtaaccctggcgctggtgctgaccgcgctgctgttttgtatgctgatcggcctgccgcttgggatatggctggcgcggagcccgcgggcggcgaagattatccgtccgctgttggatgcgatgcaaaccaccccggcgttcgtttatctcgtgcccatcgtcatgctgttcggtatcggtaacgttccgggcgtggtagtgaccattatcttcgccctaccgccgattgttcgtctgactattctggggattaaccaggtgccggcggatctgattgaagcttcgcgctccttcggcgccagcccgcgtcagatgctgtttaaggttcagctgccgctggccatgccgaccattatggccggggttaaccagacgctaatgctggccctgtcgatggtggtgattgcctcaatgattgccgttggcggtctcggccagatggtactacgcggcatcggtcgccttgatatgggtctggccaccgttggcggcgtcgggattgttatcctcgccattattcttgaccgcctgactcaggccgtaggacgggactcgcgcagccgcggcaaccgccgctggtacgcaaccggccctctggggctgattactcgccctttctgtaaataa

SEQ ID NO: 173593 - DNA, 996 bp, Klebsiella oxytoca
atgcgacatacagcgatccttgccacagcgtttaccgccctcatttccaccaccgccttcgcggcggatctgcctggtaaaggcattaccgtaaaaccagcacagagcacaatttcggaagagaccttccagaccctgctggtcagccgcgcgctggaaaagctcggttataccgtcgataagccgagcgaagttgactataacgtcgcctacacctcgatcgccgcaggtgataccacctacatcgccaccaactggcagccgctgcatgacgatatgtacgcagccgccggcggtgataaaaaattctaccgcgaaggcgtgtttgtgaatggggcggcgcagggctacctgattgataagaaaacggccgagcagtaccacatcaaatctatcgaccagctaaaagatccgaaaatcgccaaactttttgacaccaacggcgacggcaaagccgatctgaccggctgtacgccaggctggggctgtgaagcggtcatcaaccatcagcttgatgcctacggcctgagcaatacggtagtgcataatcagggcaattatgcggcgatgatggccgataccatcgcccgctataaggagggcaaaccggtgatctactacacctggacgccttactgggtcagcgacgtgctgaagccgggtaaagatgtcgtctggctgcaggtgccgttctcttccctgccgggcgaacagaaagatattgataccaaactgccaaacggcatgaactatggcttcccggtgaacacaatgcatattgtcgccaacaaagcctgggccgagaaaaacccggcggcggcgaaactgttcagcatcatgaagctgccgattgccgatatcaacgccgaaaatgccatgatgcacgcgggacatggttctgaggcagatatccagggccacgtcgatggctggatcaaagcccaccagcagcagtttgacggctgggtggaagaagcgctggccgcgcagaaatag

SEQ ID NO: 173594 - DNA, 747 bp, Klebsiella oxytoca
atggaaaaccctgacgcattgatgcacactccccccgctgacgaggcgacgctggctgaaggcattaaggacagcctgccgatcgtcatcagctatattcccgtcgccttcgccttcggtctcaacgccactaagcttggctttactccgctggaaagcctgttcttctcctgcattatttacgccggcgccagccagttcgtgatcaccgccatgctggccgcaggaagctcgctatgggtcgccgcgctcaccgtcatggcgatggacgttcgccatgtgctgtatggcccgtccctgcgcagccgcattcagcgcgcgatgagcaagaaaaaaaccgcgctctgggcattcggcctgaccgatgaagtttttgccgctgccaccgctaagctggtccgcgacaatcgacgctggagcgataactggatgatcggcatcgcttttatgtcctgggcgtcatgggtcttcggcacgctgatcggcgcttattcgggcagcggcctgctgactaactttccggcagtggaagcggcgctgggctttatgctgccggcgctgtttatgagctttttactcgcctcattccagcgcaagcagtcgctgagcgttaccgccgcgctggcaggcgcgctggctggcatgattctgttttccatacccgcggcgatccttgccgggattgtctgcggctgcctgactgctctggtgcaggccagcattcaggggatgcccgatgaacagtga

SEQ ID NO: 173595 - DNA, 336 bp, Klebsiella oxytoca
atgaacagtgatgtcttcattctcggcgtcgtggtcggctgcgtgaactatctctttcgctatctgccgctgcgcctgcgcgccggaaacgcgcgtccgactcgccgcggcccggtcagcgtcctgctcgataccatcggcatcgcctccatttgcgcgctgctggttgtctccagcgtgccggaaatcctccatgacgcccgccgcctgctgcccacattagcaggcttcgccgcgttgggcctggcgttttggaaaacacgcagcataattacgcctacgcttttgagcgcgctaacctacggtgttgtctggaaaatcagcgtatggctataa

SEQ ID NO: 173596 - DNA, 531 bp, Klebsiella oxytoca
atggatagttcgtttactcccattgagcaaatgctcaagttccgcgccagccgtcatgaagacttcccttttcaggaaattctgcttactcgtctttgcatgcatatgcagggaaaactgctggaaaaccgtaacaagatgctgaaagcgcaagggattaacgagacattgtttatggcgctgatcacgcttgagtctcaggaaaaccacagcattcagccttccgagctgagctgcgcgctgggctcttcgcgaaccaacgccacgcgcattgccgacgagctggaaaaacgcggctggatcgagcgccgcgaaagcgataacgatcgtcgctgcctgcatctacagcttaccgaaaaagggcatcagttcctgcgcgaagtcttaccgccgcagcacaactgcctgcatcagctctggtcctctttaagcaccagcgaaaaggatcagcttgagcatatcacccgtaagctgcttggtcgccttgaccaaatggaagaggatggcgtgcttgcggagtctctgcgctaa

SEQ ID NO: 173597 - DNA, 1173 bp, Klebsiella oxytoca
atgagcgcaaatgcggagagccaaaccccgcagcaaccgggcagcaaaaaagggaagcgtaaaggcgccctcctgctgctgaccttgctctttattattgttgccgtggcatacgggatttattggtttttggtactgcgtcactacgaagagaccgacgacgcgtacgtggcagggaatcaggtacagattatggcccaggtgtccggcagcgtgacgaaagtctgggccgacaacaccgactacgtgcaaaaaggcgatccgctggtcaccctcgaccagaccgatgcccagcaggcgtttgaaaaagcgcaaacccagctggccgccagcgtacgtcaaacgcgccagcagatgatcaacagcaagcagctgcaggccagcatcgaagtgaaaaaaaccgcgctttcccaggcgcaaaccgaccttaaccgtcgtattccgctgggcgcggccaacctgattggccgcgaagagctgcagcatgcgcgcgacacggttgccagcgcgcaggccgaactggacgtggcgattcagcaatacaacgccaaccaggcgatcgttctgggcacgaagctggaacaacagcctgcggtcctgcaagcggccaccgaagtgcgtaacgcctggctggccctgcagcggacgaagatcgtcagcccaattagcggctacgtttctcgccgttccgttcagcccggcgcgcaaatcaccaccactaccccgctgatggccgtcgttccggcgaccaacctgtggattgacgccaacttcaaagaaacgcagctggcgcacatgcgtattggtcagcctgccaccgtgatcagcgacatttatggtgatgatgtgaaatacaccggtaaagtcgtcggtctcgatatggggaccgggagcgccttctcgctgctgcctgcgcagaacgctaccggcaactggatcaaagtggttcagcgcctgccggtacgtatcgagctggatgaaaaacagctggcagagcacccgctgcgcatcggcctttcgacgctggttgaagtgaacaccaccgaccgcggcggcgagatgctggcaagccaggtacgtagcgctccggtttacgaaagcaatgcccgtgaaatcggccttgagccggtcaataagctgataaacgacatcatccaggccaacgccggataa

SEQ ID NO: 173598 - DNA, 1539 bp, Klebsiella oxytoca
atgcaacagcaaaaaccgctggaaggcgcgcagctggtcattatgaccattgcgctgtcgctcgcgacctttatgcaggtgctggactccaccatcgccaacgtggccatccccaccatcgccggtaaccttggctcatcgttgagccaggggacctgggttatcacctcgtttggggtggcgaacgctatctccattccgattaccggctggctggcaaagcgcgttggcgaagtgaagctattcctctggtcgacggtggcgttcgctatcgcctcctgggcctgcggcgtctccaacagcctgacgatgctgattttctttcgcgtgatacaggggatcgtcgccggtccgctgattccgctgtcgcaaagtctgctgctcagcaactacccgcccgccaagcggtcaatcgcgctggcgctgtggtcaatgacggtgatcgtcgcgccgatttgcggcccgattctcggcggctatatcagcgacaactaccactggggctggatcttcttcatcaacgtgccgattggcatcgccgtggtggtgatgacgctgcaaacgctgcgcaaccgggaaacccgcaccgaacagcggcggatcgacggcgtgggcctggcgctgctgattatcggtatcggtagcctgcaggtaatgctcgaccggggtaaagagctggactggttcgcctccaacgagatcatcatcctgacgattgtcgcggtggtggcgataagtttcctgatcgtctgggagctaaccgacgacaaccccatcgtcgatctgtcgctcttcaagtcgcgaaactttaccatcggctgcctgtgcatcagcctcgcctatatgctctacttcggcgctatcgtgctgttgccgcagctattgcaggaggtgtacggctataccgctacctgggccggtctggcttcggcgccggtcggggtgatcccggttatcctgtcgccgattatcggccgctttgcgcataagctggatatgcgtcggctggtcacatttagctttatcatgtacgcggtctgtttctactggcgcgcatggaccttcgaaccgggaatggactttggcgcctcggcgtggccgcagtttatccagggcttcgcggtggcctgcttctttatgccgttgaccaccatcaccctgtccggcctgccgccggaaaggctggcggcggcgtcgagcctgtcgaacttcacgcgtacgctggcggggtctatcggcacctcgattaccaccaccatgtggacgaaccgcgaggcgctgcaccatgcgcagcttaccgagtcggtgacgccatacaatcccaacgcccagcagatgtacgaccagctgcagggattaggaatgacgcaacagcaggcatccggctggatagcgcagcagattaccaaccaggggctgattatctccgccaacgaaattttctggttctcggcggcggtgtttatccttctgctcgggctggtatggtttgccagaccgccgtttagcgccgggggcggcggcggcggcgcgcattaa

SEQ ID NO: 173599 - DNA, 1677 bp, Klebsiella oxytoca
atgctgactcaacccggtgaaaaataccgcccctatccgccgatcgccctgcctgaccgccgctggccagagcagcaaataacccgcgcccctcgctggctctctaccgatctgcgcgacggcaaccaggcgctggccgagccgatggatagcgcgcgcaagctgcagttctgggatttactgctggagtgtggttttaaagagattgaggtcgcctttccctccgcctcacaaaccgacttcaactttgtacgtcaactgattgaagagcagcgcattccgcaggatgtgacgattcaggtactgacccaggcgcgggaggatttgatcctgcgtacgtttgccgctctgcgcgatgcccaccgcgctaccgtacacctctataacgccaccgcgccgctgtttcgcgagctggtttttggaatggacaaagcgcaggtgatcgacctggcgacccgcgcgacccggcttatccgtcagcagtgcgagcagcagccgctgacccgctggcaatacgagtactctccggaaaccttttgcttcaccgagccggaattcgcgctggagatttgcgaggcggtggcggaaatatggcagccctgcgccgaacggccgatgattatcaatctgcccgcgacggtagaggtgagcacgcccaacgtatatgccgatcaaattgagcatttttgccgtcacttttcgcgccgcgccgatgtatgcatcagcgtccatccgcataacgatcggggtaccggcgttgccagcgcggagctggcggtgatggcaggcgccgaccgcgtcgaaggctgcctgttcggcaacggcgagcgcaccggtaacgtctgcctggtgacgctggcgatgaatctctacagccagggcgtcaatccccggctcaaattctccgggatgaagcgggtggtcgaaatcgtcgaaagctgcaatcagatcccggttcatccgcgccatccctgggcgggcagtctggcctacaccgccttttccggctcgcatcaggatgccattaaaaagggattcgatgcccgccggcccggcgaacgctgggaaatgccctatctgcctatcgatccgcaggatatcggctgcagctacgaggcggtgatccgcgttaacagccagtccggcaaaagcgggagcgcatggctgattgaacagaatcatggcctcaagcttccgcgtgcgctgcagcaggattttagcctgcacgtccagcacgaaaccgacgctcacgggaaagagatgacccagaatgcgctatggcagctgtttcgcgcgcgctacggactgctcccccagccgccgcttgcgctgctggattaccaaagcgatagccagcaggacggccagctttctctgcaggctaccctgcgcatcgccggtgaaacgcgacgactgcagagccgcggcaacggcctgctgtccgccgccgccgccgggctgagcgtcctgttaaggcaaaactccgtgattaaagattatcatgagcacaccctgggtgaacgcagcgacagccgttcagtggcctatattcgctgcgtcttcccgaatggcgagagccgttggggggtcggaattgataacgacgtggcgcgcgcctcgctgcaggcgctgtgcaacgcgatgagcgaaaaccatcactccggcgagcggaagtaa

SEQ ID NO: 173600 - DNA, 768 bp, Klebsiella oxytoca
atgtcgacaactttaaccctcaacttccagcatcgttcactggtgccctttgcccatgattatgcccatggcgatagcgaaccctggcatcagcacgattgcgctcagctgttacatatcctcagcggcgtagtacgggtggaaaccgcgcagggttattgggttgtgccgccggggcgaggcgtctggcttcccgccggtacgccgcatacgctacggattaccggcgcggcggctgcgcgaaccctgtttatcgatccccttgcccgcgccgatctcccttcaacctgccagatagtacagatcactccgctgctgcgtgaactgattgtcgcgtcgctgacgctggcggaatcttacgcgccgggcagccgcgatgaacgaatctacgaactgatcctcgatgagattcgcggtatggcggtgctgccgtttggcctgccggagccgcaaagcgaagcgctgcgccgtttatgccagaaggtacgagaagcgccaggagagccgtggggcagcgccgcggcggcgaaagagagcagcatgagcgagcgcacgctgaatcgccattttcagcagcagaccacgctcacctggagcgagtgggtgcgccgggcgaagctgatggaagcgctggttcgcctggcgcaggggcattcggtactgcgggtggcgctggatctcggctacggcagccacagcgcttttagcgccatgtttcgccgggtgttaggcgtgacccccagcgattacttccgctcgccggagtga

SEQ ID NO: 173601 - DNA, 516 bp, Klebsiella oxytoca
atgccgttgttagatagtttcacagtcgaccatacccgaatggaagcgcctgcggtgcgcgtggcgaagaaaatgaacacgcctcacggcgatgaaatcaccgttttcgatctgcgattctgcgtaccaaaccaggaagtgatgccggaaagaggtattcacacccttgagcacctgtttgccggctttatgcgcgatcacctgaacggcaatggtgtggaaattatcgacatctctccgatgggctgccgtaccgggttctatatgagcctgatcggtacgccggacgagcagcgcgtcgcggatgcctggaaagcggcgatggccgacgtgctgaaggtgaaagatcagaaccagatcccggagctgaacgtttaccagtgcggaacctacaccatgcactcgctggaagaagcccaggaaatcgctcgccatatcattgagcgtgatgtccgcgtcaacagcaacgacgagctggcgctgccgaaagaaaaactgcaagagctgcacatctag

SEQ ID NO: 173602 - DNA, 1557 bp, Klebsiella oxytoca
ttgatcccggacgtatcacaggcgctggcctggctggaaaaaaatccgcaggcgctgcagggtattcaacgcggtctagagcgcgaaacgctgcgcgtcaacgctgatggcacgctggccactaccggccatccggaagcactgggttcagcgctgactcataaatggattaccaccgattttgccgaagctttgctggagtttattacgccggttgatggcgatattcagcatatgctcaccttcatgcgcgatgttcatcgctataccgcgcgccatattggcgacgagcggatgtggccgctgagcatgccgtgctatatcgcgcccggccaggatattgagctggcgcagtacggcagctcaaatatcggccgtctgaaaacgctgtatcgcgaaggattgaagaatcgctacggcgcgcttatgcaaacgatctccggcgtgcactataacttctctctgccgatggctttctggcaggccaggtgcggcgtcgaggatgctgaaagcgggaaagaggccatttctgccggctatttccgatctattcgcaactactatcgttttgggtgggtcatcccgtacctgttcggcgcttccccggctatttgttcgtcgttcctgcaagggaagccgaccacgctgccgtttgagaaagccagcaacggcatgtactacctgccttatgcgacctcattgcgcctgagcgatctcggctataccaataagtcgcaaagcaatctcggaattacgtttaacgatctgcatgagtatgtggcaggattgaagcgggcgattaaaacgccatccgaagagtatgagaatatcgggctggagaaagacggcaagcgtctgcaaattaacagcaacgtgctgcagatcgaaaacgagctgtacgcgccgattcggccgaaacgcgtgacccgcagcggtgaaacgccttccgacgcgctgctgcgcggcggcattgaatatatcgaagtccgctccctggatatcaacccgttctcaccgattggcgttgacgaacagcaggtacgtttcctcgatctgtttatggtctggtgcgtgctggccgatgcgccggaaatgagcagcgacgagctgctgtgcacgcgcactaactggaatcgggtgattctggaaggccgcaagccgggcctgacgttgggtattggctgcgaaaccgcccagtacccgctggctcaggtcggcaaagatctgttccgcgatttacgccgcgtggcgcaaacgctggatagcatccacggatgccaggcttatcagcaggcctgcgatgagctggtcgcctgctttgacaacccggaattaaccttctcggcgcgcgttctgcgttctatgcttgaagaggggattggcggtaccggcagagagctggccgatcggtatcggacgatgctgcgcgaagagccgctggaaattttaagcgaagcggattttgctgccgaacgcgaagcgtcggtacagcgtcagaagaaggtggaagcggcggacagcgagtcgtttgaagcgctactggcgaggcatgcgtag

SEQ ID NO: 173603 - DNA, 429 bp, Klebsiella oxytoca
gtgagcgactcgctgtcgctgatatcgctgtttgccagtagctttctaagcgcaacgctgcttcccggcaactcggaagtggtgttgatcgccatgctgctggcgggggttagccagccgtggttactggttttaatagcaataatcggtaatagccttggaggggtaactaacgttattctggggcgcctgtttccgctgcgcaagacatcgcgctggcaggagaaggcgaccggctggctgaggcgctacggcgcggtcacgctattattaagctgggcgcctgttataggcgatttgctgtgtttactggcgggatggatgcgcatttcctggggaccagtgctcttttttttatgccttggcaaagcattacgctatatcgtcgttgcggcgataacgcttcagggcatgacgtggtggcactaa

SEQ ID NO: 173604 - DNA, 567 bp, Klebsiella oxytoca
atgtacgaacgttatgcaggactgatttttgatatggatggcacgatcctcgataccgagccgacgcatcgtaaggcatgggacgaggttctgggacgttacggcatgcgtttcgatatgcaggccatggtcgcgcttaacggatctccaacctggcggattgctcaggccattattgaattaaatcaggctgatttagatcctcatcttctggcgcaggaaaaaactgccgctgtgaaagcgatgctgcttgatagcgtccgtcctttaccgcttattgaggtggtcaaagagtggcacggtcgtcgtccgatgtcagtcggtaccggcagcgagagcgccgttgctgaagcgctgctggctcatctgggtctgcgtcactacttctcggcggtggttgccgccgatcatgtcgccaaccataaacccgcacctgatactttcttactttgcgcagagcgcatgggcgttgcggcggagaagtgcgtggtctttgaagatgcggacttcgggctgcaggcggcgaagcgcgccggaatggatgtcgtggacgtgcgattgctgtga

SEQ ID NO: 173605 - DNA, 315 bp, Klebsiella oxytoca
atgaaatggttcaaagcaataactgcgttttgcgcgacgctgctggtggccgtatcgctggcgggctgtgccggttcgtccacaaaggagagtaccggtggttacattgacgataccgtcattacgactaaagtaaaaaccgcgctcttcaatgacaaagagataaagtcttcagaaattagcgtccagacctttaaaggtcgcgtacagctcagcggctttgtctcatccgcagacagcgctaaacgtgcggtcgaagtcacgagaaaagtgcagggcgttcgcgtggttgagaacgatttaagaatcaaataa

SEQ ID NO: 173606 - DNA, 186 bp, Klebsiella oxytoca
atgctgattctgactcgtcgagttggtgagaccctcatgattggagatgaggtcactgtgacagttttaggggtgaagggtaaccaggttcgtattggcgtaaatgcccctaaagaagtctctgtgcatcgtgaagagatctaccagcgtatccaggctgaaaaatcccagcagtccagttactaa

SEQ ID NO: 173607 - DNA, 2628 bp, Klebsiella oxytoca
atgagcaagagcaccgctgagatccgtcaggcgtttctcgactttttccatagtaaaggacatcaggtagttgcgagcagctccctggtgccgcataacgacccgaccctgctgtttaccaacgccgggatgaaccagttcaaggatgttttccttggtctcgacaaacgtaattattcgcgcgcaaccaccgcgcagcgttgcgttcgtgcgggtggtaagcacaacgatctggaaaacgtcggttacaccgcgcgtcaccacaccttctttgaaatgctgggtaacttcagcttcggcgactacttcaaacaggacgctatcaaatacgcatgggaactgctgaccggtgagaactggttcgccctgccgaaagaaaaactgtgggtgaccgtctacgaaaccgatgacgaggcgttcgacatctgggcaaatgaagttggcgtaccgcgcgagcgtattattcgcatcggcgacaataaaggcgcgccttttgcttccgataacttctggcagatgggcgacaccgggccgtgcggtccatgcaccgaaatcttcttcgaccatggcgaccatatctggggcggccctccgggaacgccggaagaagacggcgatcgctatattgagatctggaatatcgtctttatgcagttcaaccgtcaggctgacgggacaatggagccgctgcctaagccgtccgtggataccggtatgggcctcgaacgtattgccgccgtactgcagcacgttaactccaactacgatatcgatctgttccgcgatctgattaagagcgtggctgacgtcaccggcgcgaccgacctctctaacaagtccctgcgcgttatcgctgaccacattcgttcctgcgctttcctgattgctgatggcgttatcccgtcgaatgaaaaccgcggctacgtgctgcgccgcatcattcgtcgcgcaatccgtcatggcaacatgctgggtgcgaaggagaccttcttctggaaactggtcgccccgctgattgacgtgatgggctccgccggcgaagagctgaaacagcagcaggctcaggttgagcaggtgctgaaaaccgaagaagagcagtttgcccgtactctcgagcgcggattggcgctgctggatgaagaactggctaaactacagggcgacacgctggacggcgaaaccgctttccgcctgtacgatacctacggtttcccggttgacctgaccgccgacgtttgccgcgaacgcaacatcaaggttgacgaagccggctttgaagccgcaatggaagagcagcgccgtcgcgcgcgcgaatccagcggttttggcgcggactacaacgcgatgatccgcgttgacggcgcctctgagtttaaaggctatgacagcctggaactgaacggcaaagtgactgccctgtttatcgatggtaaagcggtagatgcggtgaacgccggtcaggaagccgtagtgatcctcgaccagacgccgttctacgctgaatccggcggccaggtgggggataaaggcgagctgaagggcgccggtttctccttccaggtcagcgatacacagaaatacggtcaggcaattggtcatattggtaaactgaatggcggttcgctgaaggtcggcgacgccgtacaggcagatgtggatcaggctcgccgccagcgtatccgcctgaaccactccgcgacgcacctgatgcacgcggcgctgcgtcaggttctcggtacgcacgttgcgcagaaaggctccctggtcaacgacaaagcgctgcgcttcgacttctcgcattttgaggcgatgaagccggaggagatccgcgcggttgaagatctggtgaacgcgcaaatccgtcgcaacctgccaatcgaaaccaatatcatggatattgacgctgctcgtgaatcaggcgcaatggcgctgtttggcgagaagtatgacgatcgcgttcgcgtgctgcgaatgggcgatttttccaccgagctgtgcggcggaactcacgcctcgcgtaccggtgatatcggcctgttccgcatcacctctgagtctggcaccgccgcaggcgtgcgccgtatcgaagcggtcaccggcgaaggcgcgatggcgctactgcatgcgcaaagcgatctgctgggcgatattgcgcagctgctgaaaggggatacccacagcctcggcgagaaggtacgcgccgcgctggagcgtagccgtcagctggaaaaagagctgcagcagctgaaagagcaggctgccgcgcaggagagcgcaaacctctccagcaaagccgaagagattaacggcgttaagctgctggtcagcgagctggccggcgttgagccgaaaatgctgcgtactatggttgacgatctgaaaaatcagctgggttcaacggttgttgtgttagctacggtcgcagaaggtaaggtttctctgattgcgggtgtgtctaaggatgtgacagaccgcgtgaaagcaggggaactggttggtatggtcgcccagcaggtgggcggtaaagggggcggtcgtccggatatggcgcaggccggcggtaccgatgcgtctgctctccctgctgcgttggccagtgtgaaaggctgggtaagcgcaaaactgtaa

SEQ ID NO: 173608 - DNA, 501 bp, Klebsiella oxytoca
gtgactgaaacttcatcccgccgctctgactatgcccgtctgctggatcgcgcgattcgcattctggcaatgcgcgaccatagcgaacaggagctcaggcgcaaactggctgcgccggtgatgagcaagaacggccctgaagcgctaaacgtaacgccggaagaggtcgataacgttgtcgaatggtgtattgagaaccgctatctggacgacgatcgctttgtcagccagtttattgccagccgcagccgcaagggatacggcccggcgcgcgtccgccaggagctaaagcagaaggggatttcccgcgagacgatagagtcagccatgcgtgactgcgaaatcgactgggcacagcttgctaaagagcaggcgcagagaaaatatggcgaacccttgcccaccgtatttgcagaaaaagtcaaaattcagcgctttttgctctaccgcggctatctgatggaagatatccaggaaatctggcgaaattttgcagattga

SEQ ID NO: 173609 - DNA, 1059 bp, Klebsiella oxytoca
atggctatcgacgaaaacaaacagaaagcgttggcggcagcactgggccagatcgaaaaacaattcggtaaaggctccatcatgcgcctgggtgaagaccgctccatggatgtggaaacaatctccaccggctcgctttccctggatatcgccctgggcgcaggcggcctgccgatgggccgtatcgtcgagatttacgggcctgaatcttccggtaaaaccacgctgacgctgcaggttatcgccgccgcgcagcgtgaaggtaaaacctgtgcgtttatcgatgcggaacacgcgctggatccggtttatgctcgcaagctgggcgtcgatatcgacaacctgctgtgctcccagccggacaccggcgagcaggctctggaaatctgtgacgcgctggcgcgttccggtgcggtagacgttatcgtcgtcgactccgttgcggcgctgacgccgaaagcggaaatcgaaggtgaaatcggcgactctcacatgggcctcgcggcgcgtatgatgagccaggcgatgcgtaaactggcgggtaacctgaagcagtccaacacgctgctgatctttatcaaccagattcgtatgaaaattggcgtcatgttcggtaacccggaaaccactaccggtggtaacgcgctgaaattctacgcctccgtgcgtctggatatccgccgtatcggtgcggtgaaagagggtgacaacgttgtcggcagcgaaacccgcgttaaagtggtgaaaaacaaaattgccgcgccgtttaaacaggccgaattccagattctctacggcgaaggtatcaacttcttcggtgagctggtcgatctcggcgtgaaagagaagctgattgagaaagcgggcgcctggtacagctacaacggcgataaaattggtcagggtaaagcgaacgcgatctcctggctgaaagagaacccggctgcagcaaaagagatcgagaagaaagttcgtgaactgctgctgagcaatcaggactctacgccggacttcgcggttgatggcaacagcgaagcagaaaccgaacaagatttctga

SEQ ID NO: 173610 - DNA, 480 bp, Klebsiella oxytoca
atgcagctgagcgagcaggtggggcaggcgctgaaagcgcgcggcgcgacggtgaccacggcggagtcctgcaccggcggctgggtcgccaaaaccctgaccgatattgccggcagctcggcgtggtttgagcgcggttttgtgacttacagtaatgaagccaagtcgcagatgattggcgtcagcgaagcgacgctgcttgaccatggcgcggtgagcgaaccggtggtcgtggagatggcgattggcgccctgcgcgcggctcgcgcggactacgcgatttcggtcagcggcatcgccgggccggatggcggcagcgcggaaaagccggtgggcaccgtctggtttggcgtggcgagcgccagcggacagggcgtaacccagcgcgaatgctttgccggagaccgggaggcggtgcgccgccaggccacggcctatgcgctaaatctcctctggcaacaatttctacaaaatacttga

SEQ ID NO: 173611 - DNA, 234 bp, Klebsiella oxytoca
atggccaaagccccctttaccgcagagcagagtctgcaaaaaatccgtcaggtgcgcctttgcctgttcttatgcggcttattttcactgttcaccgcgcttctgcatattttcacccgctccttcaatcccctgtgtgaaggcgtgcagctcttattgggcgtcggctgcgtgatctatggatttactttaagcaaaagaatcaagcagatactcaccgggcagcccggataa

SEQ ID NO: 173612 - DNA, 882 bp, Klebsiella oxytoca
atgaagcaacgtaccgggatatggctggcgctggcgctggggctcgcatcgcacggggtgatggcgaaaacgctgaatgtcgtgagtagtttttccgttttaggcgatatggtgcagcagattggcggcgaacacgtgcatgtcaacacgctggtggggccggatggcgatccgcatacctttgagccttcgccgaaagatagcgcgctgctgagtaaagcggatgtcgtggtggtcaacggtctggggctggaaggctggctggaccgcttaattaaggcatccggtttcaaaggtgagctggtggtagcttcccgcggagtcaaaactcacacgcttgaagaagatggcgcaacggtaaccgatccgcatgcgtggaacagcgccgccaacggcgccctgtatgcgcagaatatccttaacggcctggtaaaagcggacccggatgataaggctgcgctggagatttccggtcagcgctatatcagccagctcaacgatatcgatcgctgggcaaaaagccagttcagcgccattgcgctggagaaacgcaaagtgctcaccagccatgacgctttcggctattttggccgcgcctatggtgtgaccttcctcgcgccgcagggattatcttcggagagtgaagccagcgcggcgcaggtagcggctttaattcaacaaattaaagccgacggcgtgcatacctggtttatggaaaaccagctcgacccaaggctggtcaagcagatcgccagcgcaacgggcgcgcagccgggcggtgaactctatcctgaagcgctctctaaacccggcggcgtggcggacagttatgtgaaaatgctgcgtcacaacgtcgagctgattgcggccagtatgcgatag

SEQ ID NO: 173613 - DNA, 864 bp, Klebsiella oxytoca
atgatctggcacacctttattcaaccctttatcgagtttggctttatgcgccgcgcgctggtggtgtgcctggcgctctccctgagcactacgatgctcggcgttttcttacttttacgtcgcatgagcctgatgggcgatgcgctctcgcatgcgattttgcccggcgtggcggcgggctacctgcttaacgggatgtcgctgctggcgatgaccgtcggtggttttattgccggcattgcggtggcgctggtggcgggatgggtcagccgacgcacgcctttaaaagaggatgccagcttcgccgggttttatctcggctccctggcgctgggcgttacgctggtctcgctgcgcggttctaacgtcgacctgctgcatctgctgtttggctcgattctggcggtagaccgcgattcggcgctgtttgtctccgccgttgccagcctgaccctgatttgcatcgcgttgttttatcgcggcctggtcagtgaagccttcgatagcgtctggcttcaggtgaactcgcgaagattgccggcgctgctccacggcctgtttctcgccctgctggtgctcaacctggtggccgggtttcaggttctcggcacgctgatggcggtaggcgtcatgatgctgcctgccgtcgcggcgcgctgctgggcgcgaacgctgccgggcattctgctgctggcggcgtcgatcggcagtttttgcgcgtggatggggctgagcctgtcgtgggcggcgaatttgcctgccggacccgcgatcgtgctgaccgccagcggcatcttttttgtatcggtattttttggcacgcgcagccggctggttgtcggctggcgtaaattaatggggtaa

SEQ ID NO: 173614 - DNA, 678 bp, Klebsiella oxytoca
atgattaagctcgaccacctggtggctggctatgaagggctggcgatcacaccgtcccttagcggcacgattgcaacggggagtatgacggcgattgtcggccttaatggctgtgggaagtcgacgctgctcaagacgctggccggctttattccaccggttagcggccgtctgaactggtgcggtgaacgacccgttatcggctggctggcgcagcgtcatgccctggagtcgcagtttccgttgacggtgcaggatgtggtcagccagggggcctggccccgggtatcgctgttgcgcgggcttaggggagaggggcgtcagcgtatcgtcgcatccttagagcgggtgggactgttaacgatggcgaaaacgccgattgaggcgctctccggcggccagtttcagcgcatgctcttcgcaagggtcatggtgcaacgcgcgccgctggtaatgcttgacgaaccgtttaccggcatcgacgaagctacctgtcgtgagctgatggcgctgatcctcgaaatgcaccagcagggacagacgattctggcggtgctgcacgataaccaacgggtcgccgactatttcccggaaacgctgctgctaacgtcgcagcacgcccgctggggctgtacgcctgatgtactgcccgcctttcactccgcgaggctggcatga

SEQ ID NO: 173615 - DNA, 1077 bp, Klebsiella oxytoca
atgttgaagcgtcgttatctggctttactccctctttgcgttcttctcgctgcctgcagcagcaaacctcaaacccccgcggaaaaggaaatggcgggcggcacgggcggttttttacttgagccgcagcataacgtgttgcagatgagcggtgatttcgcgaataacccggcggcggagcagttcatcgacaagatggtgagcaagcacggctttgaccgacagcagctgcatgagatcctctcgcaggctaaacgtctggactatgttctgcgtctgatggaccgccaggcgccgaccgggctgccgccgtcagggccaaacggcgcctggctgcgctataaaaaacagtttattaccccggataacgtgcagaacggcgtggcgttctggaaccagtatcaggatgcgctcaaccgcgcgtaccaggtttacggcgtgccgccggaaattatcgtcgggattattggcgttgagacccgctggggcagagtgatgggtaagacccgtatcctcgatgcgctggcgacgctgtcgtttaactatccgcgccgcgccgagtacttttccggcgagctggaaacgttcctgctgatggcgcgcagcgaacaggatgacccgctcgatctgaaaggctccttcgccggggcaatgggctatggtcagtttatgccctcttcttataagcagtatgccgtggactttaacggcgacgggcatatcaatctgtgggatccggtcgatgccatcggcagcgtggcgaattacttcaagcagcacggttgggtgagcggcgatctggtcgcggtacaggcgctgggccaggcgcctggcctgaacaatgggtttaaaactaaatacagcgtctcgcagctggcggcggcaggattaaccccgacccagccgctgggtaaccatcagcaggcgagcctgctgcgtctggatgtcggtaccggctatcagtactggtacggcctgccgaacttctacactatcacccgctataaccacagcacccattacgcgatggccgtctggcagctgggcctggcggtttctcaggcccggatgcagtaa

SEQ ID NO: 173616 - DNA, 564 bp, Klebsiella oxytoca
atgattgaagtcgttacccacggcgccgagtggtttatcggcctgtttcagaagggaggcgaggtattcaccggaatggtcaccgggatcctgcctttgctgatcagcctgctggtgatcatgaatgcgctgatcaactttatcggtcagcagcggatcgaaaagctggcgcagcgctgcgccggtaatccgatctcccgctacctgctgctgccctgcatcggcaccttcgttttctgtaacccgatgaccctgagccttgggcgctttatgcccgagaaatacaaaccgagctactacgcggcggcctcctacagctgccactcaatgaacggcctgtttccgcatatcaaccccggcgaactgttcgtctatctggggatcgccaacgggctgaccaccctcggcctgccgttagggccactggcggtgagctatttgctggtgggtctggtgacgaacttcttccgcggctgggtaaccgatctgaccacgtcgatttttgagaaaaaaatggccatccagcttgagcagaaagtccacctgtcaggagcgacatcatga

SEQ ID NO: 173617 - DNA, 978 bp, Klebsiella oxytoca
atgacccgtattcgcattgaaaaaggcaccggcggctggggcggaccgctcgaactggacgccgttgccggtaaaaaaattgtctatatcaccgcgggcacccgtccggcgatcgtcgataaaattgcccacctcaccggctggcaggcggtcgatggtttcaaagagggcgagccgccggaagcggaaatcggcgtggcgattatcgactgcggcggcaccctgcgctgcggtatctacccgaagcgccgcatcccgaccattaatattcacgcgaccggcaaatcgggtccgctggcgcagtatatcgtcgaagatatttacgtttccggcgtcaaagaagagaacattttcgccctggaagatggcccttccccggccccgcaggccgcgccagcccagccggcgatccgcgactatgacaccagcaagaaaatcaccgagcagagcgacggcctgctggccaaagtcggcatggggatgggttccgtcgtggcggtgctgttccaggccgggcgcgacaccatcgatacggtgttgaaaaccattctgccgtttatggccttcgtcgcggcgctgatcggcatcatcatggcctccggcatcggcgattgggtagcccatggcctggcgccgctcgccagccatccgctgggcctcgtcaccctggcgctgatctgctctttcccgctgctgtcgccgtttctcggccccggcgcggtcatcgcccaggttatcggcgtgctgattggcgtgcagattggcctcggcaatattccgccgcatctcgccctgcccgcgctgttcgccatcaacgcccaggccgcctgcgactttatcccggttggcctgtcgctggcggaagctcgccaggacacggtgcgcgttggcgtaccgtcggttctggtgagccgcttcctgaccggcgcgccaacggtgctcatcgcctggttcgtttccggatttatttatcaataa

SEQ ID NO: 173618 - DNA, 363 bp, Klebsiella oxytoca
atgaccgtgatttaccagaccaccattacccatatcggcgccagcgcgacgatggcgctggaggagcagatgctgatcaccttccgcgaaggcgccccggccgatatcgaagagtactgctttattcacaatcacggcgagttgtccggcaagctggtgccgggcgcggagctacagcttggcgagctgcgctacccagtcaccgccgtcggcgatgtcgccgagcagaacctgtgcgagctgggccatatcacgctgcgctttgatggtcaccgcgaagcggaattccccgggaccgtacacgtggctggcccggtgccggaaggcatcaccaccggctgcgtactgaaatttgttgcttaa

SEQ ID NO: 173619 - DNA, 780 bp, Klebsiella oxytoca
atgaatcaggttgctgttgtcatcggtgggggacaaaccttaggagagtttttgtgccgcgggcttgccgcagaaggctatcgcgtggcggtagtcgatattcagagcgataaagcgacccgcgtcgcccaggccatcaacgcggagtatggcgaaggcacggcgtggggcttcggcgcggacgccaccagcgaagccagcgtggtcgcccttgctcgcggagtggatgaaatattttcccgcgtcgatctgctggtctatagcgccgggatcgctaaagcggcctttattagcgacttcgcgctgggggatttcgaccgttctctgcaggtgaatctggtgggctacttcctctgcgcccgcgagttttcccgcctgatgatccgcgacggcattaaaggtcgcatcatccagattaactctaaatccggcaaagtgggcagcaaacataactccggctatagcgcggcgaagttcggcggcgtgggtctgacgcagtcgctggcgctggacctcgcggagtacggtattaccgtacactccctgatgctcggcaacctgctgaagtcgccgatgttccagtcgctgctgccgcagtacgccaccaagctggggatccccgaagagcaggtcgagcagtattacatcgataaagtcccgctaaagcgcggctgcgattaccaggacgtacttaacgtgctgatgttttacgccagcccgcaggcttcatactgtaccgggcagtccatcaacgtcaccggcgggcaggtgatgttttaa

SEQ ID NO: 173620 - DNA, 360 bp, Klebsiella oxytoca
atggttaccgcacttatcaccgtcgccgccatcgcctggataacccagctcgcctttggcggctggcaaatcaggcagttcaatcgcgcgttcgatcggctgtgccagcagggacgcgtcggcgtcggccgttcctcggggcggttcaagccgcgcgccgtcgtcgccatcgccgtcgacgaaaacgaccgcatttgcgatacgctgctaatgaaaggcctcaccgtcttcgccaggccgcaaaaaatccccgtcctgaccggtaaacatcttgaggaattgcagcctgatgtgatctttcccaatgatccgctttgtcagaatgcactatcattagcgcttaatccgaaacatggataa

SEQ ID NO: 173621 - DNA, 774 bp, Klebsiella oxytoca
atgaaaccacgtcagcgccaggcagccattctcgagcacctgcaatcgcagggcaaatgctcggtcgaagagctggcgcaacacttcgacaccaccggtaccaccatccgtaaggatctggtgatccttgagaatgccggtaccgttatccgtacttacggcggcgtggtgttaaataaagacgaggccgatccgcccatcgaccacaaaacgctgattaacacccataaaaaagagcggattgccgaagccgccgtcagcttcattcacgatggcgactcgatcattcttgacgccggcagtacggtgctgcaaatggtaccgatgctcagccgcttcaataacattaccgtgatgaccaacagcctgcatatcgtcaacgccctctctgaactggataacgaacaaaccatcctgatgccgggcggcacgtttcgcaaaaaatcggcctcctttcacggccagttggcggaaaacgccttcgaacacttcagcttcgatcgactgtttatgggcaccgacggcattgatttaatcgccggcgtcaccacctttaatgaggtttatacggtcagcaaagcgatgtgcaatgccgcccgcgaagttatcctgatggccgactcgtcgaagtttggccgcaaaagtcccaatatcgtctgcggcctggagagcgtggacaaactgattaccgatgccgatatcagcccggaatttaagcgggcgctggaagacaaaggcatcgaagtcattattactggagaacatcatgagtaa

SEQ ID NO: 173622 - DNA, 966 bp, Klebsiella oxytoca
atgagtaactttctgttagaagccggacgccagaccctgatgctggagcttcaggaggcgagccgcctgcctgaacgcctgggcgacgacttcatccgcgcagcggaaaccatcatccactgcgagggcaaactggtcgtctccggtatcggtaaatcgggtcatattggtaaaaagctggccgccaccttcgccagcaccggcaccccggcattttttgttcacccggcggaagcgctgcacggcgacctcggaatgctcgacagccgcgacgtgatgctgtttatctcttactccggcagcgccaaagagctggatcttatcgttccgcgcctggaagaaaaatccattccgctgctggcgatgaccggtaaatccacttcaccgctggcgctggcggccaaagcggtgctcgatatcgccgtagagcgcgaagcctgcccgatgcacctcgctcccacctccagcaccgtcaataccctgatgctcggcgacgcgctggccatggcggtcatgcaggcccgcggctttaacgaagaagatttcgcccgttcgcacccggcgggcgcgctgggcgcgcggctgctgaacaaagtccatcatctgatgcgccgcgatggcgacgtgccgcgcgtcgctaacgacaccagcgtcatggacgcgatgctcgaactcagccgcaccggcctggggctggtggcggtttgcgatgaacgcaatcacgtgcagggcgtctttaccgatggcgacctgcgccgctggctggtgggcggcggcagcttacaggatatcgtcagccaggcaatgacccgcaacggcgtcactctgcaagcggaaagccgcgcgatagaagccaaggagcgcctgatgaagcacaaaatcagcgccgctccggtagtggatgaaaacggccagctggtcggcgcgattaacctgcagaacttttatcaggccgggatcctttaa

SEQ ID NO: 173623 - DNA, 1545 bp, Klebsiella oxytoca
atgagtttctccgtcgaggccctggcgaaaatcgccattgatttacaaagcgatctcggccatgccgaccgtttctcgcgtttgattaccaccctgcggcagatactcggctgcgatgcctcggcgctgctgcgctatgaggcgcaccagtttgtgccgttggcgattgatggcctggcccaggacgtgcttggccggcgctttgcccttgaaggccacccgcggctggaggcgattgcccgggcgggggacgtggtgcggttcccggcggacagcgatttgccggacccttacgatgggctgatccccggtcaggagagcctgaaggtgcacgcctgcgtcggcctgccgctgtttgccggacaaactctgatcggcgcgctcaccctcgacgggatggatgcggaccgttttgacagctttagcgacgaggagctgcgcctgatagccgctctggtcgccggggcgctcaataacgcgctgctgatcgccaggctggagaatcaaaacgtgctgccggaacaggctatcgcgtatccggtatccgaacgtcaggagatcattggcctgtcggcgccgatgctgcagttgaagaaggagatcgacatcgtcgcggcctctgacttaaacgtgctgattagcggcgagaccggcaccggcaaagagctggtggcgaaagcggtgcatcaggggtcgccgagggcggccaatccgctggtctatctcaactgcgcggccctgccggagagcgtggcggagagcgaactgtttggccacgtcaaaggggcatttaccggggcgatcagcaaccgcagcggtaagtttgaaatggcagataacggaacgctatttctcgatgaaattggcgagctttcgctggcgctccaggccaagctgctacgggtactgcagtatggcgatattcagcgcgtcggcgacgaccgcagcctgcgggtcgatgtgcgggtgctggcggccactaaccgcgatctgcgtcaggaggtcgtggaggggcgttttcgcgccgatttgtatcatcggctgagcgtgtttccgctgtcggttccggcgctgcgcgagcgggacaatgacgtggtgctgctggccggttatttttgcgaacagtgtcgtgtgcgcatggggctggcgcaggtgattttaagcgaggcgacgcgcggcaggctgcttgcgtggtcatggccgggcaacgtgcgcgagctggagcacgcgattcatcgggcggtggtgctggcgcgggcgacgcaggcgggtaatgaagtggtgctggagccgcagcatttccagtttgccgaggaaacgccggccttgccgaccgttaccccgcagccgtcggtgggagcagtaagcctgcgcgaggcgacagaggcgtttcagcgcgaagcgatcgccagagcgctggcggataaccgtcgaaactgggccgcagccgcccgcgcgctggagctcgacgtcgccaacctgcaccggctggcgaaacgtctggggcttaaaggatcccggcctgataaaagttctgcaggttaa

SEQ ID NO: 173624 - DNA, 1446 bp, Klebsiella oxytoca
atgtctattctggttaaaaataacattcattgggttggccaacgcgactgggaagtgcgtgatttccacgggactgaatacaaaacgctgcgcggcagcagctacaacagctatcttatccgggaagaaaaaaatgtgctgatcgataccgtcgatcataaattcagccgtgaattcgtgcaaaatctgcgcggcgaaatcgatctcgccgatatcgattacatcattatcaaccacgcggaagaggaccatgccggcgcgctcaccgaactgatgacgcaaattccggacacgccgatttactgcaccgccaacgccatcgactccatcaccggacaccatcatcacccggagtggaatttcaacgtggtgaaaaccggcgacagcctggatatcggcaacggcaagcagctgattttcgtcgaaaccccgatgctgcactggccggatagcatgatgacctacatgaccggcgacgcggtgctgttcagcaacgacgccttcggccagcactactgcgatgaacatctgtttaatgatgaagttgaccaggttgagctttatgagcagtgccagcgctactacgccaacattctgaccccgttcagccgtctggtgacgccgaaaattaccgaaatcctcggctttaacctgccggtagatatgattgccacctcccacggcgtggtctggcgcgataatccgacgcagattgtcgaaaaatatctcgagtgggcggcggattatcaggaagaccgcatcacgattttctacgacaccatgtccaacaatacccgcatgatggccgatgcgatcgctcagggcattaccgacgtggatccgcgcgtggcggtgaaaatcttcaacgtcgcccgcagcgataaaaacgacattctgaccaacgtgttccgctcgaaaggcgtgctggtcggcacctcaaccatgaataacgtgatgatgccgaaaatcgccgggctggtggaggagatgaccggcctgcgttttcgcaataagcacgccagcgccttcggttcccacggctggagcggcggcgcggttgatcgcctgtccacgcgtttacaggatgcgggctttgaaatgtccctgagcctgaaggccaaatggcgtccggatctcgacgcgctggagctgtgccgtgaacacggtcgcgaaatcgcccgccagtgggccctctccccgctgccggcgagccaggccaaacacgccgcgactgaggtaacgccctgcgcagcgccagcggcagccgatctcggcccgaaaatgcagtgcagcgtttgccagtggatttacgaccccgaacagggcgaaccgaaccaggacgtccagccgggtacgccgtggagcgaagtcccggataacttcctctgtcctgagtgttcactgggtaaagatgtgtttgatgttctggcatcggaggcaaaatga

SEQ ID NO: 173625 - DNA, 1134 bp, Klebsiella oxytoca
atgagtgatggcatcgtcatcatcggctcgggcttcgcggcccgtcagctggtgaaaaatattcgcaagcaggacccgaatatcccgctgaccctgatcgccgccgacagcatggatgagtacaacaaaccggatctcagccatgtggtcagccgcggccagaacgccgacgacctgaccctgcaaacggcgggtgagtttgccgggcagtacaatctgcgcctgtttccgcatacctgggtcagcgatatcgacgctgataatcagcgggtgaagagccaggaccgcgaatggcgctatgacaaactggtactggccaccggcgcgacgccgtttatcccaccggtgccgggccgcgagctgatgctgacgctgaatagccagcgagaatacggcgcggcgcaaagccaactgcgcgatgcaaaaagggtgctgatcgttggcggcggtctgattggctgcgagctggcgatggatttctgccgcgccggcaaagcggtgacggtcgtggataactccgccagcgtgctgtcggcgctgatgccgccggaagccagcagtcgactgcagcatcgtctgaccgacatgggcgtgcatctgatgctgaagactcagttggaaagcctggagcagagcactggcgggattcgcgtcaccctcgaccgccagcgtacggtgatggtggatgcggtagtggcggccgccggtttgcgcccggaaacggcgctggcgcggcatgcggggttgaaaactcaccgtggcgtggtggtgaacagccagctgcaaaccagccatccggcgatttacgccctcggcgattgcgcggaaatcaacggcatggtcctgccttttctgcagccgattctgctaagcgccatgtgtctgggtaaaaacctgttggcccggcagggcgagctcaagctgccgccgatgctggtgaaggtcaaaacgccggatttaccgctgcatctggcgggcgatacccggcgtgaggatctgacgtggaatatcgttgccgccaaagatggcctggtcgcgaaaggcgttgacgccgaaaaccggctgcgcgcgtttgtggttagcgaagatcgcatgaaagatgcttttgccctgctcaggcagctggtgagttaa

SEQ ID NO: 173626 - DNA, 1014 bp, Klebsiella oxytoca
atgatagtgacgattttgcgtcagcagccgcgcgcagcggcgctggtgctggcattaattgccgccaatttgctggcctggggctgggcttttgcggcgttcggcggcagcggcgcgctgatggccgccagcctgctggcctggggatatggtctgcgccacgcggtggacgccgaccatatcgcggcgatcgacaacgtgacccgcaaaatgatgcagcaggggaagcggccttttgccgttggcgcgtggttttctctgggacactcgtcgattgtggtgctggcttcggcggcgattgccgcgaccgccaccgcgtttggccagcagatgagctggtttcacgagaccggcagcgttatcggcaccgccgtatcggcgctgttcctgctggtgatggctcttatcaacctggtcattttgcgcagcgtctggcgcagctttcaggcgtggaagcagggcgaaaaggtgagcgatgagattatgaccggcggcggtatgatgagctggctattcgcgaaaacattccgcctgattagccgcagctggcagatgtatctggtgggttttctgtttggcctcggctttgatacggcgacggaggtcggtgtgctggggatctccgccgccagcgcgtcgagcggggtatcgatttggtcgattatggtttttccggcgctgttcgccagcggaatggcgctggtggatacgcttgataacgtgctgatggtcggcgcctacggctgggcgttcagcaagccgcagcgcaagctctattacaatatgactattaccggcacctcggtggtggtggcgctatttatcggcggcctggaggcgctggggctgttgatggataagttctctctgagcggcggcgtctggcgctgggtcggcgcattgaacgaccatctcggcgacgccggttttgcagtggtcgggctgttcgtggcctgctgggtgctgtcggtgctcaactaccgctggcgcgggtacgataacctggcgcggtag

SEQ ID NO: 173627 - DNA, 2220 bp, Klebsiella oxytoca
atgaacggggtgcagatccgcattcgcggtaaagtgcagggggtgggattccgccccttcgtctggcagctggcgcagcagctggggctgcgcggcgacgtgtgcaacgacggcgacggcgtgctggtgcgccttgtcggcggtgatgcgccatttctcgccgcgttaacccggcgctgcccgccgctggcgcgtatcgacagcgcggcagcggcgccttttgtctgggacgccgcgccgccaggctttaccattcgccaaagcggggccggaagcatgcgcacgcagattgtgcccgatgccgctacctgcccggcatgcctggcggaaatgaacaacccgcaggagcgccgctaccgctatccgtttatcaactgcacccactgcgggccgcgctttaccattattcgcgccatgccctacgaccgtccactgacctctatgtcgccgtttccactctgcacctcctgtgcggcggagtatgacgaccccgccgatcgccgtttccacgcgcagccggtagcctgcgccgagtgcgggccacggctggagtggcgcgggccgcaggcgcattcatttggcgaggcggctcttgaagcggcgacggctcgcctgatggcgggcgatatagtggcggtgaaagggctgggtggtttccatctgttgtgcgatgccggaaatcctgaggccgtcgcgaggctgcgggcgcgcaagcatcgcccggcgaaaccgctggcggtgatgctggcgacaacggcggggctcgatgaaccggcggtgacgctgctcacgtcccccgccgcaccgatcgtgctgctggataaaacgcaggtggccgggctgtgcgaccagattgcgccagggcttgcggaagtaggggggatgctgccgtctaatccactgcagcatttactttcgcaggcgctggcgcgcccattagtgatgacctccggcaacctcagcggtcgcccgccggcgttaaccaacgcagaggcgctggcggatttagccgggattgccgacggttttctgctgcataaccgcgagattgtgcagaggatggatgattccgtagtgcggcaaagcggcgagatgctgcgtcgcgcccgcggctacgtgccggacgcgctggcgctgccgccgggggttcacgatgcgccgcccctgctggccctcggcgcggatatgaaaaatacgttctgcctgctgcgcggcgacgaagcggtgctcagccagcattttggcgatctcgacgaggagggcgttgaggcgcagtggcggcaggcgctgcgcctgatgcaggagatctacgcttttacgccgcagcgggtggttgccgacgcccatcccggctaccgcgcttcgcggtgggcggcgtcgcttatgctgccggtggagcgggtgttgcatcatcatgcccacgctgccgcgtgcctggccgagcatcgctggccgctggagggcggcgacgtgattgccctgacgctcgacggcatcgggatgggggagaatggcgaactgtggggcggcgagtgcctgcgggtcaactatcgcgagtgtgagcatctcggcggtctgccgtcggtggcgctgcccggcggcgacctcgcggcgcgtcagccgtggcgcaatctgctcgcccactgcctggcgtttgtccctgaatggcagaattatgccgacaccgccgcgctgcgccagcaaaactggccgctgctggcgcgagcaatcgagcgtggtattaatgcgccgcaggcatcgtcgtgcggtcgtctgtttgacgccgttgcctgcgcgctgggctgcgcgccgctagccctgagctatgagggggaggcggcatgccgtctggaagcactggcggcgacctgcaaaggcgtggatcatccggtgaccctgccgtggcgcgaaggtaaactggacctggcgacgttctggcggcaatggctgagctggcaggcgggcccggcgcaaaaagcctgggcctttcatgatgcgctggcccgcgggctggcggcgatgatgcgcgattgcgcgagcgcgcgcaatattcgcacgctggccttcggcggcggagtgctgcacaaccggctgctgacggcgcgattgaccttttatctggccgattttactctgctttttccgcagcagctgcccgcaggagatggtgcgattgccctcggccaggcgatcgtcgctgcggcccgcctgcaggcttaa

SEQ ID NO: 173628 - DNA, 528 bp, Klebsiella oxytoca
atgaaccgtttcattatcgccgacgcaagcaaatgcatcggctgccgcacctgtgaagtggcctgcgtggtctctcatcaggaaaatcaggactgcgccgcgctgacgccaaaaagctttttaccgcgtattcacgtgatcaaaggcgttaacgtgtcgacggccaccgcctgtcgtcagtgcgaagacgcgccgtgcgccaacgtctgtccgaacggcgcgatcagccgcgaccagggcttcgtccacgtgatgcaggagcgctgtattggctgtaaaacctgcgtggtggcctgtccgtacggcgccatggaagtggtggtgcgcccggttatccgccacagcggcgcggggctgaacgtgatggcggaaaaagccgaagccaacaaatgcgacctttgccaccaccgtgaggaaggcccggcctgtatggatgcctgtccgacccacgcgctgatttgcgtcgaccgcaacaagctcgaacagatgaatatcgaaaaacgccgccgtaccgcgctggcctggtag

SEQ ID NO: 173629 - DNA, 1014 bp, Klebsiella oxytoca
atggcaacgatgctggaggtagcgaagcgcgcgggggtgtcaaaggccaccgtttcgcgggtgctgtcggggaacggctatgtcagccaggagaccaaagatcgcgtcttccaggcggtggccgaaagcggctaccggccgaatctgctggcgcgcaacctggcgacgaaaaagacgcagaccctcgggctggtggtgaccaacaccctttatcacggcgtctatttcagcgaactgctctaccacgtcgcgcggatgaccgaagacaaagggcggcagctgatcctcgccgacggcaagcacagcgcggaggaggagcgcgaggcgattgagtatctgctcgatctgcgctgcgatgcgataattatctatccgcgctttctcagcgttgatgagatggatgagattatcgaaaatcatgagcggcccatcatggtgctcaaccgccgcctgcgccgcaacgccagccactgcgtctggtccgatcaaaaagcttcggcgatgatggcggtggaaaagcttatcgcgctgggccatcgggaaatcgcgtttattaccggttcgctggattcgccaaccggcgttgagcgtctctcgggctataaagacgcgctggcccgccacggcattgccctgaataacgatctgatcgtcgaaggccgctggacgccggaaaccggcgcggcgggggttgaaacgctgcgccagcgccgcgtcggctacagcgcgctggtggcgagcaacgacgatatggcggttggcgcgatgaaacagctgcatcagatcggcgtcaaggttccggagcaggtctcggtcgtggggtttgacgatatcgtgctggcgccgtatatggttccggcgctctccagcgtcaaagttccggtgacggagatgatcaaagagagcatcaaccggctgatctttatgctcgacggcggcgattttaaatttcagcaactcttccccggcgagctgattgaacgcgactcggtggtccccggcccgcatgcctga

SEQ ID NO: 173630 - DNA, 1443 bp, Klebsiella oxytoca
atgtctaaaaattatgcagctctggcgcagcagattatcgcggcaatcggtggcgcagataacgttgccgccgtcacccactgcatgacccgcctgcgtttcgtggtcaaagacaacgagcgggtcgacagcgccaccctcaaagggctgaaaggcgtgctcggcgtggtgcgtagcgataaccagtgccaggtgatcgtgggcaataccgtctcccaggcgtatcgcgaagtggtcgcgctgctgccgggggatctgcgcccggccgaaccgcaggggaaaccgcctattaccctgaaacgcatcggcgccgggatcctcgacgcgctgatcggcaccatgtcgccgctgatcccggcgattatcggtggatcgatggttaagctgctggcaatgatcctcgagatgaccggcgctctgcccaaaggcgcgccaacgctgactattctgacggtgatcggcgacggcgcgttcttcttcctgccgctgatggtcgccgcttccgcagcggtgaagttcaaaaccaatatgtcgctggcgattgccattgccggggtgctggtgcacccgagctttatcgaactgatggccaaagccgcccagggcgagcacgtggagtttgcctttattccggtgacggcggtgaaatacacctataccgtgatcccggcgctggtgatgacctggtgcctctcttatatcgaacgctgggtcgaccgtatcaccccggcggtgacaaaaaacttccttaaaccgatgctgatcgtactgatcgccgctccgctgtcgattctgctgatcggcccgctcggcatctggatcggtagcgccatttccgcgctggtctatacgatccacagctatctcggctggctgtcggtggcaatcatgggcgccctgtggccgctgctggtaatgaccgggatgcaccgggtctttaccccaacgatcattcagaccatcgccgaaaccggcaaagagggcatggtgatgccgtcggaaatcggcgctaatctgtcgctgggcggctcgtcgctggcggtggcgtggaaaaccaaaaacccggagctgcgccagacggcgctggcggccgcggcttctgcgattctggcggggatttccgaaccggcgttgtacggcgtggcggtgcggctgaagcgaccgctgatcgccagcctgattagcggctttatctgcggcgcggtggccggcattgccgggctcgccagccactcaatggcggcgccgggcctgttcaccagcgtccagtttttcgacccggccaatccgatgaccatcgtctgggtctttggcgtcatggcgctggcggtggtgctgtcgtttgtcctgacgctgatgctcggctttgaagatattccgcaagaagaagccgccgccgacgccagacagcgtcaggccggcacccaggcttctcacgcctga

SEQ ID NO: 173631 - DNA, 1425 bp, Klebsiella oxytoca
atggcgacttttccacagggatttttatggggcggcgcgctggccgccaaccagtccgaaggggcatatctggagggcggcaaagggctgaccaccgtcgatatgattcctcacggggctcaccgcctcgcggtcaagctggggcaggagaaacgcttcgcgctacgcgaagatgagttctacccgagccacgaggcgatcgatttttatcatcgttataaagaagatatcgccctgatggcggagatgggctttagcgtcttccgcacctctatcgcctggagccgcctctttcctgagggcgatgagctggaaccgaacccggaggggatcgccttttatcgctcgctgttcgaggagtgcaaaaagcaccgcatcgagccgctggtgacgctgtgccatttcgacgtgccgatgcacctggttaccgaatacggctcctggcgcaatcgaaaaatggtggagttcttcacccgctacgcccgcacctgttttgaagcctttgatggtttggtgaaatactggcttaccttcaatgaaatcaacattatgctgcatagcccgttctccggcgccggtctggtgtttgaagagggggaaaatcaggagcaggtgaaataccaggccgcccatcatgaactggtcgccagcgccttagcgaccaaaatcgcccacgaggtgaatccgcaaaatcagatcggctgtatgctggcgggcggcaatttctacccttactcctgtaaaccggaagacgtgtggatggcgctggaaaaagatcgcgagaacctgttctttatcgatgtccaggcgcgcggcgcgtatccggtgtgggcggcgcgggtattccgcgagaaaggcgtgactatcgccaaagagtccggcgatgatgagatcctgcgccataccgtcgatttcgtctccttcagctactacgcttcgcgctgcgcatcggcggagatgaacgccggcaacaccagcgccgccaatatcgttaagtcgctgaagaacccgcacatcaaggccagcgaatggggctggggcatcgacccgctcggcctgcgcatcaccatgaatatgatgtatgaccgctaccagaaaccgctatttctggtggagaacggtctcggcgcgcgcgatgaggtggaggctaacggcgagattaacgacgactatcgcatcagctatctgcgcgagcatattaaagcgatgggtgacgctatcgaggacggcattccgctgatgggctacaccagctggggctgtatcgacctggtatccgcctccaccggtgagatgagcaagcgctacggctttgtctacgttgaccgcgacgatgccggccgcggcacgctggcgcgaaagcgcaaaaagtcgttctggtggtataagaaggtgattgccagcaacggggaagatttagcgtag

SEQ ID NO: 173632 - DNA, 486 bp, Klebsiella oxytoca
gtgactgacgttttactctgtgtcggcaatagcatgatgggcgacgacggcgcaggcccgctgctggcggagatgtgcgcggctaatcccgtcggtgattgggtggtgattgacggcggcagcgcgccggaaaacgatatcgtcgccattcgcgagctgcgccccgagcgcctgctgatcgtcgatgccaccgatatgggtctgaaccccggcgagatccgcatcgtcgatccggacgatatcgccgagatgtttatgatgactacccacaatatgccgctcaactatctgatcgatcagctaaaagaggatatcggcgaggtgatttttttgggtattcagccggatatcgtcggcttttattacccgatgacccagccgattaaggacgcggtcgaagcggtgtacgcgcggcttgatgggtggcaggggcaggggggggttgcggcacttgaagccgcagaggagccggcgttccccggctaa

SEQ ID NO: 173633 - DNA, 411 bp, Klebsiella oxytoca
atgagcgagacggtggtgttcagtcagctgagccgtaaatttattgatgagaacgacgcgacgcctgaccaggcgcagcaggtggtctattacagcctggcgattggccaccacctcggcgtcatcgactgcctcgaggcggcgctgagctgcccgtggcaggcgtatctggcgtggattgcgaccctcgaagagggcagcaccgcgcggcgtaaaatggaaggcgtgccgaagtacggcgagattgttatcgacagcaatcatgtgacgatgctggctaacgcttttgataaagcgctggcgcgacagacccccgagcagcaggcgtggagcaaaactatgctcagtatgctgcatgatattcaccaggaaagcgccatctatctgatggtgaggagactccgtgactga

SEQ ID NO: 173634 - DNA, 768 bp, Klebsiella oxytoca
atgagcaacttattaggcccgcgcgatgacaacggcattccggtgccgatgacggtggatgagtccatcgccagcatgaaggcatcgctgctgaagaaaattaagcgttccgcctacgtttatcgggtggactgcggcggttgcaacggctgcgagatcgagattttcgccaccctgtcgccgctgttcgacgccgagcgctttgggatcaaagtggtgccgtcgccgcgtcacgccgatattctgctgtttaccggggcggtgacccgggcgatgcgttctcccgcgctgcgcgcgtggcagtccgcgccggatccgaaaatctgcatctcctatggcgcctgcggcaacagcggcggcatcttccacgacctttattgcgtgtggggcggaaccgataaaatcgtgccggtggatgtctatattcccggctgcccgcccaccccggccgcgacgctgtacggcttcgcgatggcgctgggcctgctggaacagaaaatccacgcccgcgtgccgggcgagcaggacgagcagccgaccgaactcctgcacccggatatggtacagccgctgcgggtgcgcatcgatcgcgaagcgcgccggctggcgggctatcgctacggccggcagattgccgacgactatatgcgcctgctggggcagggcgatagccaggtgatgcgctggctggaggcggaaaaagatccgcgtctgaccgagatcgtcacccatctgaaccaggtcgtagaaggagcgcgtatccgatga

SEQ ID NO: 173635 - DNA, 543 bp, Klebsiella oxytoca
atgtttacctttattaaaaaagtcatcaaaaccggcaccgcgacgcactcatacccgctggagccgatgccggtggataaaaatttccgcggcaaaccggagcataatccgcagcagtgtatcggctgcgccgcctgcgttaacgcctgtccgtcgaacgccctgacggtagaaaccgatctcgccaccaaccagctggcgtggcagttcaacctcgggcgctgcattttctgcggacgctgcgaagaggtctgcccgacggcggcgattaagctctctcaggagtacgagctggcggtatggaagaaagaggattttctccagcaatcgcgttttgccatttgccactgccgggtgtgtgaacgcccattcgccgtacagaaagagatcgactatgccatcgcgctgctcaaacacaacggcgatagccgcgccgagctgcatcgcgaaagcttcgagacctgcccggagtgcaaacgccagaagtgcctggtgccgtccgaccgtattgaactgactcgccatatgagagaggccagctga

SEQ ID NO: 173636 - DNA, 1710 bp, Klebsiella oxytoca
atgtctgaagaaaaaatcggtcaacactatctcgccgcgctgcatcaggcctttccgggcgtggtgctggatgaagcctggcagaccaaagaccagttgacggtcacggtaaaggtcaactatctgccggaagtggtcgagttcctgtactacaagcagggcggctggctgtctgtgctgtttggcaacgacgaacgcaagctcaacggccactatgccgtctactacgtgctgtcgatggagcagggcacgaaatgctggatcaccgtgcgcgtggaagtggacgccaataaaccggaatatccgtcggtgacgccacgcgtgccggcggcggtgtggggcgagcgcgaagtgcgcgatatgtatggtctggtgccggtggggctgccggacgagcgccggctggtgctgccggacgactggccggatgaactctatccgctgcgaaaagacagcatggactaccgtcaacgcccggcgccgaccaccgatgccgaaacctacgagtttatcaacgagctgggcagcaagaaaaacaacgtggtgccgattggcccgctgcacgtcacctccgacgaaccgggccacttccgcctgttcgttgacggcgagaatattatcgacgccgactaccgcctgttctacgtccatcgcgggatggaaaagctggcggaaacccggatgggctacaacgaagtcaccttcctgtcggaccgcgtgtgcggtatctgcggtttcgcccacagcaccgcctacaccacttcggtagagaacgcgatgggcatcgtagtgccggagcgcgcgcagatgatccgcgccattctgctggaggtggagcgcctgcactcgcacctgctgaacctcggcctcgcctgccactttaccggcttcgactccgggtttatgcagttcttccgcgtgcgcgaaacctcgatgaagatggcggaaattcttaccggggcgcgtaaaacctacggtctgaacctgattggcggcattcgtcgcgatctgctgaaagaggacatgatccagacccgccagctggcgcagcagatgcgtcgcgacgtgcaggagctggtggatatgctgctcagcacgccgaatatggagcagcgtaccgtgggcattggtcgtctcgacccgcaaatcgcccgcgacttcagcaacgttggcccgatggtgcgcgccagcgggcacgcccgcgatacccgcgccgatcacccgtttgtcggctacggcctgctgccgatggaagtgcacagcgaacagggctgcgacgtcatctcgcgcctgaaggtgcgcatcaacgaggtctacaccgcgttgaacatgatcgactttggcctcgataacctgccgggcggcccgctgatggtggagggcttcacctatattccgcaccgcttcgcgctcggcttctcagaagcgccgcgcggggatgatatccactggagtatgaccggcgataaccagaagctgtaccgctggcgctgccgggcggcgacctacgccaactggccgactctgcgctatatgctgcgcggcaataccgtctccgacgcgccgctgatcatcggcagccttgacccgtgctactcctgtaccgatcgcatgacggtggtcgacgtgcgcaagaagaagagcaaagtggtgccgtacaaagagctggagcgctacagcatcgagcgtaagaactcgccgctgaaataa

SEQ ID NO: 173637 - DNA, 924 bp, Klebsiella oxytoca
atgagcgtattaattgcattgttgcaggcgctggtgctgttcgccgtcgcgccgctgttgtccggggtgacccgcgtcgcccgcgcgcgtctgcataatcgccgcggcccgggcgtactgcaggagtaccgggatatcctgaaactgctggggcgccagagcgttggcccggatgcctccggctgggtcttccgcctgacgccgtacgtgatggtcggcgtgatgctgaccatcgctaccgcgctgccggtggtgaccgttgattcgccgatggcggggctgggcgacctgattaccctgatctacctgttcgccatcgcccgtttcttcttcgctatctccggcctcgataccggcagcccgtttaccgctatcggggcgagccgtgaagcgatgctcggcgtgctggtggagcctatcctgctgctcggcctgtgggtcgcggctcaggtcgccggatccacccatatcagcagtatcaccgacaccatttatcactggcctgtcgcccgcactcttccgctgattctggcgctgtgcgcctgcgccttcgccacctttatcgaaatgggcaagctgccgttcgacctggcggaagcggagcaggagcttcaggaaggcccgctctcggaatacagcggtagcggcttcggcgtgctgaagtggggcatcagcctcaagcagctggtggtcctgcaaatgttcgtcggcgtatttatcccgtggggacagatgaccagctttagcgtcggcggtctgctgctggcgctggtagttgccgtcgtcaagctggtgcttggcgtgctggtgattgcgctgttcgaaaacagcatggcgcgtctgcgcttttgcgccacctcccgcgtcacctgggccgggtttggttttgcctttttagccttcgtctccttgctggtggcgtga

SEQ ID NO: 173638 - DNA, 1827 bp, Klebsiella oxytoca
atgagtgtgatttccttagtgaatcaggcggtggcctggtacgccgccagcgcggtgctggcgtttttgttcgctctgcgcaaaccgctgagcggggcgatcgccgggattggcggcgcggtcgccagcgcgatgctggtgctggcgggcggaacggcgctgctgatgccggatcgcgtcagcgccggcatgctgcaaatgctgcacctgcccctgcgcgttggcggcgtcaatgcgctgtggctgctggcaatcggcctctcggcgctgccgatttcgctgttcaatatcgcctggcatcgtcatccgcaggttaaagccaacggtctgctggtgaatctcctgctggccgccgccgtctgcgccgtggtggtgacgaacttcggcgcgctggtggtgatggcggagattatggccctttgcgccgcgtttcttaccggctgcgcgcagtccggcaagctgtggtttgcgctgggacgcctcggtacgctgctgatggcgtggagctgctggctggtctggtcgacctacggcacccttgaactggggcagattacccggctggcggtggcggcgccgcaaaacgcgctgctgtggctgccgggcctgatcggctttgcgctgctggccggggtcattccgctgcacggctgggcgccgcaggcccacgctggcgccagcgctccggctgccgcgctgttttctacggtagtgatgaaggtcggtctgtacggcatcctgacggtctcgctggccggcagcgttccgccgctgtggtggggcgtgatgctgctggtgctggggatgatcaccgccttcgtcggcgggctgtacgccctgatggagcacaatattcagcgcctgctggcgtaccacaccctggaaaacatcggcattatcctgctcggcctcggggcattcgtcaccggcgtggcgacccataacccaaccctgatggtgctgggctttatcggcggcatgtatcacctgatcaaccatagcctgtttaaaactaccctgttcctcggcgcgggagcggtgtggttccgcaccggccatcgcgatatcgaaaagcttggcgggatcggcaagaaaatgccgctgatttccctttcgatgctggtgggtctgatggcgatggccgcgctgccgccgctgaacggcttcgccggagagtgggttatctatcagtccttctttaagttgagcaccggcgacgcgtttgttggccgcctgcttgggccgctgctggcggtgggcctggcgatcaccggcgcgctggcggtgatgtgtatggcgaaagtctacggcgtcaccttcctcggcgcgccgcgaagcaaagaggcggaaaacgccacctgcgcgccggggctgatgacctttagcgtggtgctggccgccgtctgctgcgtgattggcggggttgccgcgccgtggctgctgccgctggtgagcggggcgtttccggtgcaggcggaggtctccagcgtggtgtctcagccgctgatcgccattctgctgattgcctgcccgctgctgccgctgctgctgatgatcttctttaagggcgatcgcctgccggcgcgctcgcgcggcgcggcctgggtctgcggctatgaccatgaaaaatccatggtggtgaccgcccacggtttcgccatgccggtgaaagaggcttttgcgccaattctcaagctgcgccactggctgaacccggtgcgcctggtacccggctggcagaacgcttccgcgcccgcgctgtttcgcggcgtggcgctggtggagctggcggtactggtggtgattgtgatttcccgaggagcctga

SEQ ID NO: 173639 - DNA, 609 bp, Klebsiella oxytoca
gtgaaccgttttgtaattgctgactccaccgtctgtatcggctgtcgcacctgcgaagccgcctgcgctgagactcaccgccagcagggcctgcaagccatgccccggctacggctgatgcgcaatgaaaaagaatccgcgccgcagatgtgccaccactgtgaagatgcgccctgcgccgccgtctgcccggttaatgccattaatcgcgtcgatggcgcggtgcagctcaatgagagcctgtgcgtaagctgcaagctgtgcggcatcgcctgtccgttcggcgccattgagttttccggcagccgcccgctggatattccggctaacgccaatacgccgatggcgcccgccgcgccgccggccccggcgcgcgtcagctcgctgctcgactgggtgccgggcgtacgcgctatcgccgtcaaatgcgacctgtgccacttcgatgaggaaggcccggcgtgcgtgcgcacctgcccgaccaaagcgctgctgctggtggatatccgcgatatcgcccaggccagcaagcgtaagcggcagctgacttttaataccgacctcggcgatctgtcgctgttccaggcgcaacaaggggacgtgaaatga

SEQ ID NO: 173640 - DNA, 450 bp, Klebsiella oxytoca
atgactatttgggaattaagtgaaaaggcggactacatcgccgatcgtcaccgccagcatcaggagcagtggcatacctactgcaactcgctggtacaggggataaccctgtcgaaagcgcgtttgcatcatgcgatgagctgcgcgccggataaagagctgtgcttcgtattgtttggtcattttcaggtttacgtggcgctggcggagggctttaacagccacaccatcgagtattacgtagagagtaaagacggcggcgacagacggctgattgcccaggccacgctgggctcagacggcaccattgatggccggatcagcaaccgcgatcgcgagcaggttctggagcactatctggcgactatcgccagcgtttatgaccgtctctacgaggctatcgaacaagaccagccggtggatttaaaccacctgacgctggcccgttaa

SEQ ID NO: 173641 - DNA, 345 bp, Klebsiella oxytoca
atgcacgaaatcacccttagccagcgggcgctggaaattatcgaacagcaggcgcagcaggccggcgcgcgtcgggtcaccggcgtgtggctgaaagtgggggcattttcctgcgtggaagccagcgcgctgaccttctgctttgagctggtgtgccgcggcacgctggcggaaggctgtgagctgcatatcgccgaacaacaggctgaatgctggtgtgaatcctgccagcagtacgtgcatctcatctcacagcacgtgcgccgctgcccgcagtgtcagagcgatcggctgcaaattgtggcggatgacggcttacagattcagcgactagaagtggagtaa

SEQ ID NO: 173642 - DNA, 873 bp, Klebsiella oxytoca
atgtgtacaacctgcggctgcggtgaaggcaacctttatatagaaggcgacgagcataacccgcattcggcgtttcgcagcgcccccttcgcgcccgccccgcgccagatgatgaccattaccggcgtgaaaaccgataacttttcccccacccgctcggagactggcgacctgcactacggtcatggcgaagcgggtacccatgcgccgggccagagccagcggcggatgctggaagtggaaatcgacgtcctggataaaaacaaccgtctggccgcccgcaaccgcgcgcgcttcgccgccaggagccagctggtgctgaacctggtctccagccccggctccggcaaaaccaccctgctgacggaaaccctgctgcggctgaaagagaaaaccgcctgcgcggtcattgaaggcgatcagcaaacggtgaacgacgccgcgcgcatccgcgccaccggcactccggcgattcaggtcaacaccggcaaaggctgccatctcgacgcgcagatgatcgccgacgccgcgccgcgcctgccgctggcggaccacggcattctgtttatcgaaaacgtcggcaacctggtgtgtccggcaagtttcgacctcggcgaacgtcataaagtggcggtgctgtcggtaaccgaaggcgaagacaaaccgctgaagtatccgcatatgttcgccgccgccagcctgatgctgcttaacaaggtcgacctgctgccgcatctcaactttgacgtagagaagtgtctggcctgcgcccgcgaggtgaacccggatattgacattattctgctttccgccaccagcggcgaaggcatggaccagtggcttcgctggctggaggcgcagcaatgtgcatag

SEQ ID NO: 173643 - DNA, 273 bp, Klebsiella oxytoca
atgtgcataggcatacccggacaaatctgcgctattgacggcaatctggcgaaggtcgaagtgtgcggcattcaacgcgaagtcgacctgaccctggtgggcgcggttgacgatcgcggtcagccgcgtctcggccagtgggtgctggtccacgtgggttttgccatgagcgtgattaacgaagccgaagcccgcgacaccctcgatgcgctgcaaaatatgtttgaagtcgagccggatgtcggcgcgctgctgtacggcgaggagcggtaa

SEQ ID NO: 173644 - DNA, 1122 bp, Klebsiella oxytoca
atgcgttttgttgatgaataccgcgctccggaacaggtgatgcagctggtggaacatctccggctgcgcgcgcgcctgctgccgcataccgccgaacgtccgctgcgcataatggaagtgtgcggcggccatacccacgctatttttaaatttggcctcgatcagctgctgccggaaaatattgaatttatccacggccccggctgcccggtgtgcgtgctgccgatggggcgtatcgacgcctgtatcgatatcgccagccgtccgggggtgattttctgcacctttggcgacgccatgcgcgtaccgggaaaaaacggctcgctgctgcaggcaaaatcgcgcggcgccgacgtccgcatcgtctattcgccgatggacgccctgaaactggcgcagcagcaccccgatcgagaagtggtattcttcggtctcggcttcgaaacgacgatgcccgccaccgccctgaccctgcgtcaggcccgcgagcgcggcgtcgggaacttttactttttctgccagcacatcaccctgctgccgaccctgcgcagcctgctcgaccagccggataacggtatcgacgcttttctcgcccccggtcacgtcagcatggtgattggcaccgatgcttacgggtttatcgccagcgactatcaccgtccattagtggtggccggattcgaaccgcttgatctactgcaaggcgcgatgatgctggttgagcagacaatagcgcagcacagcgaagtggagaaccagtatcgccgggtggtgcccgatgagggcaacccgctggcgcagtcggccatcgccgacgtgttttgcctcagcggcgatagcgagtggcgcggtctgggggtgattaacgactccggcgtgcacctgacggccgcgtatcagcgtttcgacgcagaagcgcatttccgcccggcgccgcagcgggtctgcgacgacccgcgcgcccgctgcggcgaggtgctgaccggccgctgtaaaccgcaccagtgcccgctattcggcaatacctgcaacccgcagagcgcattcggcgcgctgatggtctcatcggaaggcgcctgcgccgcctggtatcaatatcgcagtcaggaaatcgaagcatga

SEQ ID NO: 173645 - DNA, 1011 bp, Klebsiella oxytoca
atgaaaagcgttcagttagcccatggtagcggcggtcaggcgatgcagcagctgatcggcgacctgtttatgcaggctttcgccaacccctggctggcggagcaggaagatcaggcgcgtctcgatctcgctcagcttagcgcgcagggcgacaggctcgccttctccaccgacagctacgttatcgatccgctgtttttccccggcggtaatatcggcaagctggcggtctgcggcacggcgaacgatgtggcggtgagcggcgcgctgccgcgctatctctcctgcgggtttattctcgaagaggggctggagatggccaccctcgaagcggtggtgagcagcatggcgcagaccgcgcgggaagccggtatcgccattgtgaccggcgataccaaagtggtgccgcgcggggcggcggataagctgtttatcaataccgccgggatcggcgtcatccccaccggtattcggtggggagcgcagcagattagcgcgggagacgtgctgctggtcagcggcacgcttggcgatcacggggcaacgatcctcaacctgcgcgaacagatggggctggacggcgcgctgtccagcgactgcgcggtgctgacgcccttgattcagacgctgcgcgacgtagctggcgtgaaagccctgcgcgatgccacccgcggcggcgttaacgcggtggcccatgaattcgccgccgccagcggctgcggaatagagctgcatgaacaaaagctgccggttaacgataccgtacgcggcgtgtgcgagctgctggggctggacgcgcttaatttcgccaacgagggtaagctgttgatcgccgttgcccgcgaggcggcggaaagcgtacttgcgcatttacggtctcatccattaggccgcgatgcggcgataatcggcgacgttgtgccgcgcgcgggcgtgcgctctgtcggtctgtacggcgtcaaacgcacgctggatcttcctcacgccgagccgctgccgagaatttgttaa

SEQ ID NO: 173646 - DNA, 2073 bp, Klebsiella oxytoca
atgtcgtatacaccgatgggcgatcttgggcagcagggtctgtttgatatcacccgcattttattacagcagccggacctggccgcgctgagcgagacgctgaccggcctggtgcagcagtccgcgctcgccgaccgggcggcgattattctgtggcattccggcaatcatcgcgctattcggcacgcctgcgacgacgcggggcagccggtgagctacgaagatgaaaccgtcctcgccaacggcccggttcgacgcctgctatcgcgtccggatgcactgcattgcgatagcgccacctttgccgaaacctggccgcagctcgccgtaagcggactctaccccaactttggctattactgcctgctgccgctggcggcggaagggcgtatcttcggcggctgcgaatttattcgcgacgacaaccggccgtggactgaaaaagagtaccagcggctgcacacctttacgcaaatcgttgccgtggtcaccgaacagatccaaagccgggtcagcaacaacgtcgattacgacctgctgtgccgggaacgcgataacttccgcatcctggtggcgatcaccaacgcggtgctctcgcggctggatatcgatgagctggtcagcgaagtggccaaagagatccaccgctacttccgcatcgacgccatcagcgtggtactgcgcagcaaccgcaaaggtaagctcaatatctactccacccactacctcgacgccagccatccggtacatgaccagagcgaagtggacgaagccggtaccctgaccgagcgggtattcaaaagcaaagagatgctgctgctcaatctccacgagcacgacccgctggcgccgtacgaaaaaatgcttttcgagatgtgggataacaaaatccagaccctgtgcctgctgccgttgatgtccggtaatactctgcttggggtgctgaagctggcgcagtgcgatgaaaaagtcttcaccaccaccaacctcaagctgctgcggcaaatcgccgagcgcgtctcgatcgccatcgacaacgccctcgcctaccgcgagattcagcggctaaaagagcggctggtcgatgagaacctcgccctgaccgaacagctcaacaacgttgagagcgagtttggcgaaatcattggccgcagcgaggccatgaacagcgtgctcaagcaggtggagatggtggcgcagagcgacagtacggtgctgatcctaggcgaaaccggcaccggtaaggagctgattgcccgcgctattcataacctgagcggccgcaatagccgccggatggtcaaaatgaactgcgcggcgatgccagccgggctgctggaaagcgacctgtttggccacgagcgcggcgctttcaccggcgccagcgcccagcgtatcggccgtttcgaactggcggacaaaagctcgctgtttctcgatgaagtgggcgatatgccgattgaactacagccgaaactgctgcgcgtgttgcaggagcaggagttcgagcgtctcggcagcaataagctgattcacaccgacgtgcgcctgatcgccgccaccaatcgcgatcttaaacagatggtcgccgatcgcgagtttcgcagcgatctctactaccggctgaacgtcttcccgatccatctgccgcccctgcgcgaacggccggaggatattcctctgctggtgaaggccttcacctttaaaatcgcccgccgcctcggacgcaatatcgacagcattccggcggagacgctgcgcctgcttagccgcatggagtggccgggtaacgtgcgcgaactggagaacgtcattgaacgcgcggtgctgctgacccgcggcagcgtgctgcagctttcactgccggaaatgagcctcgagactgagccgctgccggcagaagtgctgccggaagagggcgaagacgaataccagctcattgtccgggtgcagaaagagagtaacggggtggtcgccgggccgaagggcgcggcccagcgtctgggattaaagcgcacgacgctgctttcgcgcatgaaacggttgggtattaataaagaccagctgcagtag

SEQ ID NO: 173647 - DNA, 957 bp, Klebsiella oxytoca
atgacgcgtttacctctggccgccgccatcgctttgcttttggcttctccggcggcattttcctctctccccaccttttctgtctggcccggcggtgaagcccccggcgcgaaaaacagcccggcgagcgaatcgctggtagagcgcagcaaagatccctcgctgcccgatcgcgcggtcaccgggattcgtgctccgacaattaccgtttacgcaccggagaagcccaacggtattgcgctgctggtgacgccgggcggctcttaccagcgagtggtattggataaagagggcagcgatctcgcgccggtatttaacgcccgtggctataccctgtttgtcatgacctaccggatgccggcggacggtcacgcagaaggcagcgaggcgccgttggccgatgcgcagcgcgcgctgcgtaccctgcgggcgcgggccgccgagtggcatatcgacccgcataaaatcggcattatgggcttttccgccggggggcacgtggcggccagcctggagacccggtatagcgaaccggcttacgtcgccgtggacgcagttgatcggcagagcgcgcggccggacttcgcggtgctcggctatccggtgatttcgatggatccggcgattgcccatcccggatcgcgcaaggcattgattggcgaaacgccgacggcggagcggcagcatcgttattcaccggagcagaacgtcacgccgcagacgccgccaacctttattttccacgcggtagacgatccttccgtgccggtggataacgcgctggtgatgtttaacgccctgcgcgcgcagcaggtgccgaccgagctgcatctgttcgccgaggggaaacacggatttggtattcgcgggacccggggcctgcccgccgccgaatggccgcagctggcgatgaactggatagcttcgctggcggaaatgaacaaatcgcgccaataa

SEQ ID NO: 173648 - DNA, 1401 bp, Klebsiella oxytoca
atgacccggtatcagtttccggaaggttttttttggggcgcggcggcatccggtccgcaaacggaagggataagcaacaagccgcatcgttctatttgggatagctggtttgccgaacagccggaacgtttttatcagcagattgggccgcaaacggtttgcggcacttaccatcagtatccccaggacgtggcgttgatgaagcggaccgggttcaactcttttcgcacctcgatacagtggtcgcggctgattgacgacttcgaaaccggcgcgcccaatgcggacgcggtacgtttttatcatgcctacctggatgagatgattgaaaacggcatcgagccgatgatcaacctctatcactttgacatgccggaagcgctgcaaaagcagtacggcggctttgagtcggcgcacgtgaccgatcttttcgcgcgttttgcccgtaccgcttttgagctgtttgggcacaaagtgaaatactggatcaccttcaacgaaccgattgtgccggttgagggcggctatctgtatgacttccactatccctgcaagaaagacggcagtctggcggcgcaggtggcgtttaacattatgctggcccacgccaaagcggtgcgcgagtttcgcgcgctggcgctggaaagcgagattggcgtggtgctgaatctgacgccgtcctatacccgcaacgacagcgcggaagaccaaaaagcggcgtggtatgcggatctgttcttcaaccgcagctttctcgatccgctggtgaaacatcagttcccgaaagcgctgtgcgaaattctggccgcgcacgactgtctgccggaggtgacaaaagccgacgttgagctgattaccggatcgcgcgtcgattttctcggcgttaactattacgttccgcggcgggtgaaagcgcgcgaaagcgactatacgctggactatttcaccccggagttctatttcgaaaactatgtgaatccgcaagggcgctttaatccttatcgcgataataatgagattctgccgcaggcgatttatgacattgccgccaatattcgcgataactacggcaatataaagtggttcctcgcggaaattggtatcgcgatggatattgagtcggaaggcgagccgggcgaggatggggtgattgacgattcgttccgcatcggcctgatggaagagcatctggtgcagctgcatcgcgccattgccgacggcgcgaactgctttggcgtgcatcagtggacctttatcgataactggtcgtggattaactcgttcaagcgccgctacggcttctggcggctcgacttgcaaaccggagagcggctgataaagcgcaacgcgctgtggtttgccgaactggcgaccagcaacggcttcagttctgataaatag

SEQ ID NO: 173649 - DNA, 2196 bp, Klebsiella oxytoca
atgattaagccggtgaaaaaactgatgctcgtcgcgctgctttcggcgctgggaagcgcaggcgcgatggccgcggagcagtcgcactttgaacactttattacccgcgacggcgcgacgttaaaagatggcgacaaggtgttccgctttgcgggcattcatgcgccggagctgcatcgtattgaagacgacgcgcgcggcacctgtaaagccgactcgcgcggctgggggcaatacttccgctggccgacggcggaggaacaggaaaactggattaaagcgctggtgcaaaccggcgccagagcgcagcgggtatacgtgctctcggtacagcaggcgtttgacgaggcctgcggtcgcgaaacccatattctggctccggaaaccgccgacgacatgccgcgtctgaacgaaaaggcgatgcgggtgtacgacaacatgatcgccgaggcggacaaacagggtctgcgcctgattctgccgtttatcgatcactggtggtggtggggcggtcgcgagcagctggcggcgttttaccacgaaaagccggaggatttttaccgtaccgatagtaaaaccttcaaggcctatctggacgtgattcgtcaggttatcacccgtaccaacagcgtgaccgggcgcccttactatgacgaaaaagcgattatggcctgggagaccggcaacgagctggaagacaccaacgcggcgttccttcagcagaccgccgcatggatcaaaaagtgggcgccgcatcagctggtggtggatggcacctataagaaaattaatgcgtttgcgcttaacgatccccatgtcgatatcgtcagcaaccactactacaccaatgccgataacaaccatcccgatcaggtgaaaaaagacctgacggcggccgcgggtaagaaagtctacatggtgggcgaatttggcctgctggatgcgcagcagcttaacgccattatgcagtcgatcgtccatagcgaagtcaacggcgcgcaggcggcgggcggtttaatctggggcttccgcggtcatcgtcacgatggcggtttctactggcataaagagtccaccggccactacagctaccatttgccgggcttcccggtcgacggtaaagccaatcaggagatggaggtggtcgatctggtgcggaccgccgcggcgcagatgaacgggcaggagaaagcgccgccgctgccgaagccggatgcgccgaagctgcgggcgacggattcaccgtttgcgatcaactggctgggggcggcggtagggcgcgcctatgatgttgagcgcgccgattcggcatccggaccgtggaagatcgtggggcgcgatatttcggacggcgtaaacgagtggaacccgcagacgatggatctgttccgcgatgactatcgcagtctgcaactggggaatacgtactattaccgcgtcattgctaaaaacgagagcggcagttcatcgccttcgaacgtgattagcgtgaagcacacccaggcgaatcaggcgccggaagtcacgctggtggaaacgctcaccaccagccaggaccagggcgtgcagctcagcgcgagctggcgcgatgacgggctgccggatggcaacgttaaggtgagctggagcaacggcggcaacgcgcaggcccatatctgcgcgacggataaagccgaaactcgcgcctggtttagcgcccccggtgaatacgcgctgacctttagcgccgatgatggtctgctcaaaagcagtaaaaccgtaaaggtcacggtgacggaagccgtcgggaaagcgcccgctgattactgccgttttagcggcggggttgtgaacgtgaccgatggcaagatcgaggcggcgaaaagcgagaaagacgcgctgacgattgacgaagacggtttcctcgggccgttcgccaacgatggcgataaggtgagctggcaggttgccgcgccgtgggccggcaagtatcagctgcaggtgacgttcagcggcaaatggggcggcaagaaaaactcgtttatcgtcaacggcggcgcgccaatcgcggttgaattcccgcaaaccgatgaacagggccagcagctgcgggtgccggtggagctgaaggctggcgataaccgcatcgacttcggtaaattcgccggcgactggggctacatgtttatcaaatcgattgaagtggttgcagagtag

SEQ ID NO: 173650 - DNA, 1338 bp, Klebsiella oxytoca
atgatcaggctaaatcattcaatacctctgtctttacttgcccttgcggtgatgagcgactgcgccagcgccgatccgaagtacgattttatgctgcatggctatatccgttcagggatccttgccaacgccgacggcaatcgcgctgactccgttggcctgatgccggacggcaagtggcgtctgggcaacgaagaagataccaagatcgaactgatcccaacggtgacgttaacctcggacagcggcgtggtagcaaaagtccaggccaacatcacccatcagtcaaaatgtacctctgactggaactgtcaggacgacgacgggcatgatgtgcagttccgcgaaggttttgccgaactgtccaacctcgactttgccccggagatgaccttctgggccggtaagcgctacagcagctccaacacctccagccatcagtttgactgggagtacattcagtacaacggcaccggcggcggcttcgacaatatggatcttggcttcgcgcgcttcgatgccggggtttacgccttctcgccgacggacgaaaccaaagcctacccggtcgacaaaggcgatcagggctatccggatgactactcgctcaacctgtggctgaaaaagatcggcggcaccggcttcgatcttgagctgattggccaccacatgaaccgcaacgagaagcacccgacctcggcggaaaaaggctacggcgtgaccggcgtttacaactttgacggcttctacggcctgaccggcggctactctcgcgtggtcttccagtacggacgcggcctggcggcgggagactcgctgggtaaaaacggctggggctgggcaaacctcgacgatacccaatcctggcgcgtggtgctggataacatggcctcgctcggcgactgggaaatctccacgtttgcctactatcagaaagacaaaaactaccgctggtggacggaagacgccgaaggctgggggcgcaccagctgggtggcggggatccgcccgtatcagcagatcaccaaaaacttcgccatgcagtacgagctgggctacgaatatctcgacgataaaaactacaaaggcgtggacggcaaaggcaaaggcggcctgactaaagtgaccatcgcgccgaccctgacctttgattccggcttctggacgcgcccgcagctgcgcttcttcgtcacttacgcgaagtgggataagggggtctccgacgcgctggacggcaactacgactggagcaccaataccctttccgctggtagctactcgcgcagcggcgacaccgatacgctgaacttcggcgtgcaggccgaagtctggttctga

SEQ ID NO: 173651 - DNA, 1359 bp, Klebsiella oxytoca
gtgaccacgatcacctatgacgggcttttactttacacaggagtgcgcgatcatcctggcgactactctcttctgaaaggcaggattatgaacattcagttaatgaatgttgccgtcgatatcatcgagcagcggctggcgccgctggccaacgttctgacgcgcaataaccacattacggcgatgcgcgacagctttgcgctggcgatgccgtttgtgatcgtcggaagtttgctggtgccgattttgtttccgcccgtttccatcgacggcgcatcggcctttggccagttctatttccagctgcggcctattctgctgccgacttttgaactgactatcgggctggtggcgctgattgtggccttcggcgccagcgccagtcttgccaagcagtaccggctaccggagcggctctgcgggctgaccggctgcctggcgtttttgctgtttatcggctttcgcgacaacggcgcgaccaatatttttcttggcggaatggggatttttaccgcgctgatatcgagtacttactccattgaaattgtacgctttttctataagaaaggctggtgcatccgcctgccggaagaggtaccggtgatgacccgtaacggctttcagctactgattccgctgctggtggtgatgctctctattagcgtcattaacgcgctgctgttgcaaagcaccgggcgcattttaccggagctgattagcgaagcggtacggccgctggtggtggcctccgataccctaaccgcggttttaatatcgttatttatctgcaacctgctttggtttgtcggtattcacggcgcgctaattatcaccgggattatgaacccgttctggatgacctatctgtttgaaaaccaacaggcgctggccgccggttccgccacgttaccgcatatttacctgcagggattctgggatttctacctgctaatcggcggtatcggctcgacgctgccgctggtttttatggcgatgcgcagccgttcccggcagttgaaaagcgtcgggaaaattggcctgcttccctcgctgtttaacattaatgagccgatattgttcggctttccgattatcatgaacccggtttttctgctgccgtttatttttgtgccgctgataaatgcctgtatcgcctggtatttaacccatttggggattctcgaccgggcggtggcgatgctgccgtggtcgatgccggcgccgctcggcgcggcgtggtcagccaacggtagctggaaaaacttatgcatgtgcctgttcgctatttttaacgcctggatgctctatcgcccgttctttaaggtctacgaacgccagcttgccgacgctgaacgctaa

SEQ ID NO: 173652 - DNA, 315 bp, Klebsiella oxytoca
atgaaaaagataatgttgtgctgttccgcgggcatgtccaccagcctgctggtgaaaaaaatgatcgccgaggccgagcagcgcgggttgccggtagagatcaacgcctttggcgtcgcggagttcgatcaacaggtcggccattaccaggtggtcatgctggggccgcaggtgaaatacatgcagaaagatctgcaaaaacaggctgataaatacgggatccgcgtggaacccatcaacatgatggattacggcatgcagaaaggcggcgccgtgctggatttcgcgctttcccttatcgataacaaaaactaa

SEQ ID NO: 173653 - DNA, 1323 bp, Klebsiella oxytoca
atgagctctctgtacgcgaagctgatcgccgtgattgaacagaagatcacgcctatggcgggggcgatcggccagcaaaaatacgtcatctccatccgcgacggtttcattaccgccctgccctttatgatcgttggctcgtttttgctggtgtttatcttcccgccgttctccccggatacgacgtggggctttgcccgcgcctggctgcaattttcgctcgatcatcgcgatgcgctgatgctgccgtttaacttcagcatgggggtgatgacgctgtttatcgccgtcgggatcgccgccagcctggcgaagcaccataacctggactcgctgaccgccgggatgctgtcgctgatgtcatttctgctggtggccgcgccgctgaaagatggccagatctctaccgcctacttctccggccaggggatctttaccgcaattctggtggcgatttactctaccgagctgtacgcctttctcaaacgccacaacattacgatccgtctaccgcctgaagttccggcgggcgtggcgcgctcgttcgagatcctgatcccggtgctggcgatcgtgctgacgctgcatccgctgaacctgtttatcgaagcgcagctgggcatgatcattccggaagcgatcatgtcgctggtgaaaccgctggtggcggcgtccgataccctaccggcgatcctgctgtcggtactggtgtgccaggtgctgtggtttgccggcattcacggggcgctgatcgtcaccgggattatgaatccgttctggatggcgaatctgtcgatcaaccaggcggcgatggccgcaggcaccgcgattccacatatctatgtccagggcttctgggatcactatctgctgatcggcggcgtcggctccaccctgccgctggcgctgatgctgctgcgcagcaaggccgtgcatctgcggacgattggccggatgggcgtggtgccgggcgtatttaacatcaacgaaccgattctgttcggcgcgccgatcatcatgaacccgctgttcttcctgccgttcgtgctggtgccgatggtcaacgcgaccctggcctactttgcgctgaagctggacctggtcagccgcgtggtgtcgatgacgccgtggacgacgccggcccctatcggcgcctcctgggcggcaaactggagctttagcccggtgatcatgtgcctgatttgtatagcgacggcgatggtgatgtatctgccgttcctcaaagcctacgaaaaacagctgctggagcaggagcacgctaacgccgccgcccaggctgaaggcgcgccgcagtccgcataa

SEQ ID NO: 173654 - DNA, 315 bp, Klebsiella oxytoca
atggaattagaagaacaggtgatgggtattatcatcaacgccgggcagtcgcgcagcctgtgctacgaagcgctgagctgcgctaaagcgggggacttcgccgccgccgacgaaaaaatgaaagaagcggcgcattttgcccgcgaagcgcatcgggtacagacccagctgattgaagccgacgaaggcgagggtaaaaccaaaatgaccctggtgatggttcacgctcaggatcatctgatgacctcgattctggcgaaagagctgatcggcgaactgatcgccatttaccgctcgcggccgctgcacgcgtag

SEQ ID NO: 173655 - DNA, 915 bp, Klebsiella oxytoca
atgctacatctgggtttagacattggcggcaccaaaatggaagccgtcctgctcaacgcggcgggcgaatgcgtctatcgccagcgccgtccgacgcataaagagagctatcaggcgtttatgcagcagctgctcgggctgattgcgaccgtcagcgactggagcgaacggccgtttactatcggcatcggcctaccgggggctatcgacccgcaaagcggcctgattaaaaactgtaactgtctggtgctcaacggccacgacctgcgtcatgacctgatgcgggaacttggtcaaccggtatggatggcgaacgatgccgactgcttcaccctctctgaagcggtggacggcgcgggcgcaggggcaacgaccgtattcggcgttattatcggtaccggctgcggcggcggcatcgcggtgaaccaacggctactcagcgggcctaacgccatcgttggcgagtggggacacaatcctctgccgggctattgccccgagcgcgacggtccggcgcagccctgctactgtggcaaagagaactgcatcgaaagctttatttccggcaccggctttgcccgccgctacggcgaacaggcgcctgcggaagcgattatcgccgccgcgcaaaacggcgaaccgcaggcgctggcccactggcggcattttattgacgctttcgcccgcagcctggcctcggtaatcaatatcctcgatccgcaggtgattgtgttgggcggcgggctctccaacgtcgggcaaatctacgagcagctgccgtcggccatcgtcccgtatctcttttccgacagctgccgaacgcagatcaaaaaggcgcgcttcggcgacgccagcggcgtgcgcggcgcggcctggctgccggttctggccgctgctgaaggcccccgccggtag

SEQ ID NO: 173656 - DNA, 963 bp, Klebsiella oxytoca
atgccaaccattgatgatgtttcaagattagcgaatgtctcccgagcgacggtatcccgcgtgctgaccggcacccggggcgtgcgcgaagagagccgggaagcggtgctgcgcgcggtagaagaacttaactaccgcccgagctttgccgcgcaaaacctcgccagtcaaacatccaatcacgtggggctggtgatcccggcaaacgatgaaagcagcggcgcgcgcctgctgccgatgctttcattagcgctgaaggggctgaataagaacctgattgttcagtacgtcacggatgcggcggaacaggcagcggtcgtcgatgatctacagcgtcagtgcgtggcggtagtggtactcggcgccgtcccggcggatgcgccgcgcaacgtgatctcttttgaccgtttcagcattgccggggtcaataatcagggctatgactacgcttttgctaccgaaagcgcctgccgctacgtgatcggcaaaggccatcgcaatatcgctctgcttattgatagcgacagcgatgacgccagccgccagatgctcgaaggctatcgcaacgtcctgcaaaactactccatcccttttaaccggcagctgatgctggcggccaacgacaacgttgaacaggcgctgctgacgctgatcaacagcttcagcaaatactcggtgattatcgtgaaacgcgaccgctacgccgccgaagcgatgcgcctgctgcgcgaattcaacatcgccgtaccgcaggaggtttcgctgctgagcctggaggattctcccctcgcctcgctgctgaatccgccgctgacctgtatctcctggccgctggagcagctgatggagaactgcctgcagcgtatccgcaacctgattgacgagcgccccgccttctctcccgaagggcgcacgctggcgggccgcctgatcccccgccagtcggtggccgatctctcctga

SEQ ID NO: 173657 - DNA, 918 bp, Klebsiella oxytoca
atgctgcacctgccacctttgaagcatctgatgtttgccgcgactctggcgctgctggccgtcgcccccgtccaggccaaagagaaatttaaagtgattaccaccttcacggtgatcgccgacatggcgcaaaacgtcgcgggcgacgccgccgacgtcagctccatcaccaaaccgggggccgagatccatgaatatcagccgacccccggggatatcaaacgcgcgcagggtgcgcagctcatcctcgccaacggcctgaatcttgaactgtggttcgcccgcttctatcagcacttaaacggcgtaccggaagtggtggtcagtaacggcattcagccgatgggcatcagcgaagggccgtataacggcaaacccaacccgcacgcgtggatgtcggcggacaacgcgctgatctatgtcgataatattcgcgacgcgctggtgaaatacgatcctgcaaacgccaacgcctatcgccacaacgccgaagcatacaaagagaagatccgtcagaccatggcgccgctgaaggcggaactggcgaagctgccgcaggataagcgctggctggtgaccagcgagggcgcgttttcttacctggcccgcgataacggcctgcaggagctctatctgtggccgatcaacgccgaccagcagggtaccccgcagcaggtgcgcaaaaccatcgacaccatgaagaaagagcgcatcccgaccatttttagcgaaagcaccatttccgataaaccggcgcgtcaggtggcccgggaagccggcgcccactacggcggcgtcctgtacgtcgactccctgagtaccgccgatggcccggtgccgacctacctcgacctgctgcgcgttacgacccaaaccatcgtccagggcatcaacgacggactaaggaaacaggcatga

SEQ ID NO: 173658 - DNA, 822 bp, Klebsiella oxytoca
atgagccatgagcagccgggcctcgcggtcaacaacgtcagcgtcacctaccgcaacggccacaccgcgctgcgcgatgcctcgttctgcgtcccgcgcagctctatcgccgcgctggtcggcgtgaacggctcgggaaaatcgacgctgtttaaagcgctgatgggctttgtgcgcgtcggaaagggcgatattgcgattctcggtcagccggttaatcgcgctctgcggcagaatctcgtcgcctacgttccgcaggcggaagaggtggactggtccttcccggtactggtggaggatgtggtaatgatggggcgctacggccatatgggctggctgcggcgggccaaaccgcgtgaccatgagattgtcgacgccgccctggcgcgggtcggcatgagcgagtaccgccatcgccagatcggcgaactctccggcggccagaaaaaacgcgtctttctggcccgcgctatcgctcagcagggaaaagtcatcctgctggatgaaccctttaccggcgtcgacgtgcagaccgaagcgcgcatcatcgagctgctgcgggaactgcgcgacgaaggctgcaccatgctggtttccactcacaacctcggttcggtaagcgaattctgcgactacacggtgatggtcaaaggtaccgtgctggccagcggcccgacggaaagcacctttaccgctgaaaacctcgagctggcgtttagcggcgtgctgcgccacgtggtgctgagcggcgcggaagagcggattattaccgacgatgagcggccatttatcagccgccgggcggcggggggcgaaagatga

SEQ ID NO: 173659 - DNA, 849 bp, Klebsiella oxytoca
atgagctggctgctggagccgtttagttatcactatatgctgaatgcgatgtgggtttcggccctggtaggcggggtgtgcgcatttctctcttgctacttgatgctcaaaggctggtcgctgattggcgacgccctctcccactccattgtccccggcgtggcgggcgcttatatgctcggtctgccctttgcgctgggggcgtttctttccggcgggctggccgcgggcagcatgctgtttcttaaccagcgctcgaagctgaaggaagacgcgattatcggcctgatcttctcctcttttttcggtattggcctgtttatggtgtcgctgaatccgacctcggtgaatatccagaccattattctcggcaatattctggcaattgccccggaggatattattcagttggcggcgattggctttatttcgatggcgattctgctgctgaagtggaaagacctgatggtgacctttttcgatgaaagccacgctcgttcgattggcctcaacaccagcgggttaaagctgctgttctttaccctgctggcggcctgtaccgtggcggcgctgcaaaccgtcggcgcgtttctggtgatttgtctggtagtgacgcccggtgccaccgcctggctgttgaccgatcgcttcccgcgcttgctggcgattgccgttgcgattggcagcctgaccagctttttcggcgcctggctgagctactatctggacggggcgaccggcgggattatcgtcgtcgcccagacgctgctgtttttagccgcttttgttttcgcgccgaagcacggcctgctcgccagccgtcgccgcgccagggaggcctcatgctga

SEQ ID NO: 173660 - DNA, 855 bp, Klebsiella oxytoca
atgctgagcgcgctgattgaacctttccagttctcctttatggtcaacgccatgctggtggcggcgatcgttgccgtcccctgcgcgctgctgtcggtctttttggtgctcaaaggctgggcgctgatgggcgatgccatgagccacgcggtttttccgggggtagtggtagcgtatatcctcggtatccccttcgccatcggcgcgtttatcgccgggttattctgcgccatcgccaccggctatctcgacgataacagccgcattaaacgcgatacgatcatgggcatcgtgttttccgggatgtttggcgcgggcctggtgctgtacgtgtcgattcagtcggaggtgcatctcgatcatattctgtttggcgatatgctgggaatttccgccggcgatattgcgcaaacgtcgctgatcgcactgggaatagcactaattatcgggtttaagtggcgtgattttctgctgcacgcctttgacccgcagcaagcgaaggccagcggattgcactgcgggctgctgcattatgggctactgtgcatgattgcgctgaccatcgtggcgacgctgaaagcggtggggatcattttgtcgatttcgctgctgatagcgccgggggcgatcgctctgctgctgacgcgacgttttgtcagcgccctgctgctggcggtggcgatagcgttaagctgttcgctgggcggcgtgtggctgtcgttttatctcgacagcgccccggcgccgaccattgtggtgctgtttaccgtcctgttcgttatcgcgtttgtctggacgtcggttcgcgatagtcagaccacagcccgttccggcgaggccccgggtcgcggctga

SEQ ID NO: 173661 - DNA, 351 bp, Klebsiella oxytoca
atggcgggcaaacgtattgcgcgggaaaaaaagaccattagcagcatgatcgcgctctaccagcgccgctgcccggaggcccgtgacgataccgaacactatcaggcgctcaacgcctatgccgacaagcggctggataggtgcgtatttggcgaagaaaagccggcctgcaagcagtgcccggtgcactgctatcagcccgcgaaacgcgaagagatgaagcagattatgcgctgggcggggccgaggatgctctggcggcatccgatcctgacgattcgccacctgatcgatgataaacgcccggtgccggagttaccggaaaagtatcgacccaaaaagccgcaataa

SEQ ID NO: 173662 - DNA, 285 bp, Klebsiella oxytoca
atgagccacaaagccgcgattaccattacctactgttcgcagtgcaactggatgctgcgcgccagctggatggcccaggagctgctgcacagctttagcaccgacatcgcttcggtcacgctggtgccggggaccggcgggatcttcgtggtcgccgttgatgatgtgcaaatctgggagcgcaagcaggacggaggtttccccgatgcggcggagctcaagcgccgggtacgcgatgtatgcttcccggaaaaaccgctggggcacctggacaagccggcataa

SEQ ID NO: 173663 - DNA, 2370 bp, Klebsiella oxytoca
atgtataactccactcaatcaacagcatggttcaagaaaagcctgctggtgacttctttgcttacagcaatttatcagacttccgccggggcggctgataccaccgcgaaaaccaccagcagcgcatcgactgatgacagctcggaacggatgaccgttaccgcgccggcgccgttgctgaaagcgggcagcgaacattcgatcagcgctcaggagctgcaggataaaggggccaacgactttggctcgatcatgcgctacgagccgctgattagcgccaccggcgccagcggcggttccggcaacggcaaaagcggcttcgaccgcggcggctataccggctacaatattcgcggcatggagagcaaccgcgtcgggatcgacgtcgacggcattgcccagccgaacgccaccggacgcagctacgccagccgcgcgggcctcaataccttcggtatgggtcgcgactatattgacccctatatgtacggcagcattgatattcagtccggggcgacatcaacagaaaccgccaacagcgccatcggcggcaacgtctctttccgtccgaaatctgcggatgactatctgcatccgggcaaaaccagcgccttcggctaccgcagcggctacgactcatccgatcgcagctggcacaacggcgtcaccgttgccggcggcgacgagaccctgcgcgggatcttcgtctacagccgtcgcgacggtcaggagacggaaaataacagcgggaccgttgattcctatccggcaaactggcactcggacgcctttatggcctccgggatctggcagcccaatgacgagcataagttcaccagcaccttcgattattaccataaaacgaaccacacccattacgacgcctgggactccagcggcaacagcgttatcggcacgtcaaaccagaccagtcagacccgtcgctggggcctgagcctgaaagatgactggacgccgatgaatgattatatcgacagcgtatcgactaaagtctactaccagcataccgaggcccacgactggacctatatgccggacagcatcacccgtgcgatgcaaacggtgagctccgactatgacaccgacgcctggggtattcagagcgcgctggcaaaatcaattggccgccacgatctgagcgccggttttaacgccagcacgacgaaaacccagcggccgttaacccagtcgccaaccccaagcgcttatagccagattatgcagccggacgccgatagccgcggctatatcgttgcgggcttcctgcaggacaaaattaacttcgatctcgacggccataacttcgcggtgatcccgggcattcgtgtgatgcatcagtcgaccaaaccggaaaacgtctccgatttggccaacaacagcagcgtactgaccggttccgacgtgtcaaatctgtacggtaagaacgctgatactcaggcgctgccgtcgctggtcttgcagtacgatatcactccgcgcctgatgacttatctgcagtatcagcgcggcgcgcagttccctaacgccagccagctgtacggttcctggaacctcggctccagctacgccggacgcgcccagtatgcgctgatcggcaacaccgatttgaaaaccgaaaccagcgataacgttgagtgggggatgaaaggcgaagtgacggaaggcatcaccatgcgcaccgcgctgttctataacacctataagaactttatcgcctatacccgctacacccgcgccaataacccgctgcagttcgccagcgttccgtcgaacatctacaccatttaccaggcggaaaaccgcgataaagcctatatctacggcggcgaaatcagcgctaaattcaactttggcacctggtttgaagaggttaacggcctgagcgccactctcgcttacggctatagcgaggggcaatcgaaatccagctacagcggcgacaagtacgttgacctcgatagcgtcgcgccaatgaaggctatcgtcggcgtggcgtgggacgatccggcaaaagtgtacggcaccgcgctgaccgccacctttgttaagggcaagcgcgccaccgccaccaaccgtgaaagctataccaacaccggttccgccattaccgattcgaccaacgaatatatgcgcgttccgggctacggcatgctggactggaccgcgtactggcaggtcgcgaagaacgtgcgcctgaacggcggcgtttacaacattaccgatcgtaaatactgggattatctgagcagccgcaatatcgaaacggcgacgaatcaggacgccaacgacagagcgctggcggtgatgcctggccgtacctggcagttgggcgtgaacgtcgatttctga

SEQ ID NO: 173664 - DNA, 1041 bp, Klebsiella oxytoca
atgcaaaacacccaaccgcaacatgccccgctgtggcaacgctacctgaccacgaaagcgcaatcttccgcgaaatacgcccgcgatatcgctgccgaaatggggattagcgaagcggagctgaccgaagcccgcctgggctacgacgccgtacgtctgcagaacgacgcccgcgccatcctgacggcactggaagccgtgggggaaaccaaatgcatctgtcgcaacgaatacgcggtgcatgaacaggtcggcgaatttacccatcagcatttaagcggccacgccggactggtgctaaatccgcgcgccctcgacctgcgcctgtttctgagccagtgggccagcgcttttcgcctgaacgacaacggccgccagagcatccagttctttgatccgcacggcgacgcgctgctcaaggtttacaccactgaaaataccgacatggcggcctgggatgcgctgattgtcgcgcagacgcagcaatcgcctgacccgctggcgattcgcccggccgatccgctgaaatttgccgactccgccgacggcgaggcgctggaaaacgaatggcgcgccatgaccgacgtccaccagttcttcggcctgctgagaaaatataacctgtcgcgccagcaggctttccgcctggtcagcgacgacctcgcctgccgcattgacaaccagacgctgccgggcctgctggaaaccatccgccaggacggcaacgagatcatgatttttgtcggcaaccgcggctgcgtgcagatcttcaccggcgcgctggaaaaagtcgctccgatgcgcggctggctgaatatcttcaacaccgcttttaccctgcatctgcgcgaggagagcgtggatgaaatctgggtgacccgcaaaccgacctctgacggccacgtcaccagcgtcgagctgttcgccaaagacggcacgcagatcgcacagctgttcggtcaacgcagcgaaggccatccggagcagacgcagtggcgtgcgcaggtcgatcgtttgactaccgaaggactcatcgcatga

SEQ ID NO: 173665 - DNA, 819 bp, Klebsiella oxytoca
atgaagcgctggctgatattgcttgcggcgctcccgctgttggccagcgccgccgccgagcgcattgtgtcactcggcggcgacgtcacggaggtggtttacgccctcaacgcccagcggcagctggtggcgaaagacagcaccagcacctggcctgccgccgcgcagagcctgccggatgtgggttatatccgccagctgaatgccgagggcatcctctccctgcgcccgacgctggtgctggccagcgcccaggcgcagccctcgctggtgctgaaaaaggtggcagagaataaggttaaggtcgtcaacgtgccgggcggctacgaccttccggcaatcgaagcaaaaattgacgtgattgccgacgccctcggtaagcagagcgaaggaaaagctctgcgccacaagcttcttcagcagatcgcgcaaattccttcccagcctgtaaacaagcgggtgctgtttatcctcagccacggcggcatgaataccatggtggccgggaaacaaaccgcagcggatggggcaatcagggcggccgggttagagaatgccatgcaaagcttcgaccattatcgcagcatgtcgcaggagggcgttatcgccagtaaaccggacctggtggtgatctccgccgatgggctgaaaggcatgggcggcgaagccgggctctggaaactgccgggactggcgcagacgccagcggggcgcaataagcaggtgctggtgatagatgatatggccctgctcggctttggcccgcgtaccccgcaggcggtgctcgcgttacggcaaaaagcggagcatctgccctga

SEQ ID NO: 173666 - DNA, 996 bp, Klebsiella oxytoca
atgcgcacccaccctgcccgtcatctgtggttaatgacgctgctgctgattgtcctgacgctgctcgccacgaccctgggcgcaatgcgcctgccattagccagcctgttgccctccggcgatgaaatcctgaggagtatctggctgaccattcgtttgccgcgagtgctgctggcgctgctggtcggcgccgcgctggcgctttccggctgcgtgatgcaggggctgtttcgcaaccctctcgccgaccccgggctgctaggcattagtagcggcgcggcgctggcggtcgcctgctggctggtactgcccctgtcggtgccggcgctcgtggcgctgtacgccccgatgctggcggcgtttatcggcagtatggcggtgatggtggtaatttttattctcagccgggcgggcgacgcctcgctttcgcgcctgctgctggtcggcatcgccattaatgccctgtgcggcgcgctggtcggggtactttcgtggatcagcaatgatacccagctgcgccagctttccctctgggggatgggcagcctcgggcaagcggaatggtcgacgctgctggtggccgccacgctgatgatcccggcctcgctggtggtgtgggcgatggcttcgcggctcaacctgctgcagctgggcgatgaagaggcgcactatctcggcgtcaacgttcgcgccctgcagcggctgctgctgctgtgcagcgcattgctggtggcgtcggcggtggccatcagcggcattatcggttttatcggactggtggtgccgcatttgatgcggatgtggctggggccggaccaccgcggcctggtccccggttcgctactgtgcggcgcaatgttgctgctgctggccgacacgctggcgcgcaccgttgccgctcctgcggagatgccggtcgggctgttgaccagcgtactcggcgcgccgtggtttctgtggctgatttttcgtcgggagaaaggggctcatggataa

SEQ ID NO: 173667 - DNA, 780 bp, Klebsiella oxytoca
atggataaccgctatagcgcgcgttcgctttcgctgcgtctgagtaaccggcagattattcatgatgtttcgctccagctttacggcggcgagatgacggcattgattggccccaacggcgccggtaaatcgaccctgctgcgcctgttgaccggttatttaacgcccgacgagggccaacgggtggtggaaggccgaccgctggagagctggtcggcagaaacgctttcgcgccgccgggcggtgatgctgcaacgcacccagttgcacgcagactggccgatagaaacgattatcgctatggggcgctcgccgtggggcggcgcgataaaccaggagatgatctgccaggtaatgaaagagaccgggtgcgatcatctggccggaagacgctaccctaccctctccggcggcgagcagcagcgggtgcagctggcccgctgcctggcgcagctttggcgcgacggcgcccccgagggctggctgttccttgatgaacccacttcggcgctggatctctattaccagcagcacctgctgcgcctgctcaaacgcctgacccgcagccgccgcctgcacgtctgcgtggtactgcacgatctgaacctcgcagcgctatgggccgatcggattctgctgctgcatcaggggaaactggtggctcagggcacgccgcaggaggtgatccagcagccgattatcagccgctggtacggcgcggaggtcagcacgggcaaacatcccgatgcggccgttccgcaggtgtatctggcgccgtga

SEQ ID NO: 173668 - DNA, 1152 bp, Klebsiella oxytoca
atggcttacagaatgattttaaacgaaacctcttattttggcccaggttcgattcgttgtatcgtagatgaagttaaaaaacgcggcttcaaaaaagcgctggtggtcacggataaggatctgattcgttttgatgtagcaaccagggtgttcgctatcctcgacggcgccggattgccctacagcgtctttgatgaagtggtcccgaatcccacgattgaggttgtgcagcagggcgtagaggcgtttaaacagtcaggcgccgactacctgatcgcgatcggcggcggctcgccgcaggatacctgtaaggcaataggcattatcattaataaccccgaatttgccgacgttcgcagtctcgaaggcggggcggatacgaaaaacgccgccgtaccgatgattgccatcccaacgaccgccggtaccgcggcggaagtcaccatcaactacgtaataaccgacgtacagaatcgccgcaagtttgtttgctacgacccgcatgatatcccggtggtagcgatcatcgacgccgaaatgatgagcagcatgcctgccagcctgaaggcggccaccggcgttgatgccctgacccacgccattgaaggctatatcactaaaggcgcatgggaattaaccgacatgctgcatctgaaggccatcgaggtgattggccgctcgctgcgcgcttccgtacagggcgacgcacagggcgcggaagggatggcgctggggcaatatattgccgggatgggtttctccaacgtcggtctggggctggttcatggtatggctcatccgctgggcgctttttacggcacgccgcacggcgtggctaatgcggtgctgctgccgcatattatggcttataacgccgaatttaccggcgagaagtatcgagacatcgcggttgcgcttggtaacaagtcggcggcaaccctgccgattgccgaagcgcgtgccgcggcaattgaggcggtggcgcagctaaatcgcgacgtcaatattccggcgcgcctgcgcgacgtgggaatgaaagaagaagatattgatgctctggccgccgcggccctggcggacgtgtgtaccggcggcaacccgcgcgataccaatctggaagagattaaagcgctctatcggcagatcttctaa

SEQ ID NO: 173669 - DNA, 321 bp, Klebsiella oxytoca
atgaagattgcaatttcacccagtacgccagattcacatcatggttcgctaaccgcagttgagagtttaagaacattgatgaccacaatgggcatcaataaattctccggggtgaacgtaccagagcaggagtatattctttatgtattgaaagaacatgagcctgaggggttacttactcgtgagttagcggacaggtgcgaaatgtcaatatataaggtcagacatttactactgccgttagagaagtatggtcaggtgatcagaataaaggttaacaaacatcataagtggtatttttataataaacatattgactaa

SEQ ID NO: 173670 - DNA, 741 bp, Klebsiella oxytoca
atgcggttcgatatagagggatttattacatttgatactgaggaggcctctctggtcaatctcttgaccggcgattgtattgaactctccgccacttcgactcgccttcttactagtctgttgcaataccggggggatattatttcgcgggttgatattttccagacggtgtttgaaaaatatggtgcgaggccatctaatagtaatcttaatcagtacatctcaacgctgcgtcgcagccttgcggatctgggtattgaaaagaatgtgattattacggtaccgcgaattggctttaaaatttctgaggatgtcattatcactaccgacaatgattactcttcctctatcacactgccaaccctttctccacagctgcctgagcgtaacttgctgcaacaacattgcaaagcggcgatgttactgatcgcgttcgcagcagtcgcgatgctgctctcttatttttttatctataaaaaacaaacagctaagctcatgttcacccaagataaatgcactatttatggttccgaagctatcccggtgacagaaatactcaggaataaaaagctctttacctcggggctggactgttccacgccaaagaaaatctacttctttaaccgacaaatgaatcaggagcagggattaggtatttacatggatatcttcatgcttgagtgcgacattaaagaccagcaatgctatagttattactataaggaaataaaaaatgcgtaa

SEQ ID NO: 173671 - DNA, 489 bp, Klebsiella oxytoca
atgcgtaaatatgccttgatattttccgcctgttcgttcgcgctgatactattttcaaccctgtacctaaacttcagttctgaggactcattttcctgtgaatcacgctacgatttgacggagaatataaatgagaacattcttcgctcccaaggattgctatccgcagaacttttcaaaaaccatcttttaatcaatctggagggtttactcaccagcaatggcgataaatatatcgtctcacgcactatcgccatcacattaaaaagaaacatcgttcccagccatcttttttatataaaagactcgcaagtcattcgccaccacgctgataatacgccagaagatattgcgcaaaaaaatctctttggaagccgaactaatgataaaatcatctatataaatcacgtcaatgatgatactattttgttaggcacccaaaagtttccacaatatggttgtcgccgtcagaaaaccatcattgattga

SEQ ID NO: 173672 - DNA, 1197 bp, Klebsiella oxytoca
atgacgatacatttacttccgacattagccagcatcgccaatatcattgatatgattaacccccggctgaacctgcaccatgtcagaacggcgtttatcgcatcacatctggctaatttagtggagttctctccggcccagcggcgtaaaaccattctggcggcgctaattcacgatgtcggtgggttaaatgaaaaatcacgtcttgagccgctaaattacatcgataacgagcataacaaccacgcgcttatcggcagcgaattgcttagccgcatcccgttgtttcgtcctcttaacaggattgttcgctatcatcacacccactggcgcaacggtcttggacattatattgaaggagaactggtccccgaagagagtcacctgctgttcttcgccgaccggctggatgtactttattgccagcaccgtaccagtcatatcgcatttttaagcaaaaagctggtcgacatcgtcgccgccggggcgaatattctctataaacaagagtacgtccaggcgttcagaacgctttccgccgatgaacatttctggtcagtcatggcctccaccgactatcgcgattacatcaaagcgattcctggcgtgcataacgataccatctctttacataacctccgcgatattgctgaactggtctcttttattgtcgatcagttcagccagcagacgccgtggcactccgcggccgtcggccatattgccggctatctggcgaccaccatggaaatgagcgcgacgcaaacgctaaaagttgagattggcggattgctgcataatatctcctgcctggatcatagcccgccgccagcgagatccgcttcgccaggcagagcagaagcctctctctatagtattgaaggaattgatgatattactgaatggatagccatgcaaaatcgtaatgcgtcctctaaatggcacgctgaatcgctacaaacggaagccctgctcattacggttagtcgactgctggtccatgccctgagcgggccgaagggagaagaaaaatcgctggcccagttaattaaaaataacccgggaaatgaaattccctcgtttatgctgtcgcctatcgcgcagcacgcttcacaaattattcagatctatcgcgcaactgcgggagaaataaaagagctggtgaatcgcgttgagcaactcaccagctccgcgtaa

SEQ ID NO: 173673 - DNA, 732 bp, Klebsiella oxytoca
atggcgcaaaaatgggtgctgattaccggcggcagccgggggataggccgggcgctggtcgccggcctggcgcaaaacgggaacgtggtgtttaccgggcgcaatgaagcggcgattaacgccactctggcggagtgtgaaaattcatcgtatcaggtgcaaggatacgcctgcgacggcaacgacgagtcgcgggttgaagaacttgctcaggcgctgctggccgagcggggcgcaccggaggcaattattcacaatgccggaatggctcgcgatggcctgcatattcaccagaacgccgcgctatggcgcgaggtgctggacaccaacgttatctcaatgatgaactggaaccggattctgctgccggcgatgttgatgcagcggcgcggctccatcgtgatgatgtcctcggtcagcgccttcaagggtaacgtcgggcagacggcgtatgcggcgagtaaagcggcgatgagcggcattgcgcgttcgctggcgctggaggtcgggcgcttcggcattcgggtaaactgcctggcgccgggcctgatccgcacggagatgctggaagagatacccgcgcaaaaattgaaagagatgcgccagtcgatacctctgcgcaggttgggcgaaacggatgatgtactgaaggccgtggcgtttttaatcggcgaggggagtgaatatatgaccggacaaactctgattctggacggcggattaagcgcctga

SEQ ID NO: 173674 - DNA, 252 bp, Klebsiella oxytoca
atgattgcctatgatgaagttctgcaaaaagtgtgtgaaatgatttgtgacgccaaggacctggagccggatgaggtggatgagaatacgccgctggttcgcttaaagttagatagtctggactacgtcgagctgatggtgctggcaaaacgtgaattcaatattaccctggaagcggactggtttattcaaaatccggggatcacgctgggtgaactgtgtcagcacatcagcaaagagtcaggcagctga

SEQ ID NO: 173675 - DNA, 795 bp, Klebsiella oxytoca
gtgacgctgctgcgctacacccttgccgatgcgcagcagtgggcggcgttttccggcgatgaaaaccccattcacttcgactacgcggcagcgcgcgcgatgggggcggggcagctgagcgtccacggaatgcgcgcgctgctggacgtgaagcgcgatgcccagtcgcggctgtgccgcccggagggatacgtaaaatgccaggtccgtctgcgcaggccgctatggtgcgataccgactggctgttaacgcccgggacggcgaaacagcggattctctccgccgcatcggttagccatccgcagaatggcgaaatctgtttgtcatgccagatgagcctggcggctgagccggaatcgctggagggtaagcagcccagcaaactggcgtccacgacgctgcttgcgctgcaatcccatttcaaccgcgcctggcccgacctggcgcagtggcagttccttgatgcgctgctgttccgtcagctgatttgtgatgaggcgctgctgcgccaggagaatattgccgccctgctcggaccgggggaaacctcgctgcagcaaattttttcccgctacccggtgctgcaaacccatcaggaagtggtttttgatgctcatctggcaggcaaagggacgccggtccaacccggctcgctgtcgctctggctgttgccttcattggtggtcggccaggctgagcagggcgcgctggtgcgtattgcagcggcggcgcagctggatgatcaggtcataacgaatgtgattacgctaaaagttggcccagttaacaattga

SEQ ID NO: 173676 - DNA, 1254 bp, Klebsiella oxytoca
atgagtcacagtaaacccccttatcgcgtggtgataaccggctatggcgcggtgactccccttggcgatagcgctgccgaaagctggcaggcgatcatggattatcgacgcggttaccgctatgtggatctctccgctaacggcatccacacccattttatcggtcaggtagagaatgaacccagcctcaagggggttcccgccgctattcgtcggcgtctgccgcgtcacgctcgcctggcgctggccgccgcgcgggaggcggtggcgatggcctttgctggcaaaccacccaccgatgcttatgacccgctgaggtgtggcgccattatcggctccggctgggcagggctggatgaaagctatctggcggtaccggagtttgagaaaacgggcgtctcttcgcccttcagctgcttcttttcgatgccgaacgtgaccaccgcggcctgtagtcagctgtggaatctgcgcggttatcaaaatactccggtcgccgcctgcgccaccggcactatcgccattggcgaggcctatgatgcgattcgctttggccgggccagcatgatgctcgccggggccggggagtcgttaaacagcgtttgcgctatctggaatatcgatgtgcttggcgcgttgagccgggaagcgtcatcgccggagcgggccagctgcccgttcagcctgcagcgctgcgggtttgtcctttctgaaggcggcgcggtgctgtgcctggaagagcgcgaaagcgccctggcgcggggcgcgacaatcctcgcggaggtcaccggttatgccaatttctccgatgcggtggattttacctcaccggccgaagactgcgtggcacgtgaacagactatccgctgggcgctgcgcgacgcgggcctgcagcctgccgatctcgattatatcaacgctcacggcacctccacaccgctcaacgatatgaatgaaacgcagtcgctgaaaaaagcgctcggcgacgaggcgtaccggatcccggtctccagtaccaaagcctactccggacatctgatcgccgccgcggggagcttcgagaccattgtttgcctgcaggcgatggcggcggggatcatgccggcgacggcgcatctgacgcagcccgatccgcagtgcgatctcgactatatcgctgaagggcatcgtcaaggagagatccgtcgggcgctgaatctgagctttggtttcggcggcgcgaacgccgcgctggtactggagaaacacgcgtga

SEQ ID NO: 173677 - DNA, 1398 bp, Klebsiella oxytoca
atgagatcgctgactttattatcgttaattgtattgctgacgggctgtggaaatttgacccgcagcgattatcagcggccgctgctgtcggtgccggagaactggcagcgaacggaagggcaaagcgccgcgcttgcgtcggagaaagtgggtcgctggtgggaccgtttcgacgatgaacgtctgtcgcgggtgatggggcaggttctggaaagcaataacgatctggccgctgccgccttaacccttcggcaggcgcgcatttccgccgggctggcccgaaccaatatctctcccgacgcgacgcttaacggtgccggcagtaactcaaagccgctcaatagcggaggttcgcaggagagctatagcgcctcgttatccctgagctatgagctggatctgtggggcaagctggcgcgggttcgtgaacagagcgagtgggaggcgattgccagcgaacaggactatcgggcgacgatcctgtcgacgattgatactaccgcgcagctctactggaatatcgcgctgctgaatcaacaaatggcttatcaggccgccagcctggatatcgccaggcagacgctggcgcagattgagtcctggcagcgggcggggaaagtagggctgcttgacgttctgcagtcccggcagacggtcatcagtcgccagaatcagttgctaagcctgaaacagcagcgggcgatctcccgcaacgcgctggcgctgctgctcaacaggccccccgcgcagcatagcgatgaagcaccggcgcttgacgtccatcagcgtgtcgccattgccagcgccacgccgctggccgcgctcgccagccggcccgatctgcaggcggcggagtcgcggctgcgcgcggcgctggcgggttccgatgcggcgcggctgagcttttatcccacgctctcgctgcaggggacgctgagcgccggcagccagatctttcaccagtggtttaacgacccgctgcgtaccgtcggaagcagcgtcggcgcgccctttatccagtggaacacggtacagcttaccgtggagcaggccagcgtaaaggtgcagcaggaggcggtgaacttccgccgtacggcctacaccgcgctgtcggaggtggacgatgcgatggaaaagcggcttaacgccgacgagcagcgcgtgcgcctgctgcaatcgctgcagctgggccagcggcgcctgacgctcaccgaaagccgctatcgggcgggcgcggtggactaccagaccctgctgaacgcacaggacgcgctgctcgacgtacagaacagcctggcgcagaaccagtacgactatctttatgccactttgcagctttggctggcgcagggaggcaataacccgcaacagaggatttcccagaatgagtcacagtaa

SEQ ID NO: 173678 - DNA, 1944 bp, Klebsiella oxytoca
atggctgagccgctgatcgtgctgaacaatgtcacgcgtcattttaccgccgggacgcagattattccggtactaaaatccgtctctctgaccattatgcccggcgaaatggtggcgattatgggcgcttccggctcgggtaaatcgacgttgatgaacattattggttgcctggataagcccagcagcggcgaggtttatatcaacgggatccccactcaccgggcggatagcgcggcgctggccgagctgcgcagccgctggctggggtttatttttcagcgctaccacctgatgccttatctgacggcggaagagaatatcgccatccccgcgctctataccgcgatgcccgccgctgaacgccaggcgcgcattgcgctactggctgaaaagctgggcattgatgcgcggttacagcacaaacccgctcagctttccggcggccagcagcagcgggtcagcgtctgccgggcgttaatcaacggcgcgcagattattctcgccgatgagcccaccggggcgttggatagcgtcagcggtcgggcgctgatggatgttctgcaccagctgaacgccgacgggcacacggtcatcatcgtgactcacgatcgcgaggtggcgcggcaggcgcagcggatcgtcgagatcagcgacggacaggtggttgccgacagtacccacggcgttcgtgataatcgcggcattcagcgccttcccgcagtacaggataatggtcgggcctcgctgtcgcgcagtatcggagagtcggtgcggatggcctggcgttccttactgggacatcggatgcgcgcctttctgtcgatgctggggataatcatcggcatttcgtccgtggtctcctccatggcggtgggggaaggcgcccggcagagcatcatgaacgagattggtaagctcggaaataccacgcttgaaatccgcccgggtaccggctggggcagcaagcgtccggatatggagcgggcgctgtcgctggatgatatcgccagcctcggcaggcagccctgggttctgggggtatcgccgattgtttccagcatgaccaccgcggtacgtcagggctttgattcttcgataattctctccggcgtttccgcagactacttttcgctgcaggggattcgttttattcagggcaacggttttacccgccgcgatgtcgaggatcgcgaaccggtgctggtactggatgaaaccagcagggagacgctgtttcccggcaatgaagatccgctgggtaaaattgtgcagattgccggcgcgccgtggcgggtaatcggcattgccagcaagcccgggccaaaggtggtcagcgggtttatgtcggcgtggatcccctatagttcgctattgcagcggatttccggcgataagccgctggaggcgctgacgctgcgcttccaggaaacgctgtcgccgcaggaagcagcgcggcgcgcggaaaggcaccttatccgcgagcacggcaaaaaagatttctttgtccagaccgatgagcagctcgccaaagcgctgcaaaaaacctccgactccatgtcgctactgatcaccgctattgccgccatctcgctgctggtcggcggcgtgggggtgatgaatatcatgctggtttccgttaccgaacgcactcatgagattggcattcggctatcggtcggcgcccgccctactgacatcatgcatcagtttttaattgaggcggtgatgatctgcgcgctcggcggcttaacgggagtgctgggctcatgggccgccggtaacctgtttgccctgttgacgcaggagttttccatggtctttacctggctgccggtggcgatggcctgcggcttttccgccctgataggcctgacgttcggctatttcccggcgcgtcgtgcggcgcggctaaacccgacggaggcgctggcccgcgaatga

SEQ ID NO: 173679 - DNA, 1161 bp, Klebsiella oxytoca
atgaggcgacaatttttacgccgccgtaaagcgtggctacttgcgctggtcgcgatcctggccattatcgccaccgttttttatcagcgctcgcttccggcccaggccgagtcgctctacaccgttgcgctcgatcgcggggatatcgaaaaagtagtgctggcgagcgggactattaaacctgccgtccaggtgagcgtcggcgcgcaggtcagcggccagctacgtaagctgtacgtgcgccagggcgagcgggtacgtaaggggcagctgttagccgaaattgacccgacgctgcagctttccgatttacgcaacgccaccgcgcagctggccagcgccagggcgcaaaagctggcttccgaggccacgctggtacagtaccgcaaagcgctggcgcgcgagcaggcgatgcagcgcgatggttcgggagtgaggagcgatcttgagcaggcgcaggcgcagtatagcgcgcaggtccagcagattgcggttaacgaagcgcagatcgtacaggcggaaatgagcgtgcagaccgccaacgccaacctcggctacacccgcatccttgctcctgtggatggtgaagtgctgggcatcgtcacccgtgaggggcaaaccatcgtctcctcacaaatcgcgccgacgattctggtgcttgccgacctagataaaatgcaggtgcaaacgcgcatttccgaagccgatattcagaaaatccatcccggtcagccgctgtggttttacgtcatcgccgatccgcagacgcgctatgaaggggagctgggctacgtccagcccgcgccgcaggaggcgctggaggaacaaaacggcggagcttctgccggtaatcagcagagcagcgccatttactataacggtaccttcgaagtcgataaccaccagcgcttgctgaaaacctcaatgaccgcccaggtgtttatccgtatcgcgcaggtaaaagacgcgctgcgcgtgccggtcgccgcgctggggcgttcgctcggtgatgagcgttacattgtgatggtgcaaacggcgaacggtagcgaggagcgcaccgtccgtatcgggattaacgatcgtcagtacgcgcaggtgctggaaggattacggcccgatgagcgggtggtgatcccgcaggacgcggggtctgtgtga

SEQ ID NO: 173680 - DNA, 2112 bp, Klebsiella oxytoca
atgaaaaagattatccctgatatggtttttcaggaagagaccaatgaatgcggcctctcctgtattgcgatgctggcgcagacccagaatattccgtgctctctcccggcattgcgggaaattttccccgcatccgatcatgggacatcgttgagcgatctatccgttatcctgcaacaggtcggcattgccaccgcgccggtgttgtttgaccacgatgaacttcatgcgctgccgttcccttccattctgcactatggcgccagccactatgtcctgctggcctggcgcaaaggggattacgtttgcgtgatgaatccggcgattggccagcagtggctgcctttctcggcattaaaaaaagagattagcggctatgcgctgatcctcgaagaatctcccggcgcgatcgccagtccggatccggttattgccggggcgcagcaggagatgccgcgcgcgatgagcctgaaggagaccgcggcggtaccgggtatttataaactgatgctattaacctttctggtatcgctaacgctgtttttaatgccgacgatggtcagtcgggcgataaatcaggccttctcagacgttcagaatacgcagtttccttatttatggttcatcctcgcttttgtcatatccacgctgttagcgctgggggtgagggtgattagcgagcgctttatccgccgctttgtcctcctcaagagcgatatcggtttttcccgcttgctgaataatccgctgcgtttttttgaaaaacgcgcgccgggggatgttttcagccgctttattgcctggcagggagggatgctgcaaaaaatcgagctggataacggactccgctcggactggataatctgcgttatcgctatcggcattatgttctggatctcaccggtgctggcgctcatttccgctgcgggcattgtcgtgatggggctgatcagcgtctgggcgatattccgcgaccgctggtatacgcagcagctgcagttgaaaagcgcgacgctgaatgactttttcatggaaacccttcagggggtgttaaccattaaaactgccgggctggaaacgcagcgcaaagcgcagtttgcccgtttgtcacacgaccttttcacctgccttcagcggcagaaagtttaccagcaggtaaaagaaggtctgtatcagctcaccggcagcctcgagatggtggtctttatgctggtggtgctgccgctggtgagcgcaaagcttatctcgctgggcgacttttttgcctatagctttttacggcagatttttacctcttacgtcacgcggatattctatgccgtgatccgtaaatcgcagctgcacgtgattgatacccgcgcgcagggcctgtttacccgtgaggaacctgcaactcctcagttatctccgctgcgtggggaggcggttccacagctggcgtttgaggcagtgagctttcattacgctccgcaaagcccggtgctgaatgccgttgatctccggctggaacccggcgatcgggtggcgattgtcggcgattccggcgccggaaaaagtaccctgctacggctgatggccgggcttttttccgcacagcatgggcgcattctgctggacggtgaagaggcgaccgcccgccagctggcctcgcaggtatggctgcagagccaggaagatattttgtttaacgcctcggtgctgcaaaacatcaccctgtttgacccgtggtacagcgacagcgatcgcgggcgagtggaggcgctggtcgataaaatggcgctggggccggtcgttcaggcgctgccgggaggcatggaggcgctgatccgcgagagccattcggcgctctctttaggccagcgtcagcggctgatgctggcgcgggcgctctacagcgcccggcctattttgctctgcgatgaaccgaccgccaatcttgatgacgaaaccgcggaaacggtgatcgccgcgctgtgccagcactgtcgtgaacagggcaaaacactgatcgtggtaacccacagtgcgcccattctgcatcacttcacgcgggtatatcgtctggatgaaggcgagctgcgcgatatcgcacagggagcgccgggccaatga

SEQ ID NO: 173681 - DNA, 951 bp, Klebsiella oxytoca
gtgacgcgttttctcatcgtctggagcgttttcagcgtaagaaaatggttcgcgcagctgagctggcgctaccggccttttaccggctatggccaaaaggcggtgcgcaggatcatgcgtttcacccccatgccgctgctgttgatagcggttcgcgcgctatgtcggctacggttattgggccgacactaccgcggccgtaccgccgtggcgacgcaaaactaccgctgcctgacgggcgccgacgggcgaatcgatgccgcatggatagccatgcgccgtcagttgctggaaatgggcgcgacctggggacagcacccggctacgctggcccagatgcaggcgtgcacgcgagagcttgatgccgttgtcgcgcctctggtggcgcaaaagacgccggtcgtcctcgcgccgctgcactgcgtttccgatattttagcggcgatggtcggggccggcgtgacgccgggaaaagccagcgtggtggtctcctccagcgcggaaaactacaccgtcgccagccgaaaaatgggcggcgtcgcgctctcttactgctcaatccaccaggataatacgtcgctggccagcgagcttatggcgttaatgaccaatgtatcggaagggcgggaaaatatgattattttccccgacattcctgccgattacaccgtgcagacccatgaagcgcagtccgggaaaataagctgccgactctttggccgcccggcgaaattacatagcggggtacagcgattttctcgcatcgtatcggcgcaggtggttttttatcacctctattatcagcaggggataaaaataaagatctattctccgctgaggccaaaagaggtcgcggcaaagctaccgacgatgattgaaaacaccctgcgtgactatccgcaggactggcttttgtggcacagccattcgctctattttattaatcactga

SEQ ID NO: 173682 - DNA, 669 bp, Klebsiella oxytoca
atgaagataaaacctattaccgctgttggctatacatttctggtggcgttaatttcgtcgctaattaccgtgctgtgctatcacatttttgtttttaatacgttttcgctggatagcagtcagccttcggctctgcgggaaattgacagcgccaccgttgccagtagcccaatcaagaatgagaaaagcatcattgaagtgatgtcctacggctgtcactactgcgcgtcgaacgaagaagagattgaaaaattcgccgccacgttaccggcggatagcgcctttgacgttatccatattacggccgaaagaaacggcctggccatttatgcgccggttttcgccacgctggaggtgatgggccttgagcgccagatgcgcgatcgggcttttaacgccgtgctgacccgcggtattaatttagcggatgatgacgcgcttaatggctggctgaaaaaaaatgatatcgatgtcgagaaataccatcagatacgccaaagtcaggccgttgccgagcgcctggaatatatggcgaaaattaccgaactctacgacattaacgcgacgccgttgtttattgttaataaaaaatacgtggttgcgaaggatcgccagttccctgaatttgccgactatatgcgccagctgttaacgcaggacaaggagtaa

SEQ ID NO: 173683 - DNA, 210 bp, Klebsiella oxytoca
atgaaaaaattaagcatgattgaagcatcaacaatcattggcgggacctgcaaggaaacttgcaccagctcttacgagacggtggttgttggcggtatctctacctgtaaacaagtgactacctgtacggataagcacggtaactcaaccgtgacctccaaagatgcgcctgacggtatgtgtgttgtaccgaatagcatccgtcagtaa

SEQ ID NO: 173684 - DNA, 672 bp, Klebsiella oxytoca
atgagccgtcatttctttctctacgataaaaacatctttttcgcggaaggcgtgcgttcggtggtggccgatctggccgcgcatgaagacgactgcgctttctccaggcttgaccaattctcacaattgatcaacaccctgcgtcagccaaagcaaaaagatgaactgcgctggatcctctgcgatgtcgacagtttgccggatgagcgttttaatgcgctctacaccattaaagagtattactgccgggaaaatcagcagctggtaattttattgggagaaaataatatctctctgttttttgcgttgcattctttgctgccggaagcgagctggctattaaagaatgaatcgctggataatttttttaaatttatcgaaagcgctgatgccatggtggcgaagaaaattttcttcagtcgatccttaattaattatactcgacagaaatggctagccagggattttaacaacagcatctccagcgatgactggtggttaatggaagaaatattcaaagggaaaacgctgtcacaaatttcctctgagcaaaaaattgatgttcgtcgattgagccgctgtaaacgcgggctgatgaaaaaattaaacgtaaaaaataacgtggagctgtttaatattttcaaatgcatcgtggctaccccctgcgtttaa

SEQ ID NO: 173685 - DNA, 549 bp, Klebsiella oxytoca
atgcgtcaatttatcgcatcaatggtactcataggttcgctatcggcggccaccccggcacaggctatcggggagctgatcggcggcgatttaaacttcaagggaaccgtcgttgcccatggttgcagtatcgttccctcgtcaaaaaatatcgccgtagattttggcgaaatttccacccgtacgctctatgcggagagaaaatcccaacctaaagcttttgtgattgagcttaaggattgcagtactgatgtgtttaattccgttaccgtaacatttagcggcacggaaaatgccaacatgagcgaccgcctggcgataacgccgatagcgcctaactctgccagcggcattggcattggttttgaagagaatgatggtacggcgatttcactaaatacgccgacgaccgcggttgccatttccagtgcctccatgcagttaaattttaaagcttttgtggaaggggaaccggatgccttgagtaacaaaactttgcaaaccggggccttccaggcaactgcgaattacaccataaattaccagtag

SEQ ID NO: 173686 - DNA, 1053 bp, Klebsiella oxytoca
atggcgaagcgggttatcgggcggaaatcttgcgtcactattttactctgcggcggtttatattccctgaacgtcggtgcggcggttgaaggggaaattaccccggtcggcgggcctaaaatgtataatattgacgtggccaatcaggatattaccaataatagccccggagcaaccattccttatgtcttttccctgggtggacaatattctggggttgccagctgtacgattccgatggaaaatcaggctatatattactcggctaccgcatcaatactgcagcagggaagtacaccagggtatttaaaactcaatgattatatggatgtaaaaatagagatttatatccgcggtgaacggatggattattttgccgttccttttaataatgaaacgaacggagcgtatcagaacaaatgcgttccgccaaccacccagtttaataactttgagtccggcgcccaggggcgggtaacgtttatgattaccaagccgattgtcaacggcgtgaacctgctgggtacagaaatcgcaaagctttatgggcgtttggggaattacagcgcagggatgggcactacgccaatgtcgattatctcaattaattccggggtgattaccgtcccggataaatgtgttgtcaattcgggctcaccgatcaccgttgatttcaatactatccccagcgcgggttccctgcttaatggcaacaactacagccagtctgtgccaatccaggtgaaatgcgaagggggaagctttgcaaccggtaatctgaatattcgcctggggatccagcaggccaataccgccagctttaatagcgattatttaggcacgactggcgccgtcgatcgctcaaatcttggcattatcctcaaggattcgggcggcaatttagttgcggcgaataggttttatgacgtcccgggttttaccaataaccagggaacctggaatctgacggccgcgccgattgcgaatgcaggaaccaacgttctcgaaggggatttccaggcatcggccaccgtggtcgctgagtttcagtaa

SEQ ID NO: 173687 - DNA, 633 bp, Klebsiella oxytoca
atgatgaaaacgcgtttatcgcttttagcactgtttgtattcggtatcagtatgcccgcgttggccgaggctgatattccgctacagccgcagcactataaccgggatcatcagggggaagatggcggtaacgtcatattcaacggctccgtctatgcctcaccttgcgtgctggcgccgcagagccgtctgcagataattgagatgggtgaaattagcgcccgtcgttttcatcaggcaggcgaccgcagccagccggtgctggttcgcgtcgagctcagggattgtctgaagggcgcatcgcaggcgcgggacagcatcgcatcaagaacgacgggcaatagcaagcacctctacaccaccggcgagcaggcggtacagctgacctttatcggcgagtccgatgagcacaatcgccagctgctgcgcctgaccggcagtatttctggcgccggtattcgcctgctggatatcaaagagcgggcgctggatattaaccaaacgcagccgccgtttattgtgaaaaccggcgacagcagcctgacgtttattgccgtgctggagtcgaccgcgcgtaacgtgactgcgggtaattttagcggactgctgcgtttaaaaatggagtatctctga

SEQ ID NO: 173688 - DNA, 744 bp, Klebsiella oxytoca
atgagcataacaagcaacaaactctgctggatgggcgctctgatgctggcggcggtaagcggtaccgcgcaggcaggcgtttcgttggaccgcactcggctgattatcaccggtaaagacagctcggcgagcgccaatttaaccaacaccagtccggatattccgtttctggcgcaatcctgggtcgaggacagcaagggcaataagattacctctccgctggtggtgctaccgcctttacagcgtatcaacggcgggcaaaaaggggtggcgcgggtcaccaaaacggatgggattaaccaattaccacaggatcgcgaaagcctgttttatttaagcgtacgcgaaattccgcccaagccggataaagctaatgtcctgcagttagccatgcagtcgcggattaaattatttttccgcccgaccgccattattcccaaaagcaaaagcgagatatggcaggaccaggtcgtcttccaaaagagcggaaataagatgaccgcgcaaaatccgacgccctattacatcaccatcattggcttatcccgcgtgaagggtgaaaaaatcaccaaattcccggggatcatggttgcgccgaagtccagcctggaattcagcgtcaccgatggcggcgtgcgagagtttgccatgatgtatgtgaatgactatggcggtcatcccgaactgaaatatcgctgtgaaggaaatacctgtaaagctctgccgccatcgcagcaagggtaa

SEQ ID NO: 173689 - DNA, 2469 bp, Klebsiella oxytoca
atgtcagcagaactaaaaataaaaataatcctctctcagatcctttttttctgctgtgcttctgtggcttgcgcctccactgatgtggaattcaacaccgacgtcttggatgccgccgaccgcgacaatatcgatttaacgcgtttcgccaccgacaactatgtgccaccgggcgagtacttattagacattaaaataaatggtcaggctgtagggcagcaaaaggttcgctatctggcttccaaagacgagaagcatactcaggcctgcattaacggcgaaattcttgcaagattggcattaaaagaagaagcccagcagaaggtcgcgcagccgtttgccgattgttatgaccttctcagccttccgggcgccacgctcagtaactacgccggggtgctggatatcaccattccgcaagcgtggatgaaatataacgatccaaactggacgccgcctgagcgctgggaccaggggatcggcggatttttgctcgactatagcctcaccggccaatatacccgccagcttgatatgcacaaggattacagcaccctgagcggatatggccagacaggcttcaacctcggcggctggcgcgtacgcggcgaatatcagaccagctactacagcgcgacgcatcaatttgatttcgatatgaatcagttctacgcctatcgtccgctgccgatgatggcggcaaaactgacggcaggggagatctatcttgattcgcaggttttcgacaccgttcgttttaccgggctgaatctcgccagcgatgagcgtcaactgccgccaaacctgcagggctacgcgccggaaatccgcggtctggcaaagaccaacgctaaggtgacggtgaagcagagcggacgcatcatttatgaaacgacggtgcctgccgggccgtttaatattcaggatttacggagctcggtgcgcggtacgctggatgttcaggtggaagagcaggacggctccatctccacattccaggttaacactgccaatattccttatcttacgcgtccaggctacgtgcgctacaacgtcgctatcggtgcgccgtcccgctatagccataaaattcaggggccaggtttcgcttccggtgatttctcctgggggatcaccaatgcctggtcgctctacggcgggttgcagagcgcaggggccgaatataccgcggtttccgccggtatcggtcgcgatctcagcgtcttcggcgcgctctcgctggatgccacggaatcttacagtcagcagtcgaaccaaaagcgactgaaaggaacctcgtttaagctgagctatgcgaaaaccttcgacgaatataacagttcaattaccttcgccggatatcgcttctcgcaggaggacttccgttctttctcgcagtatctcaacgagcgttatgaggggtacgacagtcttggccgtgaaaaagaagtttataccatcaccggtaataaaactttctgggctgatgagccaggtaaggcgacaaccgtctttctgacctatacccaccagaattactggaacagaagcagccaggatcgctacggcatctcgttaggacgctcgtttaacgtcggtaatattcgcgggatcaccaccaatatttcggcctatcgttctgattatgaaggtcggaaggacgactctattgctctctcactttctattccggttggcgatagtaaatggagcggcctggacgtgcagaccaataacggtaaaaccagcccgatgctctcgtataccgatagcagcgactataacaacctgtggcggctgcgtgcgggagcgagccagagcggttatgccaacgtcgacggctattatcagcgccgctcgcagtatgccgaaatcaacagtaacgccagctatcagcaggataactatctctccctgagcagcacgctgcgcggcggattcaccgccacacggcacggcgcggcgctccacaacagcggtgcgacgctcaatacggcccgcgttatggtgaataccaacggtatcggcgacgttccgcttaatgacggtaaatcaagaaccaataatttcggcatcgccgttattccggacatcgtgagctacaacagctttgacacccgagtcgacgtggatgcgatgtcggaatccatcgaaccagcaaaagctatcagcaccgccacgctgaccgaaggcgccattggctatcagacctttggcatggcgaagggcgaaaaaatgatgggcattattcggctggctgatggcacctatccgccgttcggcgctgaggtgattaacgacgatggcgtaagcgtatccatgattatggaaggcgggcagggatggctggcaggggttaatcctcaggagctgctaagcgtcgtttggggcgggaagaagcagtgtcagatcgctatcccgcccaccatagagcgtcgtgcgacagccgcgctattgccgtgtaaatga

SEQ ID NO: 173690 - DNA, 555 bp, Klebsiella oxytoca
atggttaaggatacagagaaaaagagactgatgacgttattcgtatcggtattactcttctccggacatgctttgagtactaattttacgcccggacagttggcgctttcgggggagctggttgctgccgcctgcgatatcgatcccaactcgcgggaactgtgggtggatttcggtaatatctcggctcgcgatattaatatggaccaggaaggtaagctgatccgaccttttctggtgcgcttagtcggctgcgcctctttcggtagcgaaaatccatcaacgcccggtgcctatgccaccatcacctttaccggaaatgcttcgtcgcaagacccgacggtattaattccggatggcgagggaaaaggctttgggatacagattcgcgatcgccacggggagattttaacttttggagaaccctcttccgggtatcttctgagtgatgagaataatacgctgaaatttaccgcttcgttggttccggttcagcaacatattaaggctggagatttttacgccgtcactcgtttctttatggattacaactag

SEQ ID NO: 173691 - DNA, 543 bp, Klebsiella oxytoca
atgaaactgaataaagttgctatggctgtggcattaactgctgctctcggctctatgtctgctctggctgctgatacaaccaacggggttatcgagcttcagggtgaactggtgaacactgcttgtggtttggccccgtcgtccagcccggtaaccgttgattttggtcaggttccagtttccctgctgcagggcggtggtcaggcaactgaagctaaaagcatcgaactgcagtactgcgacaccaccatcgctagcagcgccgttgtttcctacaccccgacttcggttaacccgaacgatcctactctggctgcattcacttctggtaccgcatccggcgcgggtatcggcctgaaagacagcgctagccagactgtgacctggggcgcgcagacgactccggtcactctggttgatggcaccaacaccattcctttcgtggccttcctgaaagcggaagctgctgcgagcggttctaccactaccgttaccgcgggtgcattccagtcaacgatcaacttcactatcgattatcaataa

SEQ ID NO: 173692 - DNA, 2562 bp, Klebsiella oxytoca
atgagtacactagagaatcttgacgcccatacgcccatgatgcagcagtatctcaagctgaaagcccagcatccggagatcctgctgttttaccggatgggtgatttttacgaactcttctatgacgatgcgaaacgcgcatcgcagctgcttgatatctcgctgaccaaacgcggcgcttccgcaggcgaaccgattccgatggccgggatcccgcatcatgcggtggagaactatctcgccaagctggttaatcagggggagtcggtggccatttgcgaacagattggcgatccggcgaccactaaagggccggttgaacgcaaagtcgttcgcattgtgacccccggaactatcagcgatgaagcgctgctgcaggaacgtcaggataatctgctggccgccatctggcaggatagtaaaggttttggctacgccaccctcgatattagctccggacgttttcgcctgagcgaacccgctgaccgcgagacgatggcggcggagctccagcgcaccaatcccgccgaactgctgtacgcggaagactttgccgaatcctcgttgattgaggggcgccgaggcttgcgccgtcgtccgctgtgggaattcgaaatcgacaccgcgcgccagcagctcaatctccagttcggtacgcgcgatctggtcggattcggcgttgaaaacgccccgcgcggcctgtgtgccgccggctgcctgctgcaatacgtcaaagacacccagcgtacgtcattgccgcacatccgttccatcaccatggaacgccagcaggacagcatcattatggatgccgctactcgccgcaacctggagataacccagaacctggccggcggctttgataatactctggcttcggtactcgactgcaccgtcactccgatgggcagccgtatgcttaagcgctggctgcatatgccggcgcgcgacaccgcagtactggtagagcgccagcagaccattggcgcgctgcaggagcattacactgaactgcagccgatactccgtcaggttggcgaccttgaacgtatactggctcgcctggcgctgcgcaccgctcgtccacgagatttagcccgtatgcgtcacgcattccagcagctgcctgcgctgcgtgcgatgctggcagacgtcgactgcgcgccggtacagcggcttcgcgagaaaatgggcgagtttaacgaactacgcgacctgcttgaacgggcgattatcgatgcgccgccggtgctggttcgcgacggcggcgttatcgcccccggctacaacgcggagctggatgagtggcgtggtctggccgatggcgcgaccgattacctcgacaagctggaaattcgcgagcgcgagcgtctggggctggatacgctgaaggtcggctacaacgccgttcacggctactacatccagattagccgcggtcagagccagcatgcgccgatccattacgtccgtcgccagacccttaagaacgccgagcgctatattattcctgagctgaaggagtatgaagataaggttctgacctccaaagggaaagcgctggcgctggaaaagcagctgtacgatgagcttttcgatttactgctaccgcatcttggcgacctgcagcagagcgccagcgcgctggcggagctcgatgtgctggtgaaccttgccgagcgcgccgagaccctcaactactgctgcccgaccttcagcgataaaccgggcattcgtattagcgaaggccgccatccggtggttgagcaggtactgaaagagccttttatcgctaaccctctgcacctcgctccgcagcggagaatgttgattatcaccggcccgaatatgggcggtaaaagtacctatatgcgtcagaccgcgctgatcgccctgctggcgtatatcggcagctacgttccggcggataaagtcgaaatcggccctatcgatcgtattttcacccgtgtcggtgcggcggatgacctggccagcggccgctcaacctttatggtagagatgaccgaaaccgccaatattctgcataacgccaccgagcatagtctggtgctgatggatgaaatcggtcgtggcacctcgacctacgatggcctgtcgctggcgtgggcctgcgcggaaaatctggcgaataagatcaaggccttgaccctgtttgccacccactacttcgagctaacccagctgccggagaaaatggaaggcgtggccaacgtccatcttgatgcgctggagcacggcgataccattgcctttatgcacagcgtgcaggatggtgcggcgagtaagagctatggcctggcggttgccgcgctggccggtgtgccgaaagaggtgattaaacgcgcgcggcagaagctgcgcgaactggagagcatcgcgccgagcgctgccgccacgcaggtggacggtacccagatgtcgctgctttctgctccggaagagacctcgcccgcggttgaagcgctggagaatcttgacccggactcgctgactccgcgccaggcgctggagtggctctatcgtctgaaaagcctggtgtag

SEQ ID NO: 173693 - DNA, 204 bp, Klebsiella oxytoca
atgaacctgaacaattcagatgttagtctcttctttgcagggaggcaagacatgctgacaaaatatgcccttgtggcaatcgtcgtactgtgtattacggtactgggatttacgcttttggtgcgcagctcgctgtgcgaactcagtattaaagagcgtagtatggagtttaaagctgttctcgcttacgaatcgaagaaatag

SEQ ID NO: 173694 - DNA, 237 bp, Klebsiella oxytoca
atgatttgtccacgttgcgccgatgaacatattgaagtgctggcaaaatcgccggtaaaagatgtctggacggtatttcagtgccagcactgtttctacacctggcgcgatactgaaccgctacgccgcaccagccgcgaacattatccggaagcgtttcgcatgacgcagaaggatattgatgaatcgccgatggtgccgagtattccgccgctgctggcggaagataaacgataa

SEQ ID NO: 173695 - DNA, 1428 bp, Klebsiella oxytoca
atggcttttgatgatttgcgcagctttttgcaggcgctggacgaccaggggcaactgctgaaaattagcgaagaggttaacgcggaaccggatctggccgccgcggcgaatgccaccggacgcatcggcgatggcgcgccggcgctttggttcgataatattcgcggatttaccgatgctcgcgtagcaatgaatactatcggttcctggcagaaccacgctatctcgctgggcttgccgccgaatacgccggtgaaaaagcagatcgacgagtttattcgccgttgggataagtttccggtaacgccggagcggcgggcaaatccggcgtgggcggaaaatagcgtcgacggtgaagacattaatctgtttgatattctgcccttgttccgtcttaacgacggcgacggtggtttttatctcgataaagcctgcgtggtttcgcgcgatcccctcgacccggataattttggcaagcaaaacgtcggcatttaccgtatggaggtgaagggtaaacgtaagctcggcctccagccggtgcccatgcatgatatcgccttacatctgcacaaagcggaagagcgcggtgaagatctgccgatcgccattaccctgggcaacgatccgattattactctgatgggcgctacgccgttgaaatacgatcagtcggaatatgagatggcgggcgcgctgcgggaaagcccgtaccctatcgccaccgcgccgctgaccggctttgacgtgccgtggggctcagaggtcatcctcgaaggggtgattgagagccgcaagcgtgaaatcgaaggtccgttcggtgaatttaccggccactattctggcggccgtaatatgacggtggtgcgtatcgataaggtttcataccgtagcaagccgattttcgagtctctctatcttggtatgccgtggaccgaaattgactacctgatgggcccggccacctgcgtgccgctgtatcagcaactgaaggccgaattccccgaagtgcaggcggtcaacgcaatgtacacccacggcctgctggcgattatctccaccaaaaaacgctacggcggctttgcccgcgcggttggcctgcgcgcgatgaccaccccgcacggcctgggctacgtgaagatggtgattatggttgatgaagatgtggatccgttcaacctgccgcaggtgatgtgggcgctctcttcaaaggtcaacccggcgggggacctggtgcagttgccgaatatgtcggtacttgagcttgatcccggctccagcccggcgggaattaccgacaaattaattatcgacgccaccacgccggttgcgccggatctccgcggccactacagccagccggtacaggatcttcctgaaaccaaagcctgggctgaaaaactgaccgccatgctggccaaccgtaaataa

SEQ ID NO: 173696 - DNA, 594 bp, Klebsiella oxytoca
atgaagctaattgttgggatgaccggagcgacaggcgctccgttgggggttgcgctgcttaaagcgctgcgtgagatgccggaagtggaaacgcatctggtgatgtcaaagtgggccaaaacgaccattgagctggaaacgccttacagcgcccgtgaagtcgccgcactggccgatttctcccatagcccggcggatcaggccgccgtcatctcatcaggttcatttcgcaccgacggcatgattgttattccctgcagtatgaaaacgctggcgggtattcgtgccggttatgccgaggggctggttggccgggccgcggacgtggtgctgaaagaggggcgtaagctggtactggtaccgcgcgaaatgccgttaagcactatccatctggaaaacatgctggccctgtcacgcatgggggtggcaatggtgccgcccatgcccgcttattacaaccatcctaaaaccattgaggacgtcacggaccacgttgtcacgcgagtgctggatcagttcggtctggagtatcacaaagcgcgccgctggagcgggttacgggcggtagagaatgtttcacaggagaatgaataa

SEQ ID NO: 173697 - DNA, 420 bp, Klebsiella oxytoca
atggagttaagaaacgaggcgttccacctgttgcgccagctttttcagcagcacaccgctcgctggcagcacgaactgccggacctgaccaaaccgcagtatgcggtaatgcgttcaattgccgagcatcccggcatcgaacaggtgacgttaacggaagcggcggtcagcaccaaagcgacgctggcggaaatgctgagccgtatggaaagccgggggctggttcgtcgcgaacacgatccggcggacaaacgccggcggtttgtctatttaaccgccgaaggcgaagcgcttctggcaagctctatgccgctgggtaacgccgttgatgaagagtttttaggccgtctcagtgatgaagagcgccgccagttttcgcaactcatccataagctgatggcgcaagagcaagagcgttaa

SEQ ID NO: 173698 - DNA, 888 bp, Klebsiella oxytoca
atgctgaacctgcagcggatgaccatgtttgtggcggtggtggagagcggcagttttaccgcggcggcggcggccctcgggcaaaccaaggccgtggtcagttttaacgtcaggcagctggagagcgagctgggcgttacgctgctgttgcgatcgacccgacggcttacgctgactgaagccgggtcgctgttttatcagcgtggcctcgcgctgctgaaggcagcggaaaatctgcaggacgacgtccggggcagccatgtgggattgagcggcgaactgcgggtcgcgaccacggcagaatatggtgcccaggtgattgttccggcgctggcggcgttcagcctgcggcatccagcgctccgcgtgcggcacgtttcttcttctcaccacgcagatttaatctcagatcgtgttgatgtggcgattcgtctcgggacgctggcggattcacgttaccgcgcggcgctgatctcgcgctttgccatcgtagcggtcgcctccccggcgtggctggcgcagcacccggtgaagacgctagaggatctggcccattccgcgtggattattcatgaacgtctgacgacgccgctgcgctggcagctcagcgggccgcaggaacggtgtatcccgtttgaaattaaaaaggcgccaaggatatcggcggatagcgccagcgcgctgatggcttttgcgttggcggggagcggcgtcgcgctgctccccgaatggctggcggccgctgcgctggcggataacgccctcgtgcggattatgccagaattccgcttcccgtctcagggagtgtatgcggtttatccggacgcgcagcatgttcccgccagggttcgggcgtttattgattttctccgcgagcgtttgggttaa

SEQ ID NO: 173699 - DNA, 1215 bp, Klebsiella oxytoca
atgacgtatcgcaacaaggtcgcaaccctttttctgctgggtttctttctcgacttaatcaatatgtttatcgccagcgtcgcttttccggcgatgagccggacgctgcacgcgtcgccaggcgaactggcgtgggtcagcaatggctatattgcaggactcaccctggtgctgccgtttagcgccaggctcagccagcggtttggcgcccgacgggtgtttctgctttcgctcagcctgtttagcatcggcgcgctggcaacagggatggccgactcattgctaaatctggttctgtggcgcgtcctgcagggaatgggcggtggactgttgattccaataggtcaggcattaacctggcagcagtttaagcctcacgagcgggcaaagctctctgccgcggtgatgctggtcgggctactggcgccggcgtgctccccggcgctgggaggtcttctggtgcaatcacttagctggcgctgggtcttccttgccagcctgccgatagcccttctgacgttagcgctggcagcgttgtggctaaaagaagagagaagcgttgtgcgagcgggaggtttattaccgctcgctttactgcgtgacccgctgctgcgtttttctatgctggtgtatctctgcgtgccggggacgtttatcggaattaacgtcgtcgggatgttttatttgcaaagcgtaacggggttgtcaccctccgctatcggcgccctgatgctgccctggtcactggcctctttcgtggcgatcgtcacgaccggtcgctattttaatcgtctcggcccccgccctctgattgcggccggctgcctgcttcaggccgccgggatcgtcgcgctggccagcgttaattcaccaaccgccagcagcacgctgatcgcggcatttgtcttaatgggcgcaggcggcagtctgtgcagcagtacggcccaaagcagcgcgtttcttaatgtggctaactgcgatatgccggacgccagcgcgctgtggaatctcaatcgtcagatgagtttcctgattggcgctgcgctgctggcggggttattgagcgcatttttgctttactggccagcaccgcaggcctggcgtggcgtgtttatcgccgccgctatttttacgctgctgccgctgctgcgctgtcttacatttaataaccgggcgataatcatgcgcctgcacggtaaaacggagaacaaatga

SEQ ID NO: 173700 - DNA, 378 bp, Klebsiella oxytoca
atgagtcgctatattgaagaagtcattgccgcccatgtggccattgaagcctggctgaatcagggaactggcagcatcgaaggtttaatgcagcgcttcagcgcggaatttaccatgatcccgattaacgggacacgcatggaccagcaggcggtcagcgctttttttcaagggtcacgcgccagccgccccggcttaaaaatcgtcattgatagcgccgcgatgcttgccgaatggcacgatggggccgcggtgatatatcgggaaacgcacgttttacccggcaaagcggatacggcgcgctggtcaacggcgcttttccgccagcaggagggggagataagctggctgcatctccacgaaacggcccggatatag

SEQ ID NO: 173701 - DNA, 993 bp, Klebsiella oxytoca
atgagtcagaatacgctgaaagttcatgatttaaatgaagacgcggaatttgatgagaacggagtcgaggtttttgacgagaaagccttagttgaagaggaacccagtgatagcgatctggctgaggaagagcttctttcgcagggagcaacccaacgggtgcttgatgcgacgcagctttatctcggagagattggttattccccactgctgactgccgaagaagaggtttattttgcccgtcgcgcgctgcgtggtgacgttgcgtcacgccgccggatgatcgaaagtaacctgcgtctggttgtcaagatagcccgccgttacggcaatcgtggtctggctctgctggacctgattgaagaaggtaatctggggctgattcgcgcagttgagaagtttgacccggaacgtgggttccgtttttcaacttacgcgacctggtggattcgccaaacgattgaacgggcaattatgaaccaaacccgtaccattcgtttacctatccacatcgtcaaagagctgaacgtctatctgcgtaccgcgcgcgagttgtcccacaagctggaccacgagccgagcgccgaagagatagccgaacagctggataagccagttgatgacgtaagccgcatgctgcgtctgaacgagcgcattacctcagtggatactccgctgggtggcgactcggaaaaagcgctgctggacatcctggccgatgaaaaagacaacggcccggaagacaccacgcaggacgatgatatgaaacaaagcatcgtcaaatggctgttcgaactgaacgccaagcagcgtgaagtgctggctcgtcgctttggcctgctgggctatgaagccgcgacgcttgaggatgttggccgtgaaattggcctgacccgcgaacgcgtgcgtcagatccaggttgaaggtctccgccgtctgcgggagattctgcaaagccaggggctgaacatcgaagcgctgttccgcgagtaa

SEQ ID NO: 173702 - DNA, 1119 bp, Klebsiella oxytoca
atgagcgcgggaagcccaaaatttaccttaagccgcattgcggctttgtcactggtgtcactctggctggcaggctgcagcagttccaacaatccgcctgcgccggtcagcacggctggcggggcttcgtcttcgggcaccaattccgggatgctgatcacgcctccgaccaataccgcgccgcaggctcgtccggtacaaactcagccggtacagacgcagcctgtgcagatccagccgatggctcaggagcctgtgcaaacggtaaacggcaaaatcgtctacaaccgtaagtatggggatattccgaaaggtagctataccggcggcagcacctatactgttaaacgcggcgacacgctattctacattgcgtgggttaccgggaacgatttccgcgacctggcgcagcgcaataatatcccggcaccgtacgctttgaacgtcggtcagacgttgcaggttggcaatgcatccggccagccgattaccggtgataatcctgttgcccaggcgagcgtgaaggccagtaatggtggaatgttgagcgcaaattctgcacaaaaatccaccgcggtagttgcgtcacaaccaactattacgtattctgaatcttcaggtgaacagagtgctaataagatgttgccgaacaacaagcccgcgacgacgacaaccgtcgcgccagttacggctccagctgtcagcaccacccaatcgactgcaagcagtacgtctaccagttcgccgatctcttcatggcgctggccgactgatggcaaggttatcgagaactttagtggggccgaaggtggcaataaaggtattgatattgcaggcagtaaaggacaggctattgtcgcgaccgcagatgggcgcgtcgtctatgccggtaacgcactgcgcggttacggtaatcttattatcatcaaacataacgatgattacctgagcgcctacgcccataacgatacgatgctggtaaaagagcaacaagatatcaaggcggggcagaagatcgctaccatgggtagcacaggtactagttcgacacgattgcattttgaaattcgttacaaggggaaatccgtcaacccgctgcagtatttaccgcagcgataa

SEQ ID NO: 173703 - DNA, 627 bp, Klebsiella oxytoca
atggtaagcaaacgtgttgaaagtcttctcaatcagcttcgcactcagggcattgtcgacgagcgcgtgctggacgctatcgcgcaggtgccgcgagaaaagtttgttgatgaagcctttgaacataaggcgtgggaaaacacggcattgccgattggccaggggcaaactatttcgcagccctatatggtggcgaggatgaccgagcttctgacgcttacgccggagtcaagggtgctggaaatcggcaccggctctggttatcagacggcaattctggcgcacctcgtgcaccacgtctgctcggtcgagcgtattaagagcctgcagtggcacgcgcgccgtcgtctgaaacaacttgatttacataatgtttcaacccgtcacggtgatggatggcagggttggcaggcacgcgcgccgtttgacgcgattatcgtgaccgcagcgccgccggaaatcccggccgcactgctggcgcaattagacgatggcggcgtgctggtgctgccggtaggcgaagagcaccagtttttaaagcgcatccgtcgacgcggcaatgagtttgtcattgacaccgtcgaggccgtgcgctttgttcccctcgttaaaggggagctggcctga

SEQ ID NO: 173704 - DNA, 762 bp, Klebsiella oxytoca
atgcgaatattgctgagtaacgatgacgggatccacgcgccgggcattcagaccctggcgaaggccttacgggaattcgctgaggttcagatagttgcacccgatcgtaaccgcagcggggcgtcgaattccctgacgctggagtcttcgctacgcactttcactttcgacaacggcgatatcgccgtgcaaatgggcacgccgacggactgtgtctacctcggcgtcaacgccctgatgcggccgcgtccggatattgtggtctctggcattaacgccgggcccaaccttggcgacgacgtcatctattccggcaccgttgccgccgccatggaaggccgtcatctgggctttccggcgctggccgtttcgctaaacggctaccaacactatgagaccgccgctgcggtcaccagctcgattctccgggcattaagccgcgaaccgctgcgtaccgggcgcattctcaatatcaacgtcccggatcttccgcttgatcagataaaaggtattcgcgttacccgctgcggcagccgccatccttccgatcaggtcattccgcagaaagatccgcgcggcaatacgctgtactggatcggtcctccgggggaaaagtacgacgccggtccggataccgactttgccgcggtggatgaaggctatgtctcggtcacgccgctccatgtcgatttaaccgcccacagcgcgcatgaggtggttagcggctggctcgatcgcgttggggttgatacacaatggtaa

SEQ ID NO: 173705 - DNA, 1050 bp, Klebsiella oxytoca
atgatcgcttttgacgaactcacttatctgcatggaaaaccgctgagccaggggctgctaaaagccaatccggaagactttgtagtggttgaggatctcggctttgcgcccgatggcgaaggcgaacatgtgctggtgcgtattctgaaaaacggctgcaatacccgttttgtcgctgacgcgttggccaaattccttaaaattcatgcgcgcgaagtgagctttgccgggcagaaagacaaacatgcggtgactgaacagtggctgtgcgcccgagtgccgggcaaagagatgcccgacctgagcaaattccagcttgaaggctgtcaggtactggagtacgcgcgccataagcgcaagctgcgcctcggggcgctgaaggggaaccagtttacgctggtgctgcgtgaaatcagcgatcgcgacgatgtcgaaacgcgtttacaggcgattgctgagcatggcgtacccaactattttggcgcccagcgcttcggtatcggcggcagtaacctgctgggggcgctgcgctgggccgagagcggcgcgccggtgcgcgatcgcaataaacgcagtttttggttgtcggcggcccgcagcgcattgtttaatcaacaggttggtattagattaaaaaaaccggaatttaatcaggttgttgatggcgatgcgctacaattagcggggcgcggaagctggttcgttgcgacttctgaagaactgacggagctccaggcgcgggtaaataatcgcgagctgatgattaccgctgcgcttgtaggtagcggcgactggggcagccagcgggacgcgctggccgccgaacaggcggccgtcgttgaagagacgcagctacagacgctgctggtgcgtgaaaaagtagaggccgcccgccgggcgatgctgctttatccccagcagatgagctggaactggtgggatgacgttaccgttgaactgcgtttctggctgcccgcaggcagcttcgccaccagcgtagtaagggagcttatcaatacaacgggtgactatgcgaatattgctgagtaa

SEQ ID NO: 173706 - DNA, 480 bp, Klebsiella oxytoca
atgcgaattggacacggttttgacgtacacgcttttggcggtgaaggccccatcatcatcggcggcgtgcgcgtaccttatgaaaaagggctgctggcgcattccgacggcgacgtcgcgctgcacgcgctgaccgatgcgctgttgggcgcggcggcgctgggcgacatcggcaagctgttcccggataccgacccggcctttaagggggccgatagccgcgaactgctgcgcgaagcgtggcggcgcatccaggcaaaaggctttacccttggcaacgttgacgtcaccatcatcgcccaggcgccgaaaatgctgccgcatattccccagatgcgcatctttattgctgaagacctcggctgccatatggacgatgttaacgtcaaagccaccaccactgaaaagctgggctttaccggccgtggcgaaggcatcgcctgtgaagcggtggcgctgctgcgtaaggcggagaaatga

SEQ ID NO: 173707 - DNA, 711 bp, Klebsiella oxytoca
atggcagccacttttccgggcgtttgcgccgtggtgccggcagccggttttggccgccgcatgcaaacggaatgcccgaaacaatatctctctatcggtaacaaaacgattctcgaacacgcggtcgccgcgctgttggcaaactcgcgtatacagcgggtggtgattgccgtcagcccgggagacgagcgctttagccagctgccgttggcgaatcatcctcagatcaccgttgttgatggcggtacagaacgtgcggactccgtccttgcgggcctgaaggctcttagcgaggccgattgggtgctggtacacgatgccgcgcgcccctgcctgcaccaggacgatctcagccgcctgcttcaactctgtgagaccagccgaacgggcggcattctggccgctccggttcacgataccatgaaacgcgcggagccgggcagggcggctattgcccataccgtcgaacgcaacgatttatggcatgcgctgacgccacaatttttccctcgcgaactgcttgttgattgcctgacgcgggcgcttaatgaaggggcgaccatcaccgatgaagcctcggcgctggagtactgcggctttcatcctgagctggtcgccggacgagctgataatattaaagtgacgcgcccggaagacctggcgctggccgaattttacctcacccgttcccgacaccaggagaaggcttaa

SEQ ID NO: 173708 - DNA, 318 bp, Klebsiella oxytoca
atgggtaaactaacgctgctgttattggctttgctggtctggctacagtactcgctgtggttcggcaaaaatggtctgcatgactatagccgggttaatgacgatgtctccgcgcagcaggcaactaacgctaaattaaaagcacgcaacgatcagctgttcgccgaaattgacgatctcaacggcggccaggaagctatcgaagagcgcgcgcgcaatgaactcagtatgacccgcccgggcgaaacgttttatcgtctggtgccggatgcgtcgaaacgcaaccaggccgcggggcaacagcagaataatcgataa

SEQ ID NO: 173709 - DNA, 327 bp, Klebsiella oxytoca
atgcgcaatacccagaacctcagtattattcgttcagaaccgccgccggccgccagcgacgagaccacgtggtctctgtcgggggcggtcgtgggctttatttcatggctgctggcgctgggtattcccttcctgatctatggcagtaacacgctattttttctcctctacacctggccgttcttcctggcgctgatgccggttgccgttgtggttggcatcgcgctgcattcgctgctggacggcaaacttcagtacagcgtctgcgcgacgattctgaccgtcgggctgatgttcggtctgctgttcctctggctactggggtag

SEQ ID NO: 173710 - DNA, 606 bp, Klebsiella oxytoca
atggcccgacatgacgaaaacgtcgtctggcatgaccataaggtaacacgtaaagatcgagaagcgctgcatgggcataaaggcgcagtggtctggtttacgggactttccggttcgggaaaatcaaccattgccggcgcgctggaagaggagctgcatcggctcggcgtgagcacctggttactggatggcgataatgtgcgtcacggcctgtgcagcgatcttggcttcagcgacgacgaccgcaaagagaacattcgccgcgtgggggaagtggcgaagctgatggtcgatgccgggctggttgtattgacggcgtttatatctccgcatcgcgcagagcgacaaatggtgcgcgaacgtataggggaagggcgctttatcgaagtatttgtcgatacgccgttagcgatctgcgaagcgcgggatccgaagggcctgtacaagaaggcgcgggccggggaattgcgcaacttcaccgggatcgattcagtgtatgaatccccggagagggcagaaattcacctcgacggtgaacaattggtaacaaatttggtgcaccaactattagacctgctacgacagagcgatattatcagatcctga

SEQ ID NO: 173711 - DNA, 1428 bp, Klebsiella oxytoca
atgaacactacgattgcacaacaaattgctgatgaaggcggcgtagaagcctatctgcacgcccagcagcacaaaagcctgctgcgctttctgacctgcggcagcgttgatgacggtaaaagcacgctgattggtcgattgctgcacgatacccgacagatttacgaagatcagctctcatctctgcataatgacagcaaacgtcacggtacgcagggcgaaaaattggatctggcgctgctggtggatggcctgcaggccgagcgcgagcagggcatcaccatcgacgtcgcctatcgctatttctctaccgagaagcgcaagtttattatcgccgatacgccggggcacgagcagtacacccgtaatatggcgaccggtgcatcaacctgcgaactggcgatcctgctgatcgacgcccgcaaaggcgtgctcgatcaaacccgtcgtcacagctttatttcgacactgctggggatcaaacacctggtggtggcggtgaacaaaatggatctcgtcgagtttagcgaagagactttcaacaccatccgcgaagcgtatctgacctttgcggagcagctgcctggcgatctcgacattcgctttgttccgctttctgccctggaaggggacaacgtcgccagccagagtgagaaaatgccgtggtacagcggtccgacgctgctggaagtgctggaaaccgttgagattcagcgcgtggtggaaagccagccgctgcgcttcccggtacagtacgtaaaccgcccgaacctcgacttccgcggattttccgggacggtggcctccggtagcgtgagcgtagggcagcgtcttaaggtgctcccgtccggagtggaatccaccgttgcgcgcatcgtcaccttcgacggcgatctgccagaagcggcggccggggaagcgatcaccctcgtgctgaaggatgaaattgatatcagccgtggcgatctgctggtcgatgcggcagtttctctgcccgcagtacaaagcgccagcatcgatgttgtatggatggcggagcaggcgctgaccccgggccaaagctacgacattaaaatcgccggtaagaaaactcgcgcccgcgttgataacgttcgctaccaggtggatatcaacaacctgacccagcgcgaagtggaaacgctgcccctgaacggcatcgggctggtcgatctcacttttgacgagccgctggtgctggataaataccaggataacccggttaccgggggcctgatctttatcgaccgtttgaccaacgtcaccgttggcgcaggtatggttcatgaaccccatgaacgggttcaggcgagcgcttcacagtacagcgcgtttgagcttgagctgaaccagcttattcgcaagcacttcccgcactgggacgctcgcgacctgctgggaggcaagtaa

SEQ ID NO: 173712 - DNA, 909 bp, Klebsiella oxytoca
atggaccaaaaacgacttactcacctgcggcaactggaggcggaaagcatccatattattcgtgaggtggccgccgaattctctaacccggtgatgatgtactccatcggtaaagactccagcgtaatgctgcatctggcgcgtaaagcgttttatccaggaactctgccgttcccgctgctgcacgttgataccggctggaaattccgcgaaatgtacgagttccgcgaccgtaccgctaaagcctacggctgcgaactgctggtgcataaaaatccggaaggggtggcgatggggattaacccgttcgttcacggcagcgccaaacataccgatatcatgaaaaccgaaggccttaagcaggcgctgaacaaatacggcttcgatgccgcgttcggcggcgcgcgtcgcgatgaagagaaatctcgcgccaaggagcgtatttactccttccgcgaccgcttccatcgctgggacccaaaaaaccagcgcccggaactgtggcacaactataacggccagattaacaaaggtgaaagcatccgcgtgttcccgctctccaactggaccgagctggatatctggcagtacatctatctggaaaatattgaaattgttccgctgtacctggcggcagagcgtccggtgctggagcgcgacgggatgctgatgatgatcgatgacgatcgcattaatctgcagcccggcgagatgatcaaaaaacagatggtgcgcttccgtacccttggctgctggccgctgaccggcgcggtggagtccaatgcgcaaacgctgccggagatcatcgaagagatgctggtgtcgaccaccagcgaacgacaggggcgcgtgattgaccgcgaccaggcaggctccatggagctgaagaaacgtcagggttatttctaa

SEQ ID NO: 173713 - DNA, 1416 bp, Klebsiella oxytoca
gtggaatacttgccgatatttgccgaagtgaaagagagacccgtactggtgatcggcggcggcgagattgccgcgcgcaagatcacctttctgctgcgtgctgaagcgaaggtacagattgtcgccgacgcgctaattccggaacttgccgacaaggttgagcgtcaggaaattcagtggcgggccaccgaatttgaagagcagcagcttgataacgtattcctggtgattgccgctaccgaagatgacgcgctgaaccagcgcgtttatgccgcggccaacgcgcgctaccggctggtcaacgtggttgataatcaggcgctgtgctcgtttgttttcccgtcaatcgtcgatcgttctccgctgctggtggctatctcttccagcggcaaagcgccggtgctgtcgcgaattttgcgcgaaaaaatcgaagcgctgctgcccactaacctggggcggctggccgaaacggcgagctactggcgtcatcatattaaaacccatctgaaaaccactgccgaacgccgtcgtttttgggaacgcgtgtttaccggccgctttgccagcctgatgctggcgggcaataaagccgaagcggaaaaggcgctggaagatgagctccgacagccggaaaagcggctcggtgaaattatcctcgtcggcgcggggcctggcgatgctggattgctgaccctgcgcggcctgcaggctatccagcaggcggatgtggtgttttacgacaatctggtcacgccggaagtccgcgagctggtgcgtcgcgacgcggagacaatctgcgtgggtaaaagcgccgccggcgtctccgtaccgcagcaggacattaaccgcatgctggtagaggcggcgaaagcgggcaatacggtgattcgcctgaaaggcggcgacccgtttattttcgggcgcggcggcgaagagctgcaggctgcagctgaagccggtattccgtttcaggttgtcccgggcgtgacggcagcggctggcgccacggcttatgccgggatcccgctgacccaccgcgattacgcgcaaagcgcaacttttattaccgggcacttcggtgcggaaaactccccgctcaactggactcggctggcgcaaagcggccagaccctggcgatttatatgggcagcctgaaagcggcggaaatcagcgctcagctgatcgctaacggtcgcgcgggcgacaccccggtggcggtgatctcgcggggtactcgcgccgatcagcaaacccggaccggcacattacaacaactcgaaaacctggcgaaagatgccccgatgcccgcgctgctggtagtgggcgaagtggtgcgattacatcatcagcttgcctggtttcaacacacctcatcctcagacgcctttaaggcttctgtagtaaatctggcttaa

SEQ ID NO: 173714 - DNA, 1056 bp, Klebsiella oxytoca
atgttttccgcattgtgccgtcgcctgcttcccctggcgttgagcgcaggttttgtcttcaccgccgccccggcaataagtgctctgggcgacaccgccaatgctcaggctcgtcacatcgctaccttttttcccggaagaatgaccggttcgcccgctgagatgctgtcggcagattatttgcgtcagcagttcacgcaaatgggctacgagagcgatattcgcagttttaatacccgatacatttacaccaacaacgataatcgcaaaaactggcaaaacgtcaccggcagcacggttatcgccgcgcatgaggggaaagatcgccagcaaatcatcatcatggcccatctcgatacctacgcgccgcagaccgatgccgatatagaaaataacctcggcggcctgacgctgcagggcatcgatgataacgccctcggtctgggggtcatgctggaacttgctgagcagttaaagaacatccctacgcgttatggtattcgcttcgtcgccaccagcggtgaagaagagggtcgtctgggtgcgcagaatatgcttaagcgtatgagcgacgcggagaagaaaaataccctattggtcattaacctcgataatctggtggtgggcgataagctctattttaatagcggccgcagcacgccatcctcggtgcgcaagctcactcgcgaccgggcgctggctatcgctcgtagtaaaggtattagcgccgccagcaatcctggcctgaatcctgactatccaaaagggaccggctgctgtaatgatgccagcgtgtttgacgaagccgggatcccggtattaaccgtcgaagccaccaactggtctctgggacgcaaagatggctaccagcagcgcgccaaatctcgttcgttcccggacggtaccagctggcacaacgttcagctggataaccagcagtatattgataaagccctgccgggccgtattgctcagcgcagccgcgatgtgatgagggttatgctgccgctggtgaaagagctggcgaaggcggagaagagacccgcctcaaaatag

SEQ ID NO: 173715 - DNA, 171 bp, Klebsiella oxytoca
atgatgcgttttcattttttaataccgttgttcctgctactggctgtcagcatgctctccatcgccgacagccaggtttataactgggtagctgaaaaaacgctgccccgaacctgttcagataacaaatacgccaccactgacctctcacctctgtcaaattacacttga

SEQ ID NO: 173716 - DNA, 381 bp, Klebsiella oxytoca
atgcactcggaaagcggcgtcagagagccttttggcagctactttttatccagaatgatctattttggcgataagtggagcaaggccgtccagctgcgctttgatgggcaaacgatgtcaggtattagcgaggcgctgcaggataaggccatttttgctcatgtgccaacctacggtgtaaaggtctttaaccgtgataccgggcaagaaattcccgttgacgaaagcagtctgccagcgcccacgcatgagtttatcgcgcagcttaaacccctggttaaacagcgctggcaggcaacggaaacggccaggcgcgagcgcatcgcaaatgcgctcaacgacttatgggactccgaaatactccattcgcctcaagtgtaa

SEQ ID NO: 173717 - DNA, 192 bp, Klebsiella oxytoca
atggatatagttatcatacagattgatcagcccgctgattttatcgttctgctctcgtttcaacaggcacggctcaatatgctgacggaatctgtactcgcccgcctgcttaaatcgcagatattcataggattcattctgatgggtataaaagtaggccgcctgggcgagcagtggatccagtatctgtag

SEQ ID NO: 173718 - DNA, 1986 bp, Klebsiella oxytoca
atgtccccaataaccgaatcttttaagaaacgctttggcaatcatcagcttaccactacgggcgatccgtgctgggttcctcccgcttttccgaaagagggccggttgcttttaagccagcggcaggtcaacgccaatataatcaaaatcgacagggaggaggcattatttcgccaggagtcccgccggcaaaaaagcagcccctgctgtaagagcctgcatatcagcctgttttttgacggtaccaataataatgcgctaaaagataccgcctgcatgccgccgcacccgtcgaacgtggcaaaactataccgtgcctgcgcgcctgatgatctcatggcaaatgagcgtggattttacgccttctatattcccggcgttggtacgccttttccgcagattggtacctatgactattattcgtcgggactgcagtttgctgtcggcggcgaggaccgtatcaactgggggatggtgcagctttgtaatgccctgaaccataccgtgacaaaaaatttcctcggcaacggcataatgaaaagggcggttcaggcgatgaacagctccagcactccggcggctgtggaactagggttgttcgcgggcagcgcggcgatgtcttacaaccgtgaaaaagtaaaccatgcctatctggactcgcggaagacaatgcctggtcagatgcggatgcggttgcgtatgtttgaacaactcttaaggctggtgcaggaaaaattcgtgcgcgcgcagtgcaagacgacagcgataaagctgtttgtgtacggtttttcccgcggcgcggcagaagcccgcgcttttgtcagctggctggatgaggcgctggccgaagggctactcggtttcccggcaggaacgctgctcggcgtgaaggtttcggtggaatttttagggctctttgataccgtgccggcagtgggaattgccaatgtggttccgggctttaccggtcacaacggctgggcggagcagacgcagccgctgacgcagtcggggttaatcaagcgctgctatcatctggtggcggctcacgagcagcgccaggcattttcgctggactccatccgtaccgccgctggcagctatttatcccagactcaggaagtggtctaccccggtatgcactccgacgttggtgggggatacccctgtggggatcagggcaagggccggggtggtgcgggcgatctgttatcgcaaattactctgcatgatatgtatgcggccgcgatagatgccggggcgccgctgtcgtttgctcctgaagtctttgctcttttacatccagaattaagaaggatgttggcgttcagagaaatgaaccttgaaactgcaacagaatttaatatctctcccggactggtagacacctttaacaactggcggtcgaccctctcccttgacaatcagcaggaggatccgctgtctgacgatggtatctacgcgccgtttcgttttgagtcagtctgtctggaagagatgctggaagcggaaatgatctggatgaccggctggcgtatcgcacgttttgcttcgcccaggacatcgccaataaatctcacgtcgcagcccttcttccagcatgcggcccagcacccggagattaccgcccagccgtatgaggcagggttcagccaacaggcgcagcgcgcccttgcccgtgagtggtcgcttttgcaatgcaaagctgaggcgatagcgcaggcgcgtaataaagaggcgtccagacacaggggcgatgaaaattggttccctggcccggagcttgttgggcaaccgttgttcgatgccaacaacgcccgcggtcagctttgggaagccgccaccgagtttgcggcggactatatgcgtaaagctcgcccccaggcgctgtttaaaccggcgatgaagcagaaagcgcaggggcgatcgattcggccacctgcactattgccgcaagtgccgaaaccggcttttcatgggagataa

SEQ ID NO: 173719 - DNA, 522 bp, Klebsiella oxytoca
atgcagggaatagttaagacagtgccgctgttatgttttttactgctgggctgtgatccggcagaaaaagaagcaccgcgcggcagcgggaagagcagctacgtggcggctaatctgctgggctataaccatatggcaggcacgaatatcaactggttctccgtcaacggctaccggggacacgccggggggtttacctgctgcatatcgctgccggaaaaatggcggcccaatatgcaggtggcagtggagtgggaggtggatcctgacccgtttcccaaaaatatgcccccaatgggaacaaaagaatttcgtgattatgcgaaagatcatgaagcaaattatcgccactataaagcggtggccactattcccgaatatgaagattcctgcggcctgcaggtgcatttcttgccctgtcagcagattaaagtaacggccacctgccacgggccgacccatcctgatcacccgataaaagatccctaccgtcagtcggagcctgcccaatgtccccaataa

SEQ ID NO: 173720 - DNA, 531 bp, Klebsiella oxytoca
atgcaggaaatagttaaagcagtgccgctgttatgttttttactgctgggctgtgatccggcagaaaaagaagcaccgcgcggcagcgggaagagcagctacgtggcggctaatcttctgggctataaccatatggcaggcacgaatatcaactggttctctgttaacggctaccggggacacgccggggggtttacctgctgcatatcgctgccggaaaaatggcggcccaatatgcaggtggcagtggagtgggaagtggatcctgacccgtttccgaaggatatccccagattcagcgaccctaagtatgatgaatatatagaaaaacacagggctaactatcgccagtataaagcggtagccactattcccgaatatgaagattcctgcggcctgcaggtgcatttcttgccctgtcagcagattaaagtaacggccacctgccacgggccgactcatcctgaccacccgattaaagaacctttcgatctgtcggagcctgcccagtgcccgccagaaacgccatga

SEQ ID NO: 173721 - DNA, 387 bp, Klebsiella oxytoca
atgttctttgaaaaggaaatagttataaaaggcaattattatatctcccttgaagggggaattgaacgctgttacgccaaaagtgccggtaaacgatgtatatatctcgaagatgaacatttcattcagcaatctggtacggacgagtttgcattcgacatgctatctgatgcagtttctttcagaaaaaacctcatcagtaaatatcaaagaattttcaaacttttttgcggcattctggtagatgaaccgggaactgcctgttctcaagaaagcagcactttccctcaaccgagaagacatcagaaaagcaaaagacagaacaattttctgcgtaaattgaagggattatcaaggaatgttctctcatcatacgcgataaattaa

SEQ ID NO: 173722 - DNA, 735 bp, Klebsiella oxytoca
atgtccgtactcgatttaaacgcgctgaacgcattaccgaaggtcgatcgcgttttacagctagcggaaaccaatagtcagctggaaaagctgagcgcggaagcgcgcgttgcgtgggcgctggaaaatctgccgggggaatacgtgctctcttcgagctttggtattcaggcggcggtgagcctacatctggtcaatcaggtacgcccggatatcccggtaattctgaccgataccggctatctgtttcccgaaacctacctgtttatcgatgagttaacggacaaactcaacctgaacctgaaggtctatcgggcgaaggagagcgccgcatggcaggaagcgcgctacggtaaactgtgggagcagggcgttgagggcattgaaaaatataatgacatcaacaaggttgagccgatgaaccgggcactgcaagagctgagcgcgcaaacctggtttgcgggcctgcgccgcgagcaatccggcagtcgcgcccacttaccggtgctggcgatccagcgtggcgtgtttaaggtgctgccgatcatcgactgggataaccgcacggtttaccagtatctgcaaaagcacggcctgaaatatcatccgctttgggatcaaggctatttgtcggtaggagatacccacaccacgcgcaaatgggagccggggatggcggaggaagaaacgcgcttctttggcctgaaaagagagtgcgggctgcacgaaggttaa

SEQ ID NO: 173723 - DNA, 1713 bp, Klebsiella oxytoca
atgagcgaaaaacatccaggcccgctggtggtcgaaggtaaactgactgacgccgagcgcatgaagctcgaaagcaactacctgcgcggcaccattgcggaagatttgaatgacggcctgaccggcggttttaaaggcgataactttctgctgatccgttttcacggtatgtatcagcaggatgaccgcgatatccgcgccgaacgtgcggcgcagaagctggagccgcgtcacgcgatgctgctgcgctgccgcctgccgggcggggtgatcaccaccaaacagtggcaggcgatcgataaattcgccgccgataacaccatctacggcagtatccgtctgaccaaccgtcagaccttccagtttcacggcattctgaagaagaacgtcaagccggtgcaccagatgctgcattcggtcggactggatgcgttggccaccgctaatgacatgaaccgtaacgtgctctgtacgtccaacccgaacgagtctcagctgcacgccgaagcttatgaatgggcgaagaagatctccgagcacctgctgccgcgcactcgcgcctatgccgagatctggctggatcaaaagaaagtcgccaccaccgatgaagaaccgatcctcggccagacctatctgccgcgtaagtttaaaacgaccgtggtgatcccgccgcagaacgatatcgatctgcacgcgaacgatatgaacttcgtggctattgctgaaaacggcaagctggtgggctttaatctgctggtgggcggcggtttatcgattgagcacggcaataagaaaacctacgctcgtacggcgagcgagtttggctatctgccgctggagcataccctggcggtagcggaagcggtggtgacgacccagcgcgactggggcaaccgtaccgaccgtaaaaatgcgaaaaccaaatacaccctggagcgcgttggcgttgagacctttaaagcagaagtggagcgtcgggcgggcatcaagtttgaaccgattcgtccatacgagttcaccggccgcggcgatcgtatcggctgggtgaaaggtatcgacaataactggcatctgacgctgtttattgaaaacggacgtatccttgattatccgggccgcccgctgaaaacgggtctgctgaagatcgcgaagatccataagggcgaattccgtattacggcaaatcagaatctgattattgccagcgtaccggaagatcagaaggcgaagatcgagaagctggcccgcgagcacggcctgatgaacgccgttacgccgcagcgcgaaaattcgatggcttgcgtctcattcccgacctgcccgctggcgatggcggaagccgagcgcttcctcccgtcattcatcgataaagtcgaggcggtgatgagcaaacatggcgttggcgacgagcatatcgttacccgcgtcaccggttgcccgaacggctgcggtcgcgcgatgctggcggaagtgggcctggtgggtaaagcgccgggccgctacaacctgcaccttggcggcaaccgtagcgggacgcggattccgcgcatgtaccgggaaaacattaccgagtcggaaattctcgactcaatcgacgaactggtagggcgctgggcgaaagagcgcgaagcgggtgaaggcttcggcgactttacggtgcgtgcgggcattattcgtccggtgctcgatccagcccgggatttctgggaataa

SEQ ID NO: 173724 - DNA, 1749 bp, Klebsiella oxytoca
atggcgcgccttcaggcggccacgactgacttcacgcctacccagctagcctgggtttccggctatttttgggggatgctgaatcagcagcccggcgcggcggttgttgcgccagcccaggcggctgaagtgccgtccatcacgctgatttcggcctcgcaaaccggcaatgcccgccgcatcgctgaagcgctgcgtgacgatctacaggcggcgcagctgaatgtgaagctgattaacgcaggcgactataaatttaaacaaattgccgccgagaaactgctggtcgtcgtgacgtcaacacaaggcgagggtgagccgccggaagaagccgtcgcactgcataagttcctgttctcgaagaaagcgccgaagctgaccgatacggcatttgccgtgtttggcctcggcgatacctcctatgaattcttctgccagtccggcaaggattttgataacaagctggccgagctgggcggtgaacgcctgctggatcgggttgacgctgatgtggagtatcagaccgccgctgccgaatggcgcgcccgcgtggttgaggtgctgaaagcgcgcgcgcctgctgcttctccgtctcagctggttaccagtggggcggtgaatgaaatccacaccagcccgtataccaaagaggcgccgctgactgcgacgctggcggtgaatcagaaaatcaccggccgtgattcagaaaaggatgtgcgccatattgaaatcgacctcggcgactccggcctgcgctatcagccgggcgatgcgttgggcgtctggtatcagaacgatccgacgctggtgaaggagctggtggatctgctatggctaacaggtacggaaccggtcacggtcgacggcaaaacgctaccgcttgctgaagcgctggaatggcattttgagctgacggtcaacaccggcaatatcgtggaaaactacgccaccttaacccgcagcgagtctttactaccgctggtgggcgataaggcacagctccagcactacgccgcaaccacgccgatcgtcgacatggtgcgtttctcgccggcgcagctggatgcccaggcgctggttgacctgctgcgcccgttgacgccgcggctgtactcgatcgcctcttcgcaggcggaagtggaaagcgaagtccacgtcaccgttggcgtagtgcgttatgatattgaaggtcgcgctcgtgccggcggcgcttccagtttcctggctgaccgcatcgaagaagacggcgaagttcgcgtttttatcgagcataacgataacttccgtttgcctgcgaacccggaaacgccggtgatcatgattggtcccggtaccggcatcgcgcctttccgcgcgtttatgcagcagcgcgcggcggaaggcgcagagggtaagaactggctgttcttcggcaacccgcactttactgaagatttcctctatcaggtggagtggcagagctacgtcaaagaaggcgtgctgagccgcatcgacctggcctggtcccgcgatcaacaacaaaaagtctacgttcaggacaaactgcgcgagcagggagccgaactgtggcgctggattaacgacggtgcccatatttatgtctgcggcgatgccaatcgtatggcaaaagacgttgagcagacgttactggaagtgattgccgaatacggcgcgatggacgccgaagcggcggacgaatttttaagtgagctgcgcgtagagcgccgttatcagcgagatgtctactaa

SEQ ID NO: 173725 - DNA, 363 bp, Klebsiella oxytoca
atgtccaccacgctgtttaaagatttcactttcgaagccgctcaccgcctgccgcacgtaccggaaggccacaagtgcggacgcctgcacggtcactcttttatggtacgcctggagattaccggtgaagtcgatccccataccgggtggatcatggatttcgccgagctgaaagccgcattcaaacccacctacgatcgcctggatcactactatctgaacgatattccgggactttccaatcctaccagcgaagtcctggcaaaatggatctgggagcagatgaagcctttggttccgctactcagcgcggtgatgatcaaagaaacctgcacggcgggctgcgtctatcgcggcgagtga

SEQ ID NO: 173726 - DNA, 789 bp, Klebsiella oxytoca
atgcagccaattgagccatcccatgctttttctatggagttcttctccctcaaagggaaaaccgccattgtcaccggggggaatagcggactggggcaggctcttgcccttgctctggccacggcgggagccaatctgtttattcccggacgacgcgtcgataatgcccaaacctgtgaacgcattgagcagcagggcgctgaagtggagttcatgctggcggatattaccgacaacggcatgccgcagcgcattatcgccgcctgctgccagcgtttcggcacggtcgatatcctggtgaacaatgccggtatttgtcgtttgaataaggtcctgcgctttggccgcgccgactgggacccgatgattgagaccaacttgacggcggctttcgagctcagccatgaggcggcgaaaataatggttccccaccgctgtggcaaaatcatcaatatctgttcggtgttttcttatttaggcggcagctggtcgccggcttatgcagcaaccaaacatgccctcgcggggttaaccaaagcctattgtgaagagctcgctccatataacattcaggttaacggtattgcccccggctattatgagaccgacatgacggcgatcgtccgcaacacgcctaaggaaaacaggcgcgtcctggcgcatattccggccggccgctggggtgaggcgcaggatctgatgggcgcagtcgtcttcctggccagccgggcctcggattacgtgaatggccatatcctggcggtagatggcggttatctggtgcgctag

SEQ ID NO: 173727 - DNA, 672 bp, Klebsiella oxytoca
atgcagtacccgattaacgagatgttccagaccttgcaaggcgaaggttacttcaccggcgttcccgccatttttattcgtttacagggatgcccggttggttgcgcctggtgcgataccaaacatacctgggataaacttgccgatcgagaagtctctctgttcagcattctggcaaaaaccaaagagagcgataaatggggcccggcaagtagcgaagatctgctggccatcatcgggcgtcagggctggactgctcgtcacgtggtgattaccggcggcgaaccctgtattcatgatttaacgccgctgacctcgctgctggagcaaaacggctttagctgccagattgaaaccagcggcactcacgatgttcgctgtacgcctcatacctgggtgacggtatcgccgaaggtgaatatgcgcggcggctatgatgtcctttctcaggcgctgcagcgagctgatgaaataaaacatcctgttggacgcgtgcgcgatatcgaagcgctcgatgaactgctggagacgctggctgacgacaagccgcgcatcatcgcgctgcagccaattagccagaaagaggacgcgacgcgcctgtgcatcgaaacctgcatcgcgcgcaactggcgtttatctatgcagacgcataagtatctgaacatcgcctga

SEQ ID NO: 173728 - DNA, 1110 bp, Klebsiella oxytoca
atgaatacattattaattactggcgcgaccggatttctcggtggagcagtgttagaaagcattctgaataaaaagaatgcgcctaatctattactgttagttcgtgcagataatagtgtagctgccgtagagcgggtaaaggaaaatctgcgaaaattcaatattagcgaagagagactaactgccctgacgccaggcaacattctgctgggggatctggccaatccgcagccctttctcgacgacccgcgcctgaatcaggttacccacgtgctcaactgcgctgccgtcgcctcatttggtaacaacccgcttatctggaaggtcaacgtcgaaggtacgctgcagtttgcccggcggatggctcaggtcagccaccttgagcgctttctgcacgtcggcaccgcgatgtcctgctcgccagatcccgattctctggtagcggaaagcacagcgtttcgtgaacgcgctgcgcatctggtcgagtacacgcactctaaatcaatgattgagcgtctcatgcggcaggaatgctcaaccctaccgctggcgatcgcccgtccctctattgttgttggccacactcatcacggctgtcagccctccagcagtattttctgggtattcagcatggggctgatgctgcaaaaatttatgtgttcgatggaagaccgcattgatgtgatccccgtcgattactgtgccgatgcgctgctgatgctgcttgtcagcccgctggcgcgcggagaagtggtgcatatttctgcgggggaagaaaacagcgtaaggtttgcggatatcgataacgcaatggcctccgccctcgaacaggcgccggtcggcgataaatacgcgcaggtcagctatgaaacgctggtcaaaatgcgtcgtgagctgaaggctatttttggcccctgcaacgaacggctgatgctaaaagccatgcgcctttacggcgccttcgccacgctcaacgtacgattcagcaacgacaagctgctcagcatgggtatgccaaaaccgccgcgctttaccgattacattgaccgctgcgtacagaccacgcgcgggctttctatcccgcagcaaatggcggtagattttaagtag

SEQ ID NO: 173729 - DNA, 1299 bp, Klebsiella oxytoca
atgtccaaaatcgttaaagtcatcggtcgtgaaatcatcgactcccgtggtaacccgactgttgaagccgaagtacacctggaaggtggtttcgtcggtatggcagctgctccgtcaggtgcttctactggctcccgcgaagcgctggaactgcgcgatggcgacaagtcccgtttcatgggtaaaggcgtactgaaagctgttgctgcggtaaacggcccgatcgctcaggcaatcctgggcaaagatgccaaagatcaggctggcatcgacaaaatcatgatcgacctggacggtactgaaaacaaatctaacttcggtgcgaacgctatcctggccgtctctctggctaacgccaaagctgccgctgcttctaaaggtcagccgctgtacgagcacatcgctgagctgaacggcaccccgggcaaatactccatgccggttccgatgatgaacatcatcaacggcggcgagcacgctgacaacaacgtcgacatccaggaatttatgattcagccggtaggcgctaaatccctgaaagaagccgtacgtatgggttctgaagtgttccacaacctggctaaagttctgaaagctaaaggcatgaacactgctgttggtgacgaaggtggctacgcgccgaacctgggttccaacgctgaagcgctggctgttatcgctgaagccgttaaagccgctggctacgagctgggcaaagacatcactctggcgatggactgcgcggcttctgaattctacaaagacggtaaatacgttctggccggcgaaggcaacaaagcgttcacttccgaagagttcactcacttcctggaagagctgaccaaacagtacccgatcgtttctatcgaagacggtctggacgaatctgattgggacggtttcgcataccagactaaagtactgggcgacaaaatccagctggttggtgacgatctgttcgtaaccaacaccaagatcctgaaagaaggtatcgagaaaggcatcgttaactccatcctgatcaaattcaaccagatcggttctctgaccgaaactctggctgcgatcaaaatggcgaaagacgctggctacactgccgttatctctcaccgttctggcgaaactgaagacgctaccattgctgacctggctgttggtaccgctgcaggccagatcaaaactggttctatgagccgttctgaccgcgttgctaaatacaaccagctgattcgtatcgaagaagcgctgggtgaaaaagcgccgtacaacggtcgtaaagagatcaaaggtcaggcataa

SEQ ID NO: 173730 - DNA, 1638 bp, Klebsiella oxytoca
atgacaacgaactatatttttgtgaccggcggggtcgtatcctctctgggtaaaggcattgccgcagcttccctcgcagccattcttgaagcccgtgggcttaacgtgaccatgatgaaactggatccgtacatcaacgtcgatccgggtaccatgagcccaatccaacacggggaagtgttcgttaccgaagacggcgctgaaaccgatctggacttaggtcactacgagcgcttcattcgcaccaagatgactcgtcgcaacaacttcaccaccggccgtatctactctgatgtcctgcgcaaagagcgtcgtggcgactatctgggcgcgaccgtgcaggtgatcccgcacatcaccaacgcgattaaagagcgcgtgctggcgggcggcgaaggtcatgatgtggtgctggttgaaatcggcggtaccgtaggcgatatcgagtcgctgccgttccttgaagcgattcggcagctggcggtggatatcggtcgtgaaaacgccctgtttatgcatttgaccctggtgccatacatggccgccgcgggcgaagtcaaaaccaaaccgacccagcactccgtaaaagagctgctctccatcggtattcagccagacattctggtttgccgctccgatcgcgccattccggcgaacgaacgcgccaaaattgctttgttctgcaatgtgccagaaaaagccgttatttcgatgaaagacgtcgattccatttataaaattccgggcctgttgaaatctcaggggctggacgattatatttgtaaacgattcagcttaaactgtccggaagcgaacctggccgaatgggaacaggttatctacgaagaagcgaacccggcaggcgaagtcactatcggtatggtcggcaagtacattgaactgccggatgcctataaatcagtgattgaagcgctgaaacacggcggtctgaaaaatcgcgttaccgtcaacatcaagctgattgattcgcaggatgtggaaacgcgcggcgtcgaaattctgaagaatttagacgctatcctgattcctggcggcttcggctatcgcggcgtcgaaggtaagatcgctaccgcgcgctatgcgcgtgaaaacaacattccatatctgggtatttgcctgggtatgcaggttgcgctgattgagtttgcgcgcaacgtagcggggatggaaaacgccaactcaacggaatttgtgccagactgtaagtacccggtcgtggccctgattaccgaatggcgtgatgaagacggtaatgtcgaagttcgctctgataagagcgatctcggcggcacgatgcgcctcggcgcacagcagtgccagctggctgaagatagcctggtgcgccagctgtatggcgaaccaaccattactgagcgccatcgtcaccgctacgaagtcaacaacatgctgttgaagccgattgaaaatgcgggcctgcgcattgcgggccgttccggggatgagcagttggtcgagatcatcgaggtgcctaaccatccgtggttcgtcgcctgtcagttccatccggagtttacttcgacgccgcgtgatggtcacccgctgtttgccggctttgtgaaagccgctggcgagtaccagaagcgtcaggcgaagtaa

SEQ ID NO: 173731 - DNA, 801 bp, Klebsiella oxytoca
atgaaggcaaataatgagatggaacggctgctcggcattatgcagcggctacgcgatccggaaaacggctgtccgtgggacaaagagcagacgtttgccaccatcgctccctatacgcttgaagaaacctatgaagtgctcgacgccatctcccgcgaagattttgacgatttgcgcggcgagttgggcgatctgctgttccaggttgtcttctacgctcaaatggcgcaggaagaggggcgctttgatttcagcgatatctgcgccgctatcagcgacaagcttgagcgccgccacccacatattttcggcgatgcctccgccggtagcagcagcgaagcgctggcccgctgggagcagatcaaaagcgctgagcgagcggaaaagtcccagcactccgcgctggacgatattccgcatagccttccggcgttgatgcgcgcgcataaaatccaaaaacgctgctcggcggtgggttttgactggacctctctcggaccggtgctggataaagttcatgaagaaatagatgaagtgatgcatgaagcgcagcaggccgtggtggatgaagctaaactggaggaggaagttggcgacctgctgtttgcaacggtcaatttatcccgccatttaggcgtcaaagccgaggttgcgttgcaaaaagccaatctcaaatttgaacgtcgcttccgtgaagttgagcggattgtcgccgcgcgcggcctggaaatgaccggcgtcgacctcgatactatggagcaggtgtggcaggaagtaaaacgccaggaaactgatctctaa

SEQ ID NO: 173732 - DNA, 333 bp, Klebsiella oxytoca
atggatttgagcttaagtttctttattctttatctcctctcatccctcacgctgatcgctgtgcaaatctggctgttttttatcgtttattcgccagacggatccttgagttcacacctgatatgccgcgctgcaaatgcccttgccatgtttgtgcagctttgcgtgacggtgaaaggggagtttccttttaacatgctttcgtcgcaaatccgctatattgacgacccggtgcgcatgctggcgttggtatttatcgtgctgcacggcatagtttatgtttttgtaatacgcggcggcttgccaaaaccgaaacgcgaatggcgtgactga

SEQ ID NO: 173733 - DNA, 2238 bp, Klebsiella oxytoca
atggttgcggtaagaagtgcacatttaaataaagctggtgaatttgacccgaagaaatggatcgcgagtctgggaatttccagccagcagtcgtgtgaacgcttagccgaaacctgggattattgtcgagagaaaacgcaggaacacccgcaggccgatctcctgctatggcgcggcgtggagatggtagaaattctctccatgctcagtatggacatcgatacgctgcgagcggcgatgctattcccgctggcggatggcaacgtcgtcagcgaagaaatcatgcaggagagcgtcgggaaatccgtcgtcaccctgatccacggcgtgcgggatatggccgcgatacgtcagcttaaagccacccatacggattcggtctcctctgaacaggtggacaacattcgccgcatgctgctggcgatggttgatgacttccgctgcgtggtgattaaaatcgccgagcgtattgcccatctgcgtgaagtgaaagatgcgccggaagatgagcgcgtgctggcggcgaaagagtgcaccaatatttacgcgccgctggccaaccgtctggggatcggccagcttaagtgggagcttgaagattactgcttccgctatctgcacccggcggaatataaacgcatcgctaagctgttgcatgagcggcgcatcgatcgtgaacattacattgacgagttcgtcagccacttacgcacggaaatgaaaaccgagggcgtgaaggctgaggtttacggtcgtcctaagcatatctatagcatctggcgcaaaatgcagaaaaaacatctcgctttcgacgagctgtttgacgtgcgggcggtgcggattgttgccgagcgcctgcaggactgctatgccgcgctggggatagtgcatactcactaccgccatctgccggatgagtttgatgattacgtcgccaaccctaagcccaatggctaccagtccattcataccgtcgtgcttggtcccggcggcaagacgatcgaaattcagatccgtacccgccagatgcatgaagatgccgagctgggcgtagctgcgcactggaagtacaaagagggcgccagcgcaggggccagcggcggacgcggctatgaagatcgcattgcatggctgcgtaaactgatcgcctggcaggaagagatggccgattccggcgagatgctggatgaagtgcgtagccaggtctttgacgaccgggtttatgtctttacgccgaagggtgacgtagtggatttaccttcgggttcgactccgctcgattttgcctaccatattcacagcgatgtcggtcaccgctgcatcggggcgaaaatcagcggacgtattgtgccgttcacctatcagttgcagatgggtgaccagattgaaatcatcactcaaaaacagcctaacccaagccgtgactggctgaatccgaaccttggctacgtcactaccagccgcgggcgttccaaaattcatgcctggttccgcaagcaggatcgcgacaagaatattcttgctggaaggcagatcctcgatgatgagctggagcatctgggcatcagcctgaaggacgcggaaaagtatctgctgccgcgctacaactttaatgagcaggacgaactgctggcggcgattggcggcggtgatattcgcctcaaccagatggttaatttcctgcaggcgcagtttaataagcccagcgcggcggagcaggatgcggcggcacttaagcagctgcagcagaaaacctatactccgcagaatcgcagcaaagacaatggtcgcgtggtggtggaaggcgtcggcaatctgatgcaccacattgcgcgctgctgccagccgatccccggcgacgagattgtgggctttatcacccagggccgagggatctcggtgcaccgggcggattgcgatcagctcgcggagctacagtctcatgctccggagcgcatcgttgacgcagtgtggggagagagctactcggcgggctactcgctggtggtgcgggtccaggccaacgatcgtagcggcctgctgcgcgatatcactactattctcgccaatgagaaggtcaacgtgctgggcgttgccagccgcagcgatacgaagcagcagatggcaaccatcgatatgaccattgagatctacaacctgcaggttctgggccgggtacttggcaagctgaatcaggttccggacgtcatcgacgcccgtcgcctgcacggcgggtaa

SEQ ID NO: 173734 - DNA, 1344 bp, Klebsiella oxytoca
atggcgcaattctactctgcaaaacggcgtgtgacgacgcgccagatcataaccgttacagtaaatgaccttgatccctttgggcagggcgttgcgcgtcaccagggtaaggcgctgtttgttaacggtttattaccgcaggagcaggccgaagtggtcctggtcgaggataaaaaacagtatgcccgcgcgcaggttaaacgccgtcttagcgacagcctgcagcggcaggcgccgcgctgtccgcattttggtatctgcggcggatgtcagcagcagcacgccagcgttgagctgcagcagcagagcaaacgcgccgccctcgcgcggttaatgaagcgcgaggttgatgacattatagccgcttcgccgtggggctatcgccgccgggcgcgtctgagcttgaattatcagccaaagacccaacaattacagataggcttccggaaggccaactccagcgaaattgttgatgtggtgcagtgccctgttttggtgcccactcttggtgcgctactgcccgcggtacgagaatgtctcagcggattgcaatcgctgcgtcagcttggccacgtggagctggtgcaggctgacaacggcccgctgatggttttacgccataccgcggcccttccggctgcagataaagaaaagctggaacgtttttcgcaatctcacggtctttcactgtatctcgccccgcaaagcgagatactggaacagattcgcggggaagcgccctggtatacgtccgacggtctacgcttagtgttcagtccgcgcgactttattcaggtcaacgacggcgtaaaccagctcatggtgcatacggcgctggaatggctggatatccagcctcaggatcgcgtgctggatctcttttgcggcatgggcaactttaccctgccgctggcaaagcgcgcggcgcaggtcgtgggggttgaaggtgttccggcgctggtggcgaaggggcaagaaaacgcggcgctgaacgcgttgcataatgtgacgttctttcatgaaaatcttgaagaggacgtcacccgccaggcgtgggcgaagcacggttttgataaagttctgctcgacccggcgcgcgccggtgcggcgggcgttatgttacatataattaaattagcgccgcgtcgggtggtgtatgtttcttgtaatccggcgactctggcgcgcgatagcgacgttttattgcaggcgggatataccattcaacgcctggcgatgctggatatgttcccgcataccggtcatctggaatcaatggtgttgtttgagcacaagaatcattcaaatcgcagtgcagcggcatccacaggcgcaggcgactga

SEQ ID NO: 173735 - DNA, 687 bp, Klebsiella oxytoca
atgaccaactacagccttcgtgcccgcatgatgattcttattctggcgccaaccgttctgatcggtctgctgctcagtatattcttcgtcgcacaccgctataacgacctacagcgccagctggaagatgccggagccagtatcatcgaaccgctggcggtctccagtgaatatggcatgaatttgcaaaaccgcgagtcaatcgggcagctgatcagcgtgctgcatcgccgccattccgatattgtgcgcgccatttccatctatgactcgcacaacaggctgtttgtcacctccaactttcagctcgatcccggcgaacttcagctaccaaaaggggcgccttttccccgccgtttaagcgtgattcgtcacggcgatttgatgattttgcgcaccccaattatttcagaaagctattcaccggatgaatcaccgggaagcgatgccaagatgccggacaatatgctgggctacgtggcgctggagctggatctcaaatcggtgcggctgcagcagtacaaagagatcttcatctccagcgtgatgatgctgttctgcatcggcatcgcgctgatcttcggctggcgactgatgcgcgacgtgaccgggccgattcgcaacatggtgaataccgttgaccgcatccgccggggccagcttgatagccgcgtggaaggtttttaa

SEQ ID NO: 173736 - DNA, 2028 bp, Klebsiella oxytoca
atggcgatgtcgttggcggcgtatcatgaagagatgcagcataacgtcgatcaggccacctccgacctgcgtgaaacgcttgaacagatggaaatccagaacgttgagctggacctggcgaaaaaacgcgcgcaggaagcggcgcgaatcaaatccgaattcctcgccaatatgtcccacgagctgcgcactccgcttaacggcgtcattggctttacccgcctgacgctgaaaaccgatttaaataccacccagcgcgatcatctgaccactattgagcgttcagcgaacaatctgctggccatcattaatgatgttctggacttctctaagctcgaagccgggaagctcattctggagagcattccgttcctgctgcgaaattcgctcgacgaggtggtcacgctgttggcgcattcggcgcacgataaggggctggaattgaccctgaacatcaaaaacgatgtgccggataacgtgattggcgacccgctgcgcctgcagcaaattattactaacctgatgggcaacgccattaagttcaccgaacatggcaacattgacgtgctggtggaacagcgcgctatcagcaattcaagagtgcaaatcgaagttcagatccacgataccggcatcggtattcccgagcgcgaccagtcgcgtctgtttcaggctttccgccaggcagacgccagtatttcccgtcgccacggcggaaccgggctggggctggttatcacccagcggctggtaaaagagatgggcggcgatatttccttccatagccagcctaatcgcggctcgacgttctggttccatatcagcctcgatctcaaccctaacgcggtacccgacagcgtaccgacccaatgtctggcgggtaaaaagctggcctacattgaggctaacgcagcggcggcgcagtgcaccatggagctgctggcgacaacgccgctggaggtggtctacagtccgacgatgactgccctaccggatgcccattacgatatcctgctggcgggcattccggtgtcgatacgcgatctgaaccagcatcgcgataagctggccagagcccgtaagcttgccgatcatctgctgctggcgctaccgtgccacgcccaggtgagcgccgaaacgcttaaacacgacggtatcgcagcctgtctgcttaagcccctgacctcaacgcgcttgcttccggcgctgacggccacctgccagacccagccgacgctcctgctgccgcgctccggtagtacaaagctgcccatgacggtaatggccgtcgatgacaatccggcgaatcttaagctcatcggcgctctgcttgaagatttagtccagcatgtcatcctctgcgacagcggccagaacgccgttgaacgagccagagaaatgcagcaggatctgattctgatggatattcaaatgccggaaatggacggcatccgcgcctgcgaattgatccatcagctccctcatcaacagcaaacgccggtgatcgccgtgacggcccatgctctggaagggcagcgagagaaattgctcagcgcggggatgaacgattatctggcgaagcccattgaggaagataagctctacaatctgctgctgcgctaccagccgggacaggccgctgcgccgcaggccgcggcgcagccggttgacctaccggttaaccatgacatcaccctcgactggcagctggcgctacgccaggcggcgatgaaaccggatctggcgcgggaaatgctgcagatgctgctcgcttttatgccggaagtgcgtaacaaggtggaagaacagctggtgggagagcagccggaaggcctactggatctcattcataagctgcacggcagctgtagctacagcggtgtgccgcgcctgaagaaactctgccacactctcgagagccagctgcgcgcgggcaccgccgccgaggagctggagccggagcttctggaactgctggatgaaatggacaacgtcgcgcgggaagcctgtaagctgcagggaatctaa

SEQ ID NO: 173737 - DNA, 1140 bp, Klebsiella oxytoca
atgaagatagtgatcgcaccggattcatacaaggagagcctgagtgcgctggatgttgcaaccgcgatagagcaaggttttcgggaagtttattccgatgcggagtacgtcaaactgccggtcgccgacggtggcgaaggaaccgttgaagccatggttgccgcgacccagggatgccggatagcggtcaccgtcaccggtccgctcggcgagcccgtagaggctttttttggtctttcgggcgataagcagtgcgcgtttattgaaatggcggcggcaagcggtctggagagcgtaccgccggcgcgacgtaaccctcttctgacgacttcatggggtaccggcgagctgattcgccatgcgctggacgcgggcgtcaggcaaattattatcggcatcggcggcagcgcgactaacgatggcggcgccgggatggtgcaggcgctgggggcgaaactgctgacccgggataaccagcagattggcgccggcggacaagcgctggagagcctcgcgcgcatcgacgtgagcgagttagataagcgcctcgccggatgccgcattgacgtcgcttgcgatgtcaccaatccgctgacgggcccgcagggcgcgacggcagtatttggcccgcagaaaggggcgacggcggagatgatcgccagcctcgataaggcgctggcccattttgctgagattatccatcgcgacttagagcttgatgtgttgcatcttgaaggcggcggcgcggcgggcggcatgggcgcgggcctgtatgccttttgcggggctaagctgcggccgggcattgagatcgtgaccgacgctttgcatcttgccgatatcgtggcggatgcggatctggtgatcaccggcgaagggcgcatcgacagccagacgattcacggcaaagtgccggttggcgtggcgcgggtggcaaaacgctataatctgccggttatcgcgattgccgggagcctgacggcggacgtcggcgtagtccatgagcacgggctggatgcggtattcagcgttatttattccatttgcaccctggatgaggcgctggaaaatgccgccgaaaatgtgcgcatgacggcgagaaacgtcgccgctgtgctgaaaatgggccaggtattatag

SEQ ID NO: 173738 - DNA, 1341 bp, Klebsiella oxytoca
atgagcgcacaattttcgacccccgttgtttcttctatgcaggtcattccggtcgcgggtcacgacagcatgctgatgaacctgagcggcgcgcacgccccgttcttcacgcgtaatatcgtggtaatcaaagataattccggccataccggcgtcggcgaaattcccggcggagagaaaatccgcaagacccttgaagatgcgatcccgctggtggtcggtaaaacgctgggtgaatataaaaacgtgctgaccgccgtacgcaatactttcgccgatcgggatgccggcggacgcggtttgcagaccttcgatctgcgtaccacaattcacgtagtgaccgggattgaagcggcgatgcttgacctgctgggccagcatctgggcgtaaacgtggcgtctctgctgggcgatggacagcagcgcagcgaagtggaaatgctgggctatctgttcttcgtcggcaatcgtaaagctacaccgctgccttatcagagccagccggatgacccgtgcgactggtatcgcctgcgtcatgatgaggcgatgaccccggatgcggtggtacgtctggcggaagccgcatatgagaaatatggttttaacgattttaaactgaaaggcggcgtactggccggggaagaggaagcggagtctatcgtcgcgctggctaagcgcttcccgcaggcgcgcgtgaccctcgatccgaacggcgcgtggtcgctggatgaagcgatcaaaattggtaaatacctgaaaggatctctggcctatgcggaagatccgtgcggcgccgagcagggcttctccgggcgagaagtgatggcggagttccgccgcgccaccggactgccgacggcgaccaatatgatcgcgaccgactggcgtcagatgggccacacgctgtcgctgcagtccgtggatattccgctggcggatccgcacttctggaccatgcagggctccgtccgcgtggcgcagatgtgccacgagttcggcctgacctggggctcgcactctaacaaccactttgatatctcgctggcgatgtttacccacgtggcggcagccgcgccgggtaaaattaccgctattgatacgcactggatctggcaggaaggcaaccagcgcctgaccaaagaaccgtttgaaattaaaggcgggatggtacaggtaccggcgaaaccggggctgggcgtggagctcgatatggatcaggtgatgaaagcccatgagctgtatcagaaacacggtctgggcgcgcgcgatgatgcgatgggaatgcagtatttgatcccgaactggacgtttgataacaagcgtccgtgcatggtgcgctaa

SEQ ID NO: 173739 - DNA, 1341 bp, Klebsiella oxytoca
atgacaacgcaatcgagccctattatcaccgatatgaaggttatcccggtggccgggcaggacagtatgctgcttaacatcggcggcgcgcacaatgcgtactttacccgcaatattgtggtgctgaccgataacgccggcaataccggggtcggcgaagcaccgggcggcgaagtgatttatcagacgctggtggatgccatcccgacggtattaggccaggaagtcgcccgcctgaacaaagtggttcagcaggtgcataaaggcaaccaggccgcggactttgatacttttggtaaaggcgcctggacattcgaactgcgggtgaacgcggtggcggcgctggaggctgcgctgctggatctgctgggcaaggcgctcaacgtgccggtttgcgagctgctggggccgggcaagcagcgcgatgaggtgaccgtgctgggctatctgttctacgtgggcgatcgcaccaaaaccgatctgccctatctggaaagcacgccgggcaaccatgagtggtatcgtctacgccatcaggaagcgctgaacagcgaggcggtggtgcgcctggcggaggcctcacaggaccgctacggctttaaagattttaaactgaaaggcggcgtgctgcccggcgagcaggagatcgaaaccgcccgcgcgttgaaaaagcgttttcccgatgcgcgcattacggttgatcccaacggcgcctggctgctggatgaagccatcgccctgtgtaaagggctgaacgaggtgctgacctacgcggaagacccctgcggcgccgaacagggcttctctggccgtgaagtgatggcggagtttcgccgcgccaccggtctgccggtggcaaccaatatgattgccactaactggcgcgaaatgggccacgcggtgatgctgaatgccgtggatattccgctggccgatccgcacttctggaccctttccggcgcggtgcgcgtggcgcagctgtgcgatgactggggcctgacctggggctgccattccaataaccactttgatatttcactggccatgttcacccacgtcggcgcagcggcgccgggtaaccccacggccatcgatacccactggatttggcaggagggagattgccgcctgaccaaaaatccgctggagattaagcacggaaaaattgctgttccggacgcgcctggactcggcgtcgagctggactgggagcaggtgcagaaagcgcatgaggcgtataaaaagctgcctggcggcgcgcgtaatgacgcaggcccaatgcagtacctgatccccggatggacttttgaccgtaaacgccccgttttcggccgtcactga

SEQ ID NO: 173740 - DNA, 1359 bp, Klebsiella oxytoca
atgagttcattaagtcaggcggcaggcggcgctgaaaagcgcaccaatgctcgctactggatagtggtgatgttgtttatcgtcacatccttcaactacggcgaccgcgccaccttatccattgccggttcggagatggccaaagatattggtcttgatgccgttggcatgggctacgtcttttccgcgttctcctgggcctacgtgatcggccagatcccgggcggctggctgcttgaccgcttcggttctaaacgcgtctacttctggtccatttttatctggtccatgtttaccctgctgcagggtttcgtcgatatctttagcggcttcggcattatcgtcgcgctgttcaccctgcgttttcttgtcggcctggccgaagcgccttccttccccggcaacagccggatcgtcgcggcgtggttcccggcgcaggagaggggcacggcggtggctatctttaactccgcgcaatattttgccaccgttatttttgcgccgatcatgggttggctgacgcatgaggtgggctggtcgcacgtgttcttctttatgggcggtctcggcattatcatcagctttgtctggctgaaggtgattcatgaacctaaccagcatccgggtgtaaaccaaaaagagctcgattacatcgccgcaggcggcgcgctgatcaatatggatcaggcggcggccaaagctaaggtgccgtttagcgtaaaatgggggcaaatcaagcagctgctgggttctcgcatgatgattggcgtctatatcggccagtactgcattaacgctttgacctatttctttatcacctggttcccggtttatctggtgcaggcgcgcggcatgtcgatcctgaaggccggttttgtcgcgtcggttccggcgatctgcggtttcgcgggcggggttctcggcgggattatttccgactggctgatgcgtcgtaccggctcgctgaacatcgcacgtaaaacgcctatcgtcatggggatgctgctgtcgatggtgatggtgttctgtaactacgtcaacgtggagtggatgattatcggcttcatggcgctggccttcttcggtaaaggcatcggtgcgctgggctgggcggttatggcggatacggcgccgaaagagatcagcggcctgagcggcggtctgttcaacatgttcggcaatatctccggtatcgtgacgcccattgctatcggctacatcgttggcaccaccggttcgtttaacggcgcgctgatttatgtgggcgttcatgcgctggtggcggtgctgagctatctggtactggtgggcgatattaaacgtatcgaactgaaacctgtcgcaggaaaatcatcatga

SEQ ID NO: 173741 - DNA, 444 bp, Klebsiella oxytoca
atggcagaagtcggaatttttgtcggtacgatgtatggaaattcgctcctggtcgccgaagaggcgcaggctattttgagcggactggggcatcaggcgaaagtctttgaagatcccgaagtcaaagactgggagtcgtataccggaaaatatgcgctggtggtgacatcgaccaccgggcagggcgatttaccggacagcattgtgcctttatacgaaggcatcaaagatatgtatcagccgcatttgcgctatggaattattgccctgggcgatagcacctacgctaacttctgcggcggcggtttgaagtttgatgcgttattgcaggaacagggcggcacgcgcgttggcgatatgctgacgatcgatgccagcgaagatccggaacctgagagcgttgctaacccatgggtagcgcagtgggcgtcgctgcttgattaa

SEQ ID NO: 173742 - DNA, 795 bp, Klebsiella oxytoca
atgctggagattttatatcaggacccgtggctggtagcggtgaacaagccttcgggctggctggtgcatcgtagctggctggatcgtgatgaaaaagtggtggtgatgcagaccgtgcgcgaccagataggccagcacgtgttcaccgctcaccgcctcgacaggccgacttccggcgtgctgctaatgggactgtcgagcgaagcgggaagactgttgtcgcagcagttcgagcagcatcaaatgcagaaacgctatcatgcgatagcccgcggctggttgagcgaagaagcggagcttgattatcctctggttgaggagctggataaaattgccgataagttcgcccgcgaaaataaagatccgcagccggcggtcacccattatcgcggcctggcgacgatagaaatgccggtggcgaccggacgttatcctaccacccgctatagcctggtggagctggaaccgaaaaccggacgtaagcaccagctgcgccgtcatcttgcccatcttcgccatccgattatcggcgacagtaaacacggcgatctgcggcagaatcgcagcgcggccgaacactttggctgcgatcggctaatgcttcatgccagccagctatcgttaacgcatccttttaccggtgaaccgctggttattcgcgctggccttgacgacgtctggatgcgcgcgctgtcgcagtttggctggcgcggccttctcccgttaaatgaaagggttgagtttgccgacgactgcggtcaggatgaagagatacaggtcacttcagggagatag

SEQ ID NO: 173743 - DNA, 330 bp, Klebsiella oxytoca
atgactcttgaccatcgcgtgcgcgagcgcctgctcgccattgaagcgctgctgcgcgaaacggaacactggcaggatagcgctcccgacagccgcgcgtttgccagcgaacagccgttttgcctcgacaccatggagccgcttgaatggctgcagtgggtattaataccgcgcatgcatcagcttctggaaagcggcatgccgctgccgcaaaatttcgccgttgccccctactatgagatggccctggataatgctcatcccgtgcgcgagcgggtgcttaccgagctgcttctgctggatgcgctgtttgccggcggcgacgcctga

SEQ ID NO: 173744 - DNA, 546 bp, Klebsiella oxytoca
gtggatcagcaaaccgcagaagcgctacaagcatttacccaacgttattgtgaggcgtggcagcagcagcgctccagcctgccgcgtagcgaagagctttacggcattccgtcgccgtgcatcagcgccacggatgatgatggcgttttctggcagccgcagccgttttctttagaacaaaacattaacgcggttgaacgggcgctggagattgtggtacaacaaccgcttcatgcttattataccactcagtttgccggcgatatgcaggcgcgttttgccgatgagagcatgacgctgctgcaaacctggagtccggacgacttccagcgggtgcaggaaaatctgattggccatctgctggtgcaaaagcgtttgaagctgtcgcccacgctgtttatcgccacgctggacagcgaactggacgtcatttcggtctgtaatatgagcggcgaagtgatcaaagaaacgctcgggacccgtaaacgtacgaccctttctccctcgcttgcgagtttccttaattcccttaagcccgttctgtaa

SEQ ID NO: 173745 - DNA, 846 bp, Klebsiella oxytoca
atgtcttcttacgataaccatcaggcgctcgccggcctgacgctcggcaaatcaaccgattaccgcgatacttacgacgccagcctgcttcagggcgtaccgcgcagcctgaaccgcgatccgctgggcctgcacgccgatagcctgccgtttcacggcgccgatatctggacgctgtatgaactctcctggctgaatgcgaaaggcctgccgcaggttgccgtgggtcacgttgagctcagcgacacgaccgtgaatctggtggaatcaaaaagctttaagctctatctcaatagctttaaccagacgcgttttgccgactggcaggaggtcgaggcgacgctggcgcgcgatctcagcgcctgtgcgcaaggggaagtcaaggtgtcgctgtatcgcctcgatgaactcgaaggccagccggtggcgcatctgcacggcacctgtattgacgatcaggatattgaaattgataactatcagttcagcgctgattacctgcaggatgccgctggcggtaaagtggttgaagagacgctggtcagccatttactgaaatccaactgcctgattacccaccagcccgactggggttcggtacagatccgctatcgcggggcaaaaatcgatcgcgaaaagctgctgcgctatctggtttcgttccgccatcacaacgaattccacgaacagtgcgtagagcgcatcttcaccgatattcagcgtttctgccagccggaagccctttccgtttatgcgcgctatacgcgacgcggcggcctggacatcaacccgtggcgcagcaacaccgattttgttccggccatcggccgcctcgctcgccaatag

SEQ ID NO: 173746 - DNA, 1368 bp, Klebsiella oxytoca
ttgattacacatgttagcccgcttggttcaatggatatgctgtcgcagctggaagtggatatgcttaaacgcaccgccagcagtgacctgtatcaactctttcgcaactgctcgcttgctgtgctcaactcggggagcctgaccgataacagcaaggagctcctgtctcgttttgaaaacttcgatattaacgtgctgcgtcgcgaacgcggcgtgaagctggaactgattaacccgccggaagatgctttcgttgacgggcgtattatccgttccctgcaggccaacctgtttgccgtactgcgcgatatcctgtttgtctatggccagatccataacaccgtccgcttcccgaatctcgatcttgaaagctcggtgcatatcaccaacctggtgttctctattttgcgcaacgcccgcgccctgcacgtcggcgaagcgccaaatatgattgtctgctggggcggccactcgattaacgaaaacgaatatctctacgctcgccgcgtcggcactcagctgggcctgcgtgagctgaatatctgtaccggctgcgggccgggcgccatggaagcgccgatgaaaggcgcagccgtcggccacgcgcagcagcgctacagagacagccgctttatcggcatgaccgagccgtccattatcgccgccgagccgcctaacccgctggtcaacgagctgatcatcatgccggatatcgagaaacgtctggaagccttcgtgcgcatcgctcacggcattatcatcttcccgggcggcgtaggtacagcggaagagctgctctatctgctgggcattttgatgcatccgtcgaacaagtcgcaggttctgccgctgattcttaccgggccaaaagagagcgccgattatttccgcgtgctggatgagtttatcgtccatacgctgggcgaatccgcccgtcgccactatcgcattatcgttgacgacgccgctgaagtagcccgccagatgaaaaaagcaatgccgatggtgaaagagaatcgtcgcgagaccggcgatgcttacagcttcaactggtcgatgcgcattgctccggatctgcagatgccgttcaatcctacccatgagaatatggccaatctcaaactctatccggaccagccggtagaagtgctggcagcggatctccgccgcgccttctccggtatcgtcgctggtaacgtcaaagaggtgggcatccaggctatcgagaaattcggtccgtataaaattcacggcgacccggcaatgatgcgccgcatggacgatctgctgcagggcttcgtcgctcagcatcgtatgaagctgccgggcggcaccgcctatatcccctgctacgaaatctgttcctga

SEQ ID NO: 173747 - DNA, 1290 bp, Klebsiella oxytoca
atggaaaccactcaaaccagcaccatcgttacggatgctacccgtagcggttggcgtaagacggacaccatgtggatgctgggcctgtacggcacggctatcggcgcgggcgtactgttcctgccgatcaacgccggcgtcggcggtatgatcccgctgatcatcatggcgattctggcctttccgatgaccttcttcgcccaccgcggaatgacccgtttcgtgctgtccggtaagaacccgggcgaagacatcaccgaagtcgtcgaggagcacttcggcgtcggcgcaggtaaactgattaccctgctttactttttcgccatctacccgattctgctggtgtacagcgtggcgatcaccaataccgtcgaaagctttatggcgcaccagttgcacataacgccgccgccgcgcgccattctttccctgattctgattgtcggcatgatgactatcgtgcgcttcggcgagcagatgatcgtcaaagcgatgagcgtgctggtattcccgttcgtggtcgcgctgatgattctggctctgtacctgatcccgcagtggaacggcgcggcgctggaaaccctctccctgagtagcgctaccgcaaccggcaacggcctgtggatgaccctgtggctggcaataccggtgatggtattctcttttaaccactcgccgatcatctcctccttcgccgttgctaaacgcgaagagtacggcgaaggcgctgagaaaaaatgctccagcattctggcccgcgcgcacattatgatggtgctgaccgttatgttcttcgtcttcagctgcgtactgagcctctccccggcggatctggcggcggcaaaagagcagaacatctcgattctgtcttacctggcgaaccactttaacgcgccaatcatcgcctggatggcgccgatcatcgcgatgatcgccatcactaaatccttcctcggccactatctgggcgctcgcgaaggctttaacggcatggtgattaaatccctgcgcggtaaaggcaagtccatcgaaatcaataaactgaacaaaatcactgccctgttcatgctggtcaccacctggattgtggcaacgctgaacccaagcatcctcgggatgatcgaaaccctgggcggcccgatcattgcgatgattctgttcctgatgccgatgtacgccattcagaaagtcccggctatgcgcaaatacagcggccacgtcagcaacgttttcgtggtgattatgggcctgattgctatctccgcgattttctactctctgtttagctaa

SEQ ID NO: 173748 - DNA, 1368 bp, Klebsiella oxytoca
atgatcagcgtattcgatatttttaaaatcggcattggcccttccagctcccacaccgttggaccgatgaaagcgggcaaacaattcacggacgatcttattgagcgcgggctgctctccgaggtgaccaaagtcatcgtcgatgtctacggctccctttccctgaccggtaaaggccaccataccgacatcgcgattattatgggactggcgggcaacctgccggataccgtcgacattgacgctatccccagttttatccaggacgtcaacacccatggccgcctgatgctggcaaacggccagcaggaagtggcgttcccggtcgatcagtgcatgaatttccatgccgacaatctgtcgctgcatgagaacggcatgcgaattaccgccctcgccggcgaccaggttctctacagccagacgtactactccatcggcggcgggtttatcgtcgacgaagcgcatttcggcgtcacccgcgaagcgccggtcgccgtaccttttccgtataaaaacgccgccgacctccagcgccactgccgtgaaagcgggctgtcgctttccggtctgatgatgcaaaacgagctggcgctgcacagtaaagaagcgctggaacagcactttgccgccgtctgggaagtgatgagcagcggcattgagcgcggcatcaccaccgagggcgttctgccgggcaagctgcgggttccccgccgcgccgctgcgctgcgccggatgctggtaagccaggacaacaccagcagcgacccgatggcggtcgttgactggattaatatgttcgccctggcggttaacgaagagaacgccgccggcggacgcgtcgtgaccgcaccaaccaacggcgcctgcggcatcgtgcccgcggtactggcctactacgacaaatttatccgcaaagtgaacgccaactcgctggcgcgctatatgctggtcgccagcgccattggctcactttataagatgaacgcctcgatttccggcgctgaagtgggctgccagggcgaagtcggcgttgcctgttcaatggctgcagccggactggcggaactgctgggcggcagcccgggccaggtgtgcatcgccgccgaaatcggtatggagcacaacctcggtctgacctgcgacccggtcgccggtcaggtgcaggtgccgtgcatcgagcgtaacgctatcgctgcggttaaagcggtcaacgccgcgcgcatggcgctgcgccgcaccagcgagccgcgggtgtgcctcgataaagtcatcgagaccatgtacgaaacgggcaaagatatgaacgccaaatatcgtgaaacctcacgcggcggcctggccatgaagattgtcgcctgcgattaa

SEQ ID NO: 173749 - DNA, 942 bp, Klebsiella oxytoca
atgctcagactgtctcgtccggcgctgctgctcatgctggctggcgtatccgcttccgcgctggcgaaaacgccggaaaccgtcaatatcggctatcagaaagccaatatcttcgcgctgctgaaatatcgcggcaccctcgatgaaacgtttaaaaagcagggcatcgccgtgcgctggattgaattccccgccgggccgcaaatgctggaagggctaaacgtaggcagcatcgacctcgccgcaaccggtgatgcgccgccggcctttgcccaggcggcgaaggcagatctggtctacttagcccactcgccggcgaatccaaaaaccgaggccatcgtagtggcggaaaactcggcgattaagagcgtggctgaccttaagggcaagcgcgtggggctcaacaaaggctccgacgtaaactacctgctggtagctgcgctggagaaagccggattaagctataaagatatcactccggtctatttgccgcctgccgacgcccgcgccgccttccagcgcggcgcgattgacgcatgggttatctgggatccgttcctcgccgaggtggaaacaaacgccaaagcccgacagatccgcaatgccgaagggctggtaccgcactataccttctacctggccagccgcaaatttgccgacgcttatcctgaaaccgcgaagcaggtggtcgatgaactgggtaaactgagcgaatgggccaacagccatcaggacgatgccgccgggatcctctcggcctctaccgggctggataaggctatctggctgaagacgctggcgcgcctgccctatggcgccgagcggatgacgcctgcggtctataacgagcagcaggcgctggcggacactttcacccgcatcggtctgctaccggtgaaggtagacgtccgcagcgcgacctggtcactggataagcagtaa

SEQ ID NO: 173750 - DNA, 477 bp, Klebsiella oxytoca
atgaaattaatcagtcatgatttgcaggacggcgagaagctgcctaatcgccatgtcttcaacggcatgggctacgatggcgataatatttcaccgcacctggcgtgggatgaggtgccggccggcactaaaagctttgtggtgacctgtttcgatcccgatgcgccgaccggttccggctggtggcactggctggtggccaaccttcccgccgatacccgcgtgttaccgcagggagccggttccggccaggccgaactgcccgaagaggcgattcagactcgtaccgatttcggtcagaccggatacggcggcgcagcgccgccgaagggcgagacccatcgttatatctttaccgtccacgcgctggacgtcgaaaaaattgcagtcgatgagggcgcaagcggcgcgatggtcggctttaacgtccatttccacagcctcggcagcgcgtcgattaccgccctgtttagctaa

SEQ ID NO: 173751 - DNA, 1308 bp, Klebsiella oxytoca
atggtttacaagtcgattatgacaacggacgatctcgctttcgatcggcgccacatctggcacccttacacttcaatgacttcaccgctgccggtctatccggtagtggccgcccacggctgcgagctgaccctcgccggcggcgagcagctggttgacggcatgtcgtcctggtgggcggcgattcatggctacaatcacccgcgcctgaatgcggcgatgaaagcgcagatcgaccagatgtcgcacgtcatgtttggtgggataacccacccttcggcggtggccctgtgccgccagctggtggcgatgaccccggaaagccttgagtgcgtgttcctcgccgattccggctccgttgccgtcgaagtggcgatgaaaatggcgctacagtactggcaggcgaagggcgacccgcgccggcgctttcttactttccgcaacggctatcacggcgataccttcggcgcgatgtcggtctgcgatccgacgaactcaatgcacagcctgtggcaaggttatttgccggataacctcttcgccccggcgccgcagagccgcttcgacggcgactgggatgagcgggatatggcgccgttcgcccgactgatggccgcccatcgtcatgaaatcgccgcggtgatcctcgagccgattgttcagggcgcgggcggaatgcggatgtaccatcccgagtggctccggcggatccgcagaatgtgcgatcgcgaaggtatcctgctgatcgccgatgagattgccaccgggttcggccgcaccggtaagctgtttgcctgcgagcacgcggggattacggcggatattctgtgccttggcaaagcgctaaccggcggtaccatgacgctctccgccaccctcaccacgcgtcaggtggcggaaaccatcagcgacggtgaagcgggctgctttatgcacggaccgacctttatgggcaatccgctggcctgcgcggtggcgaccgagagtctgcgtctgctggaaagcggcgagtggcagcagcaggtggcggggatcggagtgcagctcaacgccgagctggccccggcgcgcgaatctgaacaggttgccgacgtgcgggtcttaggggcgattggcgtggttgagacgcatcgaccggttaatatggccgccctgcagcgcttcttcgtcgaacaaggcgtgtggatacgtccgttcggtcgcctgatctatctgatgccgccgtacatcattacgccggagcagctaagccgcctgacgcgggcggttaacatcgccgttcaggatgaaacattttttagcgaataa

SEQ ID NO: 173752 - DNA, 1041 bp, Klebsiella oxytoca
atggctcaccacccacgttggacaatgtcgcaagtcactgagttatttaataaaccatttctggatctgctgtttgaagcgcagcaggtccaccgtcaacacttcgacccgcgccaggttcaggtcagcacgctgctgtcgattaagaccggcgcctgcccggaagattgcaaatactgcccgcaaagcgcgcgctataaaaccggccttgaatccgaacgcctgatggaggttgagcaggtgctggagtcggcgcggcaggcgaaacaagccggttcaacccgcttctgtatgggcgcggcgtggaagaacccgaacgatcgcgatatgccgtatcttgagcagatggtaaaaggggtgaaagcgctggggctggaggcatgtatgacgcttggcacgctgaacgagagccaggcgcagcgtctggcaggcgccggcctggattactacaaccacaacctcgatacctcgccggagttctacggcaatattattaccacccgcacttatcaggagcgcctcgataccctcgacaaagtgcgcgatgccggaattaaagtgtgctccggcggtattgtcgggctcggggaaacggtcaaagaccgtgccgggctgctgctgcagttggccaatctgccgacgccgccggaaagcgtgccgatcaatatgctggtaaaggtcaaaggcacgccgctggcggataatgacgacgttgatgcctttgattttattcgtactatcgccattgcgcgcatcatgatgccgacctcgcacgtgcgcctttccgccggtcgcgaacagatgaacgaacagacccaggcgatgtgctttatggccggggcgaactcgattttctacggctgcaagctgctgaccacgccaaacccggaagaggataaagacctgcagctgttccgcaagctggggatcaacccgcagcagaccgcggtgctggaaggcgataacgcccaacagcagcgcctggagcaggcgttgatgaacccggataccgaggaatattacaacgcggcggcgctatga

SEQ ID NO: 173753 - DNA, 1158 bp, Klebsiella oxytoca
atgagctggcagcaccgtatcgaacaagcgctggcggagcggcaggcggcggatgcgttgcgccgtcgcctgccggtgacccagggcgcaggacgctggcttattcgtgaagggcagcgctggctcaatttttccagcaacgattatctgggcctcagtcagcatccaacgatcgtcaaggcctggcagcagggcgcggagcgctacggcgtcggcagcggcggttccggccacgtcagcggctacagcgaggcgcaccacgtgctggaagaccagctggccgactggctgggctatccgcgcgcgctgctgtttatttccggctttgccgcgaatcaggcggtgattgccgctctcgcgggcaaagaggatcggattgtcgccgatcgtctcagccacgcctcgttgctggaagccgccagccttagcccggcgcagctgcggcgttttcagcacaatgactcccgacatctgcgggaactgctggcgaaaccgctatccggtcagcagctggtggtgactgaaggcatttttagcatggacggcgatagcgcgccgctggcggaggttcagcaagcgtcgcgggaggccggggcgcttctgctggttgacgacgcgcacggtatcggcgcgctcggcgaagaggggcgaggcagctgttatagccagcaggttcatccggatttgctgatcgtcaccttcggtaaagcgtttggcgtcagcggggcggcggtcctctgtagcgaagcgctggcggattatctgctgcagtttgcccgccatctcatttacagcaccgccatgtccccggcgcaggcagtggcgctcagcgccgcgcttgaggtgatacgtagcgacgatggccggcagcggcgggaaaagctggctggccatattgcagattttcgccgcgaaatgacccattattccggcgaactgacccattctgacagcgcgattcagccgctgatcgtcggcgataacgctcgcgcgctgcggctggcagcctgtctacgcgagcgcggctgctgggcgacggcaatccgcccgccgacggttcccgtcggtagcgcccgcctgcgcctgacgttgaccgctgcgcacgattccgccgatattgcccggctgctggaggtactgcatgacggtggtgaataa

SEQ ID NO: 173754 - DNA, 756 bp, Klebsiella oxytoca
atgacggtggtgaataaacgcgcggtagcggcggcgtttggccgcgcggcgggacagtacgccctgcatgacgaattacagcggcgtagcgcctctctgctgctggcgcagctcgatattaaaaccttccccgaggtgctggacgcgggttgcggtcccggtagcatgagccgcttctggcttgatgcggggagtcgggtgacggcgctggacctttccgtcgacatgctggctgaagcccgccgcggcggctgcgcgcatcgctacgtcgaaggcgacatcgaagcgctgccgctggcgaacggctgcgtcgacctggcgtggagcaacctggcggtgcagtggtgcgacaacctcgtcaccgcccttgacgaactttcccgggtggtgcggcccggcggacgcgtggcgttcagcaccctactggcgggctctttgccggagctgaaccaggcctggcgagctatcgatgagcagccgcacgccaaccgttttctcagcgagcaggcggtgcgtgatgcgctggccggtcgccgcgcgaccggccgcgtccatgccattacgctgccgtttaccgatgcgctcagcgcgatgcgctcgctgaaaggcatcggcgctacccatctgcaccacggacgcagccctgcgccgctcagccgcggtaagctgcggcagcttcagctcgcctggccgcagcagcagggacaaagtccgctgacgtaccaactttttacaggagtcatcgaacgtgattaa

SEQ ID NO: 173755 - DNA, 723 bp, Klebsiella oxytoca
gtgattaaacgttttttcgttaccggtaccgacaccgaagtggggaaaaccgtcgccagctgcgcgctgctgcaggcggctaaccgcgcgggatttcatagcgcgggctataaaccggtggcctccggcagcgaccatacggcgcagggattgcgcaatgaagatgcgttggccctgcagcgcaatagccgcgcggtgctgcgctacgaacaggttaatccctttacctttgccgagccgacctcgccgcatatcattagcgccgatgaagggaggccgattgacgccgccgcgatctctgcgggtctgcgcgaactggaggaacggtctgattgggtactggtggaaggggcggggggctggtttacgccgctgtcagaaacgctgacctttgccgattgggtacaggcggagcggctaccggtgattctcgtcgtcggggtcaagctggggtgcatcaaccacgcgatgctgaccgctcaggcggtgcagcaggccggactgccgctggcgggatggatcgccaacgatatccagccgccgggcaagcgtcactctgaatatctggcaacgctagagcgcgtactgcccgcgccgctgcttggagaaattccgtggctggcgaatgcgcagcagcgcgaggatctcggccagtatctcgatctcagcgcgctggatccggcgtcatccattttgccagcagcggcgcatccaactgcataa

SEQ ID NO: 173756 - DNA, 723 bp, Klebsiella oxytoca
atgttgagtctacgtgccgtgaatcactattacggaagccagcacacgctatggaatgttgaccttgaactctggccggggaaatgcacctgcgtgatggggcgtcagggcatgggtaaaaccacgctggttaactgtattaccgggcatctgccggtcgccagcggcagtatgacctggcaggacgcgggggcggctccttatgacctgatgccgctctccgcccagtcgcgcagcgctatcggcataggctacgtcccgcaggataaacgtattttttcgcagctaagcgttgaggaaaatctgcatatagcccttgctgcgggcggcgaatccgcatcgggcatggccggagagatttatgagctctttccggagctttacgcgctgcgccaaagtaaagggattaccctgaccgccgacgaccagtaccagctggcgctggcgagggcgttgataacccgcccgcgcctgctgatcctcgacgaaccctcacgcggcggcggcccgcgctttttgcacaagctcggggatttactggtacggttgaaccgcgatattggcctgacggtgctgatcgccgaacaacacctgccgtttatccgtcgggtggcggatcgtttctgtctcctgcactgcggacgcagcgtggcccagggcgacgttatgcagttggatgcgccgctgctggcaaaatggatgacgccggatccagcgcgctga

SEQ ID NO: 173757 - DNA, 2016 bp, Klebsiella oxytoca
atgagtaaaccgttcaagctgcattctgctttccgtccctccggcgaccagccggaagccattcgtcgcctggaagaggggctggaagatggcctggcgcatcaaacgctgctcggggtgaccggctcaggtaaaacttttaccatcgccaacgtcattgccgacctgcagcgcccgacgatggtgctggcgccgaacaaaacgctggcggcgcagctatacggcgagatgaaagagttcttcccggagaacgcggtggagtatttcgtctcgtactacgactactatcagccggaagcctatgtgccaagctcggacaccttcatcgagaaagatgcttcggtaaacgaacatattgaacagatgcgtctgtcggcaaccaaagcgctgctggagcgtcgtgacgtggtggtggttgcctcggtctccgccatctacggcctcggcgatccggacctctatctgaagatgatgctgcacctgacggtcggcatgatcatcgaccagcgcgccattttgcgccgcctggctgaactgcagtatacccgcaacgatcaggccttccagcggggtaccttccgcgtgcgcggcgaggtgatcgatatcttcccggcggagtctgacgacgtcgcgctgcgcgtagagctgttcgatgaagaagtcgagcgcctgtcgctgttcgacccgctcaccggccacatcgagtcgacgatcccgcgctttaccgtctacccgaaaacccactacgtcactccgcgcgaacgtattgtccaggcgatggaagagatcaaaaccgagctggcggagcggcgtaaggcgctgctggaaaacaataagctgctggaagagcagcgcctcagccagcgtacccagttcgatctcgaaatgatgaacgagctaggctactgctcggggattgaaaactactcgcgctatctgtcagggcgcgggccgggcgagccgccgcccacgctgttcgactacctgccggcggatggtctgctggtgattgatgaatcccacgtcacgattccgcaaatcggcggcatgtaccgcggagaccgggcgcgtaaagagacgctggtggagtacggtttccgtctgccgtccgcgctggataaccgtccgatgaagtttgaagagtttgaggccctggcgccgcaaacgatctacgtttcggcaacgccgggcgcctatgagctggataaatccggcgacgaagtcgtcgaccaggttgtccgcccgaccgggctactggatccggtcatcgaagtgcgcccggtagccactcaggtcgacgacctgctgtcggaaattcgcctgcgtaccgcgatcaacgagcgcgtattggtcaccacgctgaccaaacggatggcggaagacttaaccgaatatctggaagagcacggcgagcgggtgcgctacctgcattcggatatcgataccgtcgagcgtatggagattatccgcgatctgcgcctcggcgagtttgacgtgctggtagggatcaacctcctgcgtgaaggtctggatatgccggaagtctcgctggtggcgatcctggacgccgataaagaaggcttcctgcgctctgaacgctcgctgattcagaccattggccgcgcggcgcgcaacatcaacggtaaagcgattctctatggcgataaaattacgccgtcaatggcgaaagcgatcggtgaaaccgaacgtcgccgcgagaagcagcaggcctataacgaagagcacggtattgttccgcaggggctgaataagaaagtggtcgacattctggcgctcggtcagaatattgccaaaacgaaaactaaggggcgcggcaagtctcgctcgccggttgaggcggatgtcgtggcgctcacgccgaaggcgctgcagcagaagatccacgagctggaagcgcagatgatgcagcacgcgcagaatctggagttcgaagaggcggcgcaaattcgcgaccagcttcatcagctgcgcgatctgtttatcgccgcttcgtag

SEQ ID NO: 173758 - DNA, 1098 bp, Klebsiella oxytoca
atggctctgtttgtcagtaaaaactggaccatgcgccatcggctgctgctgaccattggcgcgatactggcggtttgccagctcatcagcgtgttctggctgtggcatgaaagccaggaacagattcagctgctggtggccagcgccatcgaaggtcataataatcagaagcatattgagcatgaggttcgtgaagcggtagccagtctgctgatcccgagcctgctgattatcggcctggcgctctatatctccctgctggcggtgaaaaaaatcaccaggccgctatcccgcctccagcaggaacttgaaagccgtaccccggataacctgcggcctatcgccctgcaagagtcggtgcccgaagtcaccgcggtcactaccgcgattaatcagctggtctcccgccttaacttaacgctcgatcgcgaacgcctgtttaccgccgacgtcgcccatgagctgcgcacgcccctggccggattgcgtctgcatctggagctgctggcgaaagtgcatggcgtaagcgtcgccccgctgatccagcgcctcgatcagatgaccaacagcattaatcaactgcttcagctggcgcgggtcggccagtctttctccgccggcagctatcagcaggtcaggctgaaggaagatgtgatcgagccgctgcgcagcgaactggagacgatgctggaacagcgtcagcaaaagctggtggtcagcgacaaagagggtgaagcgatagtgtcaggtgacgccacgctggtgcaggtgattttacgcaatctggtagaaaacgcgcatcgttacagcccgacgggttcaacgattaaagtgtcgatagcccccggctccacgccggttctggcggtagaagatgaaggtccgggcattgatgaggccaaaagcggtgaattgagcaaagcgttcgtccgcatggacagccgctacggtggtatcgggctcgggttaagcatcgtcacccgcatcgcccagctgcacgacgcccagttctttttacataaccgtcagcccgggcccggcgttcgcgcgtgggtgctttttcccgacacggtccgtcagaacgtcagcacccattga

SEQ ID NO: 173759 - DNA, 672 bp, Klebsiella oxytoca
atgaaaattttagtcattgaagacgatgcgctcctgttacaaggattaattctggcgatgcaaagcgagggctacgtgtgcgacggcgtctctaccgcccacgaagccgcgctctcgctggccagcaaccactacagtctgatggtgcttgacctcgggctgcccgatgaggacggcctgcactttctggcacgcatgcggcgagagaagtttagccagccggtgctgatcctcaccgcccgcgataccgtcgatgaacgtattagcggcctggataccggcgcggatgactatctggttaaacccttcgctcttgaagagcttaacgcgcgcatccgcgccctgctgcgtcgccacaacaatcagggcgataacgagctgactatcggtaacctgcgcctgaacgtcacccggcggctggtctggctcggcgaacagtccctggatctaaccccgaaagagtacgcgctgctctcccgcctgatgatgaaggcgggcagtccggtacaccgcgaaattctttataacgatatctacagctgggacaacgaaccggccactaatacgctggaagtgcatatccataatttacgcgataaggtgggtaaatcgcggatccgcaccgtccgcggcttcggctatatgctggtcgataatacaggagccgaataa

SEQ ID NO: 173760 - DNA, 1644 bp, Klebsiella oxytoca
atgtcgttattttctttacgtcggccggtactcagccgtacggcctatttgcttctgttcgcctgctatatcggcctcgcgctgaatcttgctttctatcgccaggcatttaccctgctgccggttaacggtctgcataactggctggtattcctcagtatgccgatagtggccatcagcgtgatgaatatcatcaccactctcgcctcgttcctgaagctcgaccgcctcgtggttagcctgtttattttgctcagcgcctcggcccagtattttatctggaccttcggggtggttatcgatcgggcgatgattaccaatattttcgataccacgcccgcggagagctttgcgctgctctccgggaaaatggtgctgatactggggctttccggcattctggccgtcgtcgcggcatggtggatcaaaattcgcaaaccgcagacgctttggcgcagtcttgccgtacggctggtgagcatcgcggtttcagcgctgctgattattctggtcgccgccctcttctataaagattacgcttcgctgtttcgcaacaacaaagagctggtaaagtccctgagcccgtcaaacagcattgtggcggtgaattcatggtatgcgcataacagaatggacaatcttccgctggtcaaaattggcgaagacgccgttcagaagccgcagatgcgcagcggaccgcggaaaaatctgaccattgtagtgttaggtgaaacttcgcgggcggccaacttctccctgaacggctactctcgcgagaccaacccgcgtctgaagcaggataacgtgatctatttcgctaatacgacttcctgcggcaccgctaccgcggtttccgtcccctgcatgttctctaatatgccgcgcgcccactatgatgaagagctggcgcatcatcaggaaggcgtgctggatatcctgcaacgggcgggaattaaagtgcagtggaatgacaacgacggcggctgtaaaggggcctgcgaccgggtgccgcacgaaaacgtcaccgatcttaagctgagcggccagtgcatcgacggcgagtgctacgacgaagtgctgttccataatctggatagctatatcgataatctacagcaggacgggattatcgttctgcataccatcggcagccacgggccgacctactacaatcgctatccggcgcagtttaaacagtttacgccgacctgcgataccaatgagatccagagctgcacccagcaacagctcactaatacctacgacaacacgattttgtatgtcgattatgtggtcgacaaagcgataaaattactgcagtcgaagcaggataaatttaccaccagcctggtatatctctcggatcacggagagtcgcttggcgaggatggggtgtatttgcacgggctgccgtggtccattgcgccggatacgcaaaaacatgtgcccatgctgctgtggttgtcagcggattatcaacagcgctatggggtctccagccagtgtttgcagcaaaaagcgaaaacccaaacgtattcgcaggataaccttttctccaccctgctcggtctgctcggggtcagcactcacgagtaccaggcaacagacgatattttaacgccatgtagagaggcaggccgatga

SEQ ID NO: 173761 - DNA, 906 bp, Klebsiella oxytoca
atgcgcaatcgtactttcgccgatcttgatcgcgttgtggctctcggcggcggacacgggctgggacgggtaatgtcatcgctttcttcgctgggttcgcgcctgacgggcattgtgactacaaccgataacggcggatcaacaggacgtattcgccgcgcggaaggcggcatcgcctggggcgatatgcgcaactgtattaatcagttaattgctgaacccagcgtggcctcggcgatgtttgaataccgttttagcggtaacggcgaactttccgggcataacctcggaaacctgatgcttaaggccctcgatcatctgagcgttcggccgcttgaagcgatcaatttgatccgcaatttactgaaggtcgatgcgtttctgatcccgatgtcggaacagccggtcgatctgatggctatcgatcaggacgggcacgaaatttacggcgaagtcaatatcgatcagttggcctgcgtaccgcgcgagcttatgctctccccgccggtgcccacaacccgggaggcgctagaagctatcgccgaagccgatttaatcctcattggccccggcagtttctataccagcctgatgccgattttgctgcttgatgaactggcgcaagcgctgcgccgcacgcccgcgccaatggtatttatcgataacctcggcaaagagcatagcccggcggccagcctgacgctggccgacagggtcgccattatggagcaacaaatcggcaaacgagtaattgacgcgctggttgtcggcccgaaagccgataccgcaggggttgaacagcgggtcatcattcagacgccgctggacgccagcgatgtgccctatcgccacgatcggcagctattacgcaacgcgctggaacaggccattcaggcgttaggttaa

SEQ ID NO: 173762 - DNA, 990 bp, Klebsiella oxytoca
atggcttcacagcttaccgatgcatttgcgcggaagttttactatctgcgtttgtcgattaccgacgtatgcaactttcgttgcacctactgtctccccgatggctataagcccggcgccgtcaccaataaaggctttctcagcgtcgatgaagtgcgtcgcgtcacgcgggctttctccgctctgggaaccgaaaaggtgcgcctgaccggcggtgaaccctctctgcgacgcgattttaccgacatcatcgccgccgtgcgggaaaacccctctattcgccagattgcggtcaccactaacggctaccggctggcacgggatgttgaaagctggcgcgatgccggactgacggcgattaacgtcagcgtggatagcctcgacgcccgtcagtttcatgctataaccggccaggacaaatttcgtcaggtgatggacggcatcgatgccgcatttgccgctggcttcgaaaaagtgaaggtcaataccgtgctgatgcgcgatgttaaccatcatcagcttgatacctttctcgcgtggatccagccgcgccgcattcagctacgttttatcgaattgatggaaaccggcgaaggcagtgaactgttccgccgccatcatatatccggcatggtgctgcgtgatgaattgctgcgccgcggctggatccatcagatccgccagcgcagcgatggtccggcgcaggtgttttgccaccccgactatgccggggaaatcggcctgatcatgccttatgaaaaagacttctgcgccacctgcaaccgtctgcgcgtctcttccgtaggaaaactgcacctgtgcctgtttggcgaaggcggcgtcgatctgcgcgatctgcttgccgatgagcagcagcagccggcgctggaagcgcggatttccgaagcgttaacgcataaaaaacagacccatttcctgcatcagggcaacaccggtattacccagaacctgtcgtatattggcggataa

SEQ ID NO: 173763 - DNA, 513 bp, Klebsiella oxytoca
atgagtcaggccagcgctgagtttatcccgacccgtattgctattctcaccgtttccagccgacgcggcgaagaggacgacacctccggccactggctgcgcgatgccgcccaggaggcggggcacgtcatcgtcgataaggcgattgttaaagagaaccgctacgccattcgcgcccaggtatcggcgtggattgccggcgatgaggtgcaggtggtgctgattaccggcggtaccggctttaccgacggcgaccaggcgccggaagcgctgctgccgctgtttgaccgcgaggtggaaggattcggtgaggtattccgcatgctctcctttgaggagattggcacctcgaccctgcaatcccgcgccgttgccggggtagccaaccgcacgctgatttttgccatgcctggttcaaccaaggcctgtcgtaccgcatgggacaatatcattgcgccgcagctcgatgcgcgcacgcgcccttgcaactttatctctcatcttaagaagtag

SEQ ID NO: 173764 - DNA, 489 bp, Klebsiella oxytoca
atgtcacagctgacccatattaacgccgccggcgaagcgcacatggtcgatgtctcagggaaagcggagacggttcgcgaggcgcgcgccgaggcctatgttgaaatgcaggcgacgacgctggcgatgattatcgacggcagtcatcacaaaggcgacgtcttcgccaccgcgcgtatcgccgggattcaggcggccaaacgcacctgggagctgatcccgctttgtcatccgctgatgctgagcaaagtcgaagtgaatctgcaggcgcagcccgagcacaaccgggtgcgtatcgaatccctgtgccgtttgaccggtaaaaccggcgtcgagatggaagctctgaccgccgcttccgttgccgcgctgaccatttacgatatgtgcaaggcggtgcagaaagatatggtgattggcccggtgcgcctgctggcgaaaagcggcggtaagtccggcgatttcagagtggaagctagccatgattaa

SEQ ID NO: 173765 - DNA, 249 bp, Klebsiella oxytoca
atgattaaagttcttttttttgcccaggtgcgcgaactactcggcaccgactcactgactctcgatccgaacgggctaactacggttgaagccgttcgccagcagctcatcgcccgcggcgaccgctgggcgctggcgctggaagagggcaaactgctggcggcggtaaatcagacgctgacgacctttgatcatccgctggcgcccggggatgaagtggcatttttcccgccggttaccgggggctaa

SEQ ID NO: 173766 - DNA, 453 bp, Klebsiella oxytoca
atgacgcagacgcgtattattgtcagccatgaccgctttaaagtcggcgaggaatatccctggctggccgagcgcgatgaagacggcgcggtggtgacgttcaccggtaaagtccgcaaccacaaccttggcgacagcgtcaaagcgctgacccttgagcactatccgggaatgacggaaaaatcgctggcggagatcgtggaacaggcgcgcgagcgctggccgctgggccgggtgacggtgattcatcgtatcggcgaaatgtggcccggggaagagattgtctttgtcggcgtcaccagcgcccatcgcggcagcgcgtttgcggcgggagagtttattatggattacctgaagacccgcgcgccgttctggaagcgcgaggcgacgccggaaggcgagcgctgggtggatgcgcgagatagcgaccgcaaggcggcagaacgctggtag

SEQ ID NO: 173767 - DNA, 705 bp, Klebsiella oxytoca
atggacagatatcctcgttccggtaccatcgtccaggggcgcagcgggctacaaacttatatggcgcaggtatacggctggatgacggtcggactgctgctcacggcgtttatcgcgtggtttgccgctaacaccccggcggtgatgatgtttgttttttccagcaaaattaccttctttgggctaattatcgcccagttggggttggtgttcgtgctctcgggcatggtgcagcgcctcagcgccggtatggcgacgaccctgtttatgctctattcggcgctaacggggctcaccttatccagtatattcctcgtctatacctactcatcgatcgccagtaccttcgtggttgccggcgggatgtttggcgtgatgagcctttacggctataccactaaacgcgatctgagcggcttcggcaatatgctgtttatggcgctcatcggtatcgtgctggcgtcgctggttaacttctggctcaagagtgaagcgctgatgtgggcggtgacctacatcggggtgatcgtattcgttggcctgaccgcctatgacacccagaagctgaaaaatatcggcgagcagattgacgttcgcgatacgtcgacgctgcgtaaatactcgattcttggggctctgacgctgtatctggactttatcaacctgttcctgatgctgctgcgcattttcggcaaccgtcgttaa

SEQ ID NO: 173768 - DNA, 969 bp, Klebsiella oxytoca
atggcgaaatctcaccctcgctggcggatggcgaaaaaaatcctgacggtgctcttttttatcgccgtcgttgtgctgctggtcgtttacgcacagaaaatcgactggcaggaagtgtggaaagtgattcgtgattacaaccgtacggcgctgctcagcgccataggcctggttatcgccagctacctgatctatggctgctacgacctgctgggacgcgcctactgtggccacaagctggctaaacgccaggtgatgctggtgtcgtttatttgctatgcctttaacctgacgctcagcacctgggtgggtgggattggtatgcgctatcggctctactcgcgcctcggcctgagcggcgcaaccattacccgaattttttcgctgagcattaccaccaactggctgggctatattctgctcggcggcatcatttttagctccggcatggtgaaggtgcccgagcgctggtatatcagtcagtcgtcgctgcaaattctcggcgtcattttgctgctgatttccgcgttctatttatgggcctgcgcctttgctaaaaagcgccatctgacgataaaaggccagcggctggttctgccctcctggcgcttcgcgatattgcagatggcggtttccagcctgaactggatggcgatgggggcgattatctggctactgctgggtccacaggtggactatttcctcgtgctcggcgtgctgctggtcagcagcattgcgggagttatcgtgcatattccggcagggattggcgtgcttgaggcggtgtttatcgccatgctttccggcgaagagatttcgcgcggcgcgatcatcgccgccctgctcgcctatcgcgcgctgtactacttcctgccgctgctgctggcgaccatcggctacctgattctggagagccgggcaaagcatctgcgggcgaaaaaccagcgcaagctggcgggtgagaagtaa

SEQ ID NO: 173769 - DNA, 1245 bp, Klebsiella oxytoca
gtgaaatgcagctggcaggaaggaaaccgcattcggctattagaaaatggcgataactattatccggcattatttgccgctattgatcgcgcgcagcagcgggtgattctggaatcctttatctggttcgaggatgacgtcggcaagcagctgcatgccgtgttgctcaaagcggcccagcgcggcgtgcgcgtagaagtcctactggacggttacggctctccggatttgagcgaaagctttgtgggcgaactgacgtcggccggggtgatttttcgctactacgatccgcgcccgcggctgctcggcatgcgcaccaatttattccgccgcatgcatcgtaaaatcgtggtgatcgacgacgttaccgcctttgtcggcggaattaactactccgccgagcatatgaccgattacggtcccgaggccaaacaggactacgccgtgcaggttgaagggccggtggtgctcgacattctgcagtttgaactggaaaacctgcccaccagcgaagccacccgccgctggtggcgccgccgtcggcataagcccgaagtcaaccgcaatcccggcgaggctcaagcgctgtttatctggcgggataatcaggatcatcgcgatgatatcgaacgccactatctgaaaatgctgaccaccgcccgccgggaagtgattatcgccaacgcctactttttccccggctatcggctgctgcatgcgatgcgcaacgctgcccgccgcggcgtacgcgtcaagcttattgtccagggcgaaccggatatcccgattgttaaattcggcgcacgtctgctgtaccactacctggtcaaaggcggcgtgcagatttttgaatatcgccgccgtccgctgcacggcaaagtggcgctggcggacgaccactgggccaccgtcggctccagcaacctcgacccgctcagcctgtcactcaatctggaagccaacctggtgatacacgaccgcgaattcaaccagacgttgcgcgataatctcaatggcttaatcgccaacgactgccgcgaagtggataagcgcattttgtcgaaacgaacctggtggcggctcgggattagcgtgctggcgttccacttcctgcgccacttccccgcgtgggtcggatggcttccggcccatacgcccctgctgtcgcgcgttcagcctccggttcagccagaaattgaaacccaggatcgcgtggacccggaaaaccaggaggtcaaatcctga

SEQ ID NO: 173770 - DNA, 750 bp, Klebsiella oxytoca
atgccgcgattttcgctaaacgtgctgacaattaacactcataaagggttcactgccttcaatcgccgctttattttacccgagctgcgcgaagcggtgcgtagcgtcagcgccgacattgtttgcctgcaggaggtgatgggtgcgcacgaaattcatccgctgcatatcgaaaactggccggatacgacccactatgaatttcttgccgataccatgtggagcgattacgcctacggtcgcaatgcggtttatccggaagggcatcacggcaacgcggtactttctcgctttcctatagaacattatcaaaatctggatgtttcggtcggcaacagcgaaaagcgcggcctgctctattgccgcatcgtcccgcccgaaagcgggatcgctatccatgtgatctgcgcgcatctgggtctgcgttctcatcagcgccaggcccagctgacgatgctggcggactgggtaaacggtttgcccgcgggcgagccggtggtagtggccggtgattttaacgactggcagcagcaggctaaccgccagcttaaagcccaggccgggctggaggagatttttacccgcgccagagggcgcccggcgcgaactttcccggtcagcttccctctgctgcgcctcgaccgcatatacgtaaaaaacgcccatgccagccagcccaaagcgctggcgttaaaacagtggcgtcatttgtccgatcatgcaccgcttagcgtggagatacatctgtga

SEQ ID NO: 173771 - DNA, 411 bp, Klebsiella oxytoca
atgaagtggcaacaacgtgtacgcgtcgcaacgggtcttagttgctggcagattatgttgcatctactggtcgtggcagtactggtgatgggttggatgagcggcgcgctggtgcgcgtcggattaggtttgtgcgtgctgtacggcgtcacgttactgtcgatgctgttcttgcagcgtcaccacgatgagcgctggcgcgacgtcggtgatttccttgaggagctcaccaccacctggtacttcggcgcggcggtaatcgtgctgtggctgctgtcgcgcgtgctgcacaacaacctgctgttagccctcgccgggctggccatactggcaggtccggcggtggtttcactgctggcgaaagataaaaaactacgcgatctttcttcggaacatcgcatacgccgctga

SEQ ID NO: 173772 - DNA, 1107 bp, Klebsiella oxytoca
atgtttcatcgcttatggacgttaatccgcaaagagctacagtcgctgctgcgtgaaccgcagacgcgggcgattttaattatgccagtactcattcaggtgctgctgttcccctttgccgccacgctggaggtgactaacgccaccatcgccatctataacgaagacaacggcaagcacgccgtggagctgacccagcgctttgcccgcgctaaagccttcacccacgtcctgctgctgaaaagccctcaggagataagaccgaccattgacgaacaaaaggcgctgctggtcgtgcgattcccggcagatttttcgcgcaacctcgatatctggcagaccgcccctctccagctgttgcttgatgggcgcaactccaacagcgcgcagatcgccgcgaactatctccagcagatcgtcaaaaactatcagcaggcgttaatggaagacaaagccaaaccaaacaacagcgagctggtggtacgcaactggtataacccgaatctcgattacaaatggttcgtcgtgccgtcgctaatcgccatgatcaccaccatcggcgtgatgatagtcacctcgctctccgttgcccgcgagcgcgaacagggtacgctcgatcagctgctggtctcgccgctggcaacctggcagatctttatcggtaaagcggtgccggcgctaatcgtcgcgaccctgcaggccaccatcgtgctgggaattggtatctgggcctatcaaatcccctttgccggctcgctgctgctgttttactttacgatgattgtctacggcctgtcgctggtaggattcggcctgctgatttcgtcactgtgctccacgcagcagcaggcgtttatcggcgtgttcgtctttatgatgccggcaattctgctctcgggctacgtttccccggtggagaatatgccgcaatggctgcaggatttgacgtggataaacccgatacgtcactttaccgatatcaccaagcagatctatctgaaggatgcgagtctggaaattgtgtggggaagtttgtggccgctactggtcatagcggccaccaccggctcagcggcgtatgcgatgttccgaagaaagatcgcgtag

SEQ ID NO: 173773 - DNA, 1134 bp, Klebsiella oxytoca
gtgagcgctaaactgctatcgtggcggcgcgtacgcgccctgtgcgtgaaagagacgcggcagatcgtccgcgaccccagcagctggctgattgcggtggtgatccccctgctgctgctgttcatttttggctacgggattaacctcgactccagcaagctgcgggtgggcgtgctgctggagcagcagagcgaagaggcgctggattttgtccataccatgaccggctccccctatattgacgccaccatcagcgataaccgccaggaactggtgcagatgatgcaggcgggacgcattcgcgccctggtcaccctaccggtggacttcgaccagaagatggcccgtcccggcgacgacgcgccgatccagctcatcaccgacggcagcgaacccaataccgctaacttcgcccagggctacgtcgaaggcatctggcaaatctggcaacagcagcgggcggaagatcgcggtgaaaccttcgagccgctgatcgacgtgcagatgcgctactggtttaacccggccgccatcagccagcattttattatccccggcgcgattaccatcattatgacggtggtcggcgcgatcctgacgtcgctggtggtggcccgcgagtgggaacgcggcacgatggaagcgctgctgtcgaccgagattacccgcgccgagctgctgctgtgcaagctgatcccctactatttcctcggcatgctggcgatgctgctgtgtatgctggtggcggtgtttattctcggcgtgccgttccgcggttcgctggtgattctgttttttattaccagcctgtttttgctgagtaccctgggcatggggctgctgatttccaccatcacccgtaaccagtttaacgccgcgcaggtcgcgctgaatgccgcgttcctgccgtcaatcatgctctccggatttatttttcagatagacagcatgccggcgataattcgcgccgtgacctacgtgatcccggcgcgctattttgtcagcactctgcaaagcctgtttctggcgggcaatatcccggtggtgctgttggtgaacgtgctgttcctgatcgcctcggcggtgatgtttatcggcctgacgtggctgaaaaccaaacgacgtctggattaa

SEQ ID NO: 173774 - DNA, 1740 bp, Klebsiella oxytoca
atgagcgaagacgtgattacgctgagcggcctgacccggagctttgccgggatggaccgcccggccgtcgcgccgctggactgtaccattcactccggctatgtgaccggtctggttggcccggatggcgccggaaaaaccaccctgatgcgcatgctcgccgggctgctgaagcccgacgcaggcagcgcaaaggtgatcggcttcgacccgattgctgacgatagcgccctgcacgcggtgctcggctatatgccgcaaaaattcggtctgtatgaagatctgacggtgatggaaaatctcacgctctacgccgacctgcgcagcgtgaccggcgaggcgcgggagaaaaccttcgcccggctgctggagtttacctctctcggcccctttaccggccggctggcgggtaagctttccggcggcatgaagcagaaactcggcctggcctgtaccctcgtcggcgagccgaaggtgctgctgctggatgagcccggcgtcggcgtcgaccccatctcacgccgcgagctgtggcagatggtacacgagctggcgggcgacgggatgctgatcctctggagcacctcctacctcgacgaggccgagcagtgccgggacgttctgttgatgaacgagggccagctgctttaccagggggcgccaaaagagctgacgcaaaccatggcgggacgcagttttttgatttccagttcccgggagaataaccgccgcctgctccagcgcaccctgaagctgccgcaggtcagcgatggcgtcattcagggtaaatcggtacgcctgatcattaaaaaagaggccagcatcagcgaagtacagaacgctgccgatatgccgccgctggaggtcgctgaaaccgcgccgcgttttgaagacgcctttatcgacctgctcggcggtgccggtaccgccgaatcgccgctgggcaaaattatccataccgtggaaggctcccatgaggacacggtgattgaagcgcagaccctgaccaagaaattcggcgatttcgccgctaccgatcacgtcgattttcaggttaaacgtggggagattttcggccttctcgggcctaacggcgcgggtaagtctaccacttttaagatgatgtgcggcctgctggtccccacctccggtaaagcgctggttctggggatggacctgaaggtcagctccggcaaagcgcgtcagcatctgggctatatggcgcagaagttctcgctgtacggtaacctttccgttgagcagaacctgcgcttcttctccggcgtatacggcctgcgcggacgggcgcagaacgacaaaatcgccagcatgagcgaggcgttcggcctgaaaagcatcgcccggcaggccgccgacgatctgccgcttggctataaacaacgcctggcgctggcctgctcgctgatgcatgagccggatatcctgtttcttgacgaacccacttccggcgtcgatcccctcacccgccgcgagttctggctccatatcaacagcatggtcgataaaggcgtcacggtgatggtgaccacccactttatggatgaggcggagtattgcgatcgtatcggtctggtctatcacggcaaattgatcgccagcggcacgccggacgatctgaaggcgctggcggcggatgaaaaacagccagacccgacgatggagcaggcatttatcaccctcatccatgactgggataaggagaacgccggtgagcgctaa

SEQ ID NO: 173775 - DNA, 993 bp, Klebsiella oxytoca
atgaaaaaaccgctcatcgtcgttgtgctgcttctcctgctggccgctgtcattggcggaggctggtggtggtaccagagcagccagcaaaaagagctcacgctttatggcaacgtggatattcgcaccgttaacctgagctttcgcgtgggcggacggctggcgtcgctcagcgtcgacgagggcgatgcgataaaagccgggcagacgctgggcgagcttgatcgcgcgccctacgaaaacgccctgcagcaggcgcaagccaacgtttccaccgcccaggcgcagtacgacctgatgatggcgggatatcgctcggaggagattgcccaggccgccgccgcggtcaaccaggcgcaggcggcttacgactatgcgcagaacttctatcagcgccagctggggctacgcaaaagcagcgccatctccgcgaacgatctggaaaacgcccgctcctctcgcgatcaggcccaggcgacgctgaaatccgcgcaggataagctgcgccagtatcgcgcggggaaccgtccgcaggaaatcgcccaggccagagccagcctcgaacaggcgcaggccgcgctggcgcaggcgaagctggacctgcacgataccacgttgacctcgccgtccgacggaacgctgatgacccgcgccgtcgagccgggcagcatgcttagcgcgggcggtaccgtaatgacgctgtcgttaacccatccggtatgggtacgcgcctacatcgatgaaaccaacctgggccaggcccagccggggcgcgaagtgctgctttacaccgatagtcgcccggataaaccctatcgcggcaaaatcggcttcgtctcccctaccgctgaattcacgccgaaaaccgtggaaaccccggacctgcgcaccgatctggtttatcgcctgcgaattgtggtcaccgatgccgacgacgcgctgcgtcaggggatgccggtcaccgtcgctttcagtcatggaaacggccaatga

SEQ ID NO: 173776 - DNA, 678 bp, Klebsiella oxytoca
atgaccaccacaccgactaccagcaagggagagcaggcgaaaagccagctcatcgccgccgctatcgcccagttcggcgaatacggcctgcacgccacgacccgcgatattgccgcccaggccgggcagaatatcgctgcgatcgcctactattttggttctaaggacgatctctatctcgcctgcgcccagtggatcgccgattttatcgagcacaatttccgtccccacgcgcaggcggcggaagcgctattcgctcagcctgttccggacaaagccgccatgcgcactctgattctgcgcgcctgtcagaatatgattttgctactgacccaggatgatacggttaacttgagcaaatttatctcccgcgaacagctatcgccgactgcggcctaccggcttatccacgatcaggtcattgctccgctacactgctacctgacccgtttaatcgccgcttataccggccttaacgctgacagcacgcagatggtgctgcacacgcacgcgctacttggcgaagtgctcgcctttcgtcttggtcgggaaacggtgctgcgccgcgcgggctgggctgaattcgatcggcaaaaaaccgagcaaatttttgaagttattacctgccatatagatttcgttctggaaggattatcgcaaaggggtctggagtcatga

SEQ ID NO: 173777 - DNA, 924 bp, Klebsiella oxytoca
atgaatcagccgctgcaaaataaaagtttaccgatgccctccttacgcaatattcaggcatttattgaagtagcggataccggcagtctcaatctggccgcagagcatctcaatattacggcctcagcggtcagccatcagatagccagcctggaacagtatctcggaaagaaaatattttcccgcagcagtaaaggcatggtgttaaccgcaattggtgaaaaatatcttaaagaggtttccggagcgttaaatattattggccaggccaccaatcaggtgattaacgatatccatcaggattatttacgcattcactccgcgcccagctttgggctcctgtggctgatgccccgcctgaacaaatttcgccaggcctggcccgagcttaaaattagcctgacctgctcttatgaaagtatccagttctcccgcgataatattgatatcgatattcgccatgggctctcacaatggccgactctggtggtcaaaaccataaaaaatgaacgcatgctcccctatagctcatcaacttatttagccagccgcgaagttcagaccattgaagacttactgacctgcgatcttatccactccgacagcacgctgatcggctggagcaactggttatcctggcacaaggttcgcggctggaataaaagctttatttttaattttgaccgttcctatatgagcattgaggccgcgcgcatgggtatgggcattattcttgagagtaatttgctggccggtcagagcgttcggcaacggcacctcgagccggttttttccagcgacgcgagtatgccggttaacgcccatcacttcgttttgccgcaccctaacgagcaaaaagagaaagtgaagatcttttttaactgggttgccgaagagctcagtcatgagggatttcatatctaa

SEQ ID NO: 173778 - DNA, 1332 bp, Klebsiella oxytoca
atgtcacgtatagagactgttgtctgtactgacgccaggaaaacaaaatatcgtttcgtggttttgacgatgatttttctggtgtatgccataaattacgctgacagaacgaatatcggcgcggtgctgccgtttatcattgatgagtttcatatcaataactttgaagccggggccatcgccagcatgttttttttgggctatgcggtaagccagatcccggcaggattctttattgccaaacgcggtacccgggggttggtttcgctatccattttcggcttttccgcttttacctggctgatgggcaccgtgagctccgtttttggtctgaaaatggtgcgtctgggactgggtcttagcgaagggccgtgcccggtaggactggcttcaaccattaacaattggttcccgccgaaagagaaagccacggcgacgggcgtttacattgcagctaccatgtttgcgccgatcatcgttccgccgctggcggtgtggattgcggtaacctgggggtggcggtgggtctttttctcctttgcgataccggggattgtggcggcgatagcgtggtacctgttggttaagtcaaaaccctcggagagcggatttgtttcaccagccgaactggaagagatcaatgccgggcgtgaaaccgatgataaccttgtgcgcgaaaatatcttaattgccaatcgttttacctggctggataaaattattcgagtgaagaaaatggcgcctatcgatacggcgaaaggattatttacctcaaaaaatattctcggtgactgtctggcctattttatgatggttagcgtactgtacggattattaacctggatcccgctgtatttagtcaaagagcgcggttttgatgtgatgagcatgggctttgtggcaagtatgccgtgcatcggcggttttattggcgcgatcgccggagggtggatttcagataaagtattaggccgtcggcgtaaacccaccatgatgtttaccgctatttcaacggtggtcatgatgttaatcatgctgaatattccagcgagtaccctggcggtctgtattggtttgttcttcgtcggcttttgtttaaatatcggctggccggcttttaccgcttacggtatggccgtttcggacagtaaaacctatccgatcgcctcttctattattaatagcggtggcaaccttggcggatttgttgccccgatggctgcgggatttttactggaccagaccggcagctttaattctgtatttacttattttggtatctgcgcagcaattggtttgctggttattctctttctcgatgagccacaataa

SEQ ID NO: 173779 - DNA, 750 bp, Klebsiella oxytoca
atgttattaaaagataaagtcgccattattactggcgcggcctccgcacgcggtttgggttttgctaccgcgaagttatttgccgaaaacggcgctaaagtggtcattatcgacctcaatggcgaagccagcaaagccgcggcgacggcattaggcgaaggccatctcgggctggcggcaaacgtcgccgatgaagttcaggttcaggcggcaatggaacagattctggcgaaatatggtcgggtagacgtgctggtgaataacgccggtatcacccagccgctgaagctgatggacattaaacgtgccaactatgacgcggtattggatgtcagcttgcgcggtacgctgctgatgtcgcaggcggttatcccggcgatgcgggcgcaaaaatcgggcagcattgtctgtatctcgtcggtttccgcccagcgcggcggcggtatcttcggcggcccgcactacagtgcggcaaaggccggagtgcttggcctggcgcgagcgatggcccgcgagctgggtccggacaacgtccgcgtcaactgcattaccccggggctgatccagaccgatatcaccgccggtaagctgaccgacgaaatgacggccaacatcctcgccggaatcccgatgaaccgcctcggcgatgcggttgacatcgcgcgcgccgcgctattcctcggcagcgatctctcttcctactctaccggtatcactcttgacgtaaacggcggcatgttaatccactaa

SEQ ID NO: 173780 - DNA, 846 bp, Klebsiella oxytoca
atgaagatcaccgaagcacaaaaagtcgccgcggcggcgtggcggattcgccgctatgccctgcgcatgggggaggttcagggtcagggctatatcggccaggcattaggctatgcggatgtgctggccaccgcgttcagccacgcgatgacctaccgtccacaagagccgcagtgggaaggtcgcgaccgcttcctgctctctcacggccattacgccatcgcctactatgcggcgctgctggaggcgggaattatcccggaagaggagctggaaacctacggttctgacgacagccgcctgccgatgtcgggaatggcgacctacaccccggggatggagatgtccggcggctcgctggggcaggggctctctattgccgtcgggatggcgctggggctgcggcaaaaagggagcgcatcctgggtctacaactccatgtcggatggggagctggatgaaggttccacctgggaagcggcgatgtcggcggcgcattacggcctgacgaacctgatcaacatcgttgacgtgaataaacagcaggcggacggcgattcgcgcaaaattctcggctttgagccgctgcatgaaaaatgggccgccttcggctggtacgtgcagcgcgtcgacggtaacgatctggcggcggtgatggccgcctttgataacgcgaaaaatcatgcgggcaaccagccgcgggtcatcttatgcgacacgttgatgggtaaaggggtcccgttcctcgaaacccgggataaaaaccattttattcgcgtcgatgccgatgagtggcaaaaagcgattgcggtgctggacgccaacaaatcggaaggagtgctgtaa

SEQ ID NO: 173781 - DNA, 993 bp, Klebsiella oxytoca
atgagccagagtaaaccacgtttaaaaacgtccgcgatgatcgcttctattgctgacgaaggtcaggcgacgattccggcaccgtttggcgttgcgctctcgaagctggcggcgcagcgaccggaaatcgttggtatgaccgcggacctgtcaaagtacaccgatctgcacattttcgcgcaggctttcccggatcgctttttccagatgggaatggcggaacagctgctgatgggggcggcgggaggaatggcgaaagagggattcattcccttcgccaccacctatgccgcttttgctacccgccgcgcctatgattttattcatcaggtcattgccgaggagcatctcaacgtgaagatctgcgcggcgctcccgggcctgaccaccggctacgggccgagccatcaggcaacggaagatctggtgattatgcgcggcattcccggcatggtcatcgtcgacccatgcgatgcgctggagatagagcaggcggtaccggcgattgccgaccataacggtccggtatatatgcgcctgctgcgcggtaaggtgccgctggtgctggataagtacgactatcagtttgagctgggcaaggcgaagctgcttgaggatggcaacgatgtgctgattatctcttccgggctgatgaccatgcgcgccctcgaggcggtcgaaaagctgcgggccgataatatcagcgcagccgtactgcacgtgccaacgatcaaaccacttgatgaagaaacgatcattgcacaggcctcgaagcccggtcgcctggtggttactgccgagaaccatacttcggttggcggactgggggaggcggttgccgcgttgctgatgcgcaaaggcgtgcgctgcgagctggataccgttggcttgcctgacgaattcctgctggccggcgcgctgccgaccctgcacgatcgctacggtatttccaccgcgaggatggtcgaaaaaattaagtatcgcctgcgttaa

SEQ ID NO: 173782 - DNA, 1365 bp, Klebsiella oxytoca
atgtcttttgattcccttggcctgaatcctgaaatcctgcgcgccgtcgctgagcagggctacgtagagccaacccctattcagcagcaggctatcccggcagtattacagggccgcgatctgatggccagcgcccagacgggtactggcaaaacggcgggatttacgctgccgctgcttcagcacctgatccaaaaagaaccccacgccaaaggtcgtcgcccggtgcgcgccctgatcctgaccccgacgcgcgagctggcggcacagattggcgagaacgtccgggattacagcaaataccttaacgttcgttcgctggtggttttcggcggcgtaagcattaacccacagatgatgaagctgcgcagcggcgtcgatattctggtggcaacccctggccgtctgctggaccttgagcatcagaacgccgtgagcctggacaaagtcgaagtgctggtgctggatgaagccgaccgtatgctggatatgggctttattcacgatattcgccgggtgctggcgaagctgccggcaaagcggcagaacctgctgttctccgcaactttctccgacgacattaaatcactggcggaaaagctgctgcataacccgctggaaatcgaagtcgcccgccgtaacaccgcttctgagcaggtgagccagctggtgcattttgtcgataaaaagcgcaagcgcgagctgctgtcgcagatgatcggcgaaggtaactggcagcaggttctggtctttacccgcaccaaacacggcgcaaaccacctggcggaacagctcaataaagacggcatccgcagcgccgctattcacggcaacaagagccagggcgcgcgtacccgagcgttggctgattttaaatccggcggcatccgcgtgctggtcgcaaccgatatcgccgcgcgcggtctggatattgaagagttgccgcacgtggtgaactacgagctgccaaacgtgccggaagattacgtgcaccgtattggtcgtaccgggcgcgctgcggcaacgggcgaagcgctgtcgctggtctgcgtagatgaacataagctgctgcatgatatcgaacgcttgctgaagaaagagatcccgcgcatcgccattgcgggttacgagccggatccgtcgatcaaagccgagccgattcagaacggtcgccagcagcagcgcggcggcggtcgtggcggtcagagccagggccggagcggccagggacgtggtggtcagggacaaggtcgtgcccagcaggctgctccgcgtcgcaccgatggcgaagcgccgaaagcgcgcactcaggacggtaagcctcctcgccgtcgccgcccgcgcaaacctgctgcggctgagtaa

SEQ ID NO: 173783 - DNA, 2145 bp, Klebsiella oxytoca
atggctttgaccgcagcgctgaaagcgcaaatcgccgcctggtataaggcgcttcaggaacaaattcctgactttattccccggcctccgcagcggcagatgatcgccgatgtggcgaagacgctcgccggagaagaggggcggcacctggcgattgaagcgccgaccggggtcggcaaaaccttgtcgtatctgatccctggcattgctattgcccgcgaagagcaaaaaacgctggtggtcagcaccgccaacgttgcgctgcaggaccaaatctacagtaaagatctgccgctgctgcgcaaaatcatccccgatctgcgctttaccgccgcctttggccgcgggcgctacgtctgcccgcgtaacctggccgcgcttgccagtacggaaccgacgcagcaggatttgctggcctttcttgatgacgaactcacgcctaacaaccaggcggagcagaagctgtgcgcaacgctgaaagcggatctcgatagctacaaatgggacggcctgcgcgatcataccgacaaaaacgtggatgattctctgtggagccgcctgagcacggataaagccagctgcctgaatcgaaactgtcactattatcgcgaatgtccgttctttgtcgcccgacgggaaatccaggaagcggaagtggtggtggcgaaccatgcgctggtgatggcggctatggagagcgaagcggtgctgccggagccgaagcatctactgctggtgcttgatgaaggccaccatctgccggaggtcgcccgcgatgcgctggaaatgagcgctgaaattaccgccccgtggtatcgcctgcagctggatttgttcactaagctggttgcaacctgcatggagcagtttcgccctaagaccacgccgccgctggcgaatcccgaacgtctgactggacactgcgaggagctgttcgagctaatctcctcgctgaataatattctcaatctctacatgccggccggccaggaggcggagcatcgctttccgatgggggaactgccgcaggaagtcatggagatctgccagcggctggcgaaactcaccgaaacgctgcgcggcctggcggaactgttccttaacgatctgggcgaaaaaaccggcacgcacgatgtggtgcgtctgcaccgggttctgctgcagatgaaccgcgcgctggggatgtttgaaagccaaagtaaactgtggcgcctggcgtcgctggcgcagtcctccggcgcaccggtgactaaatgggtcacccgcgatctgcgcgatggtcagatgcatatctggttccactgcgtggggatccgcgtcagcgatcagctggaaaggctgctctggcgcagcgtcccgcatatcgtcgtcacctctgcgacgctgcgttcgctgaacagcttctctcgcctgcaggagatgagcgggctgaaagagaaagccggagatcgctttgtggcgctggattcgcccttcaaccacgtcgaacagggtaaaatcgtcattccgcagatgcattatgaaccgcttatcgataacgaagagcagcatattgccgaaatggccgcctatttccgtgaacaggtcgagagcaaaaagcatctcggcatgctggtgctgttcgccagcggacgagcgatgcagcgttttctcgagcacgtgaccgatctgcgcctgctgctgctggttcagggcgataagccccgctaccgactggtggagctgcaccgcaaacgcgttgaaggcggcgagcgcagcgtactggttgggctgcaatcctttgcggaaggtctggacttaaaaggtgagctgttaagccaggtgcatatccataagatagctttcccgccgatagacagcccggtggtgatcaccgaaggtgaatggctcaaaagcctcaaccgctatccgttcgaagtccagagcctgcccagcgcgtcattcaacctgattcagcaggtggggcgcctgatccgcagccatagctgctggggagaggtggtgatttatgataaacgtctgttaaccaaaaattacggtaagcgcctgttgaacgcattacccgtatttccgatagagcagcctgccgtccctgaggttatagtaaaaacgaaagcaaaaccgacgcgtcgcaagcggcgatag

SEQ ID NO: 173784 - DNA, 969 bp, Klebsiella oxytoca
atggactacagcaagattattaaagaagtcgggcgcggaaagaaccacgcccgcgacctggatgtggagacagcccgcgcgctctactcgcggatgcttaacggcgaggtgcctgagcttgagctcggcggcattcttatcgctctgcgcattaaaggcgaaggcgaagcggagatgaagggcttctatgaagcgatgcaggcgcatacgattaagctgactccgccggttgccaaaccgatgcccattgtgatccccagctataacggcgcgcgtaaacaggcaaacctgacccctctgcttgccgtcctgttgcataagctcggcttcccggtcatcgtccacggcgtgagccacgatccgacccgcgtggtgacggaaacgatttttgaactgatgggtatcccggcgacgcttcacgcgggtcaggcccaggcgcgattggatagccatcagccggtttacgttccggtcggcgcattttgcccaccgctggaaaaacagctggcgatgcgctggcgcatgggcgtgcgcaacagcgcccacacgctggccaagctggcgacaccctttgcggaagaggcggcgctgcgcctgtcgagcgtttcacacccggagtacgtcggccgggtagcgaaattctttgccgaaatcggcgggcgggcgctgctgatgcacggtaccgaaggggaggtttacgccaacccgcagcgctgtccgcagattagcctgattgatgcatctggtatgcgggtggtaaatgaacgacaggatagcgtagccgcgcaggcactcgccctgccggagtcaaaagatcctgaagtcaccgcccgctggattgagcgctgcatcgtcgggagcgcaccgctaccgcaatcattgcgaattcagttggcctgctgtcttgtggccaccggggccgttccgtctcttgaacagggcctggcaaaggtggctgagcgctggtaa

SEQ ID NO: 173785 - DNA, 261 bp, Klebsiella oxytoca
atgaaaaacatgaaatttgctgccgctgccatcgccctttccgctctctcttttggcgcattcgccgcccagccggtgacctcggctcaggcagaaagcatgaataaaattggtgtagtttccgctgaaggcgcgacgacgctggatggactggaagctaaactggctgaaaaagcagaggctgccggcgcgaccggttatagcattacctcagctaacagcaacaacaaacttagcggtaccgcggttatctacaaataa

SEQ ID NO: 173786 - DNA, 267 bp, Klebsiella oxytoca
atggcttcaggctgggcaaatgacgacgcggtgcaggaacaaatcgatagcactatcaatgacgcgattgcacgggcgcgaaatgagctgtcatcgggtgagagcaacaaattttgtgaagaatgcggagagccgatccccgaagcgcgtcagcgcgcggtcgcgggcgtgaaatactgcataaaatgccagcaggagaaagatttacataacaatacattttcaggatataatcgcagaggttccaaagatagccagcttcgttga

SEQ ID NO: 173787 - DNA, 615 bp, Klebsiella oxytoca
atgtacttctaccaaccttcacaaggacacgggctgccgcacgacccgcttaacgcgattatcggaccacggcctatcggctggatagcttccgtggataatagcggccagcataatcttgcgccgtacagttttttcaactgctttaactatcggccgccgattattggcttcgccagcagcggctggaaagatagcgtgcagaatatcgtcgagaccaaagagttcgtctggaacctcgccacccgccccctggcggtcgcgatgaacgaaacctctgccagcatcccgcgtcacgaagatgaatttgtccgcgccgggctcactcccgccgccagccgtctcgtcagcgccccccgggtagccgaaagtccggtcaattttgagtgtcgcctgtcgcaatgcatccagttaaccaccgccgaagggctggcggttgatacctggctggtgctgggcgaagttgtggcagtgcatattgatgagtcgctgctggaggacgggatttaccagaccgccagggctcagccgattctgcgcgcgggcggtcccagcgcctattacgccattgatgaaagcctgcgctttgaccttgtgcgtccggacgcccgctag

SEQ ID NO: 173788 - DNA, 915 bp, Klebsiella oxytoca
atgaaagcccagaaaccggggttacacccgcgtaaccgtcaccatcaacgctacgatctgcccgcgctatgccagacccatcctgagctgcaggccttcatcacccttaatccggtgggtgagcagaccatcgactttgccaacccgctggcggtgaaggcgctgaataaagcgctgctggcgcatttttacgcggtgaaacactgggatattcccgacggctttctctgtccgccggtgccgggcagggcggactacatccatcacctcgccgatctgctggcgctggatagcgggacgatcccggccaacgccagcattctcgatattggcgttggcgcaaactgcatctatccgctcattggcgcgcacgagtacggctggcgctttacgggtagcgaagtgaacgccgaggcattcgccagcgcccaggctatcatcaacggcaatcctgggctcactcgccagatccgtctgcgtcgtcaaaaagacgccaacgcgattctgaccggcattattcataaaaatgagacctacgacgcgaccctgtgcaacccgccgttccatgattccgccgccagcgcgcaggcgggcggtgagcgtaaacgtcgcaacctgggactgggcgaggagagcgtgctgaactttggcggccagcagcaggagctgtggtgcgaaggcggcgaggtggcctttattacgcagatgattgaagagagcaagccgtttgctcgtcaggttaaatggtttacttcgctggtttctcgcggcgacaacctgccgccgctatatcgcgctctgaccgacgtcggcgcggtgaaagtggtgaagaaagagatggcccaggggaataagcaaagccgctttatcgcctggacctttatggatgaggccaaacgtcgccgcacgctataa

SEQ ID NO: 173789 - DNA, 2223 bp, Klebsiella oxytoca
atggaggtgcctgtgccgcggattttgttcctgctcgctttactcttcaccgctccgctatgggccgcgacgctgcccggcgttccggcaaccacaacggaccactccagcagtagcgaacccgatctggcgcagaaaaaagcggcctacggcgcgctggccgacgtgcttgaaaacgccgatgcccgccaggagcttatcgatcagctgcgtaaagccgccgccacgccgccgccggacagtaccccgacgctgacgccgccggaaattaaagacgaaacgacggtgctggaaaacgtcactcagatcagtcgtgaatatggcgaacagctttcgtcgcgcttctcccagctatggcgcaacatcaccggctctccgcacaaaccatttaattcgcaatcgttcatcagcgccgcctggcatttcctgctgcttggtggtctggtctttgcattctggtggctggtacgcctggctgccctgccgctgtatcgcaaaatggggcactggggacgacataaaaaccgcgaccgcagcaactggctacagctgccggccacgattgccggcgcatttattttcgacctgcttctgctggccctgacgctgtttgttggccagctattaagcgatcgcctgaacggtaataatcccactatcgccttccagcaaagtctgtttctcaatgcctttgcgctgatcgagtttttcaaagccattctgcggctgattttctgcccacgcatcccggagctacgcccgtttaaccttagcgatgaagcggcaaaatactggaatctgcgcctcagcgcgctcagcagcctgattggctacgggctgatcgttgcggtgccaattatctccaaccaggtcaacgtgcagttcggggcgctggccaatgtggtcattatgctatgcattacgctctgggccctgtatctgatattccacaataagcagttaattacccaagggcttatccatcttgccgaccgatcgctggccttttttagcctgtttatccgcgcctttgctctggtgtggcactggctggcctgcgcctatttcatcgtgctgtttttcttctcgctgttcgaccccggtaacagcctgaaatttatgatgggcgcgaccctacgcagcctggccatcgtcggcgccgccgcgctggtctccggtattctgtcgcgctggattgcgaaaaccatcaccttgtcgccggaaacccagcgtaactatcctgaactgcaaaaacggcttaacggctggatctccgcatcgctgaaggccgcgcgcatcctgacggtctgcgtggcgattatgctgctgctcagcgcatgggggctgttcgatttctggcagtggatgcataacggcagcgggcaaaaagcggttgatgtgctgattcgtatcgcgctgatcctgttcttctcggcgattggctggacgctgctcgccagcctgattgaaaaccggctggcatcggacattcacggtcgcccgctgcccagcgcccgcgcccgaacgctgctgacgctgtttcgcaacgcgctggcggtggtgatcagcactattaccattatgatcctgctttcggaagtgggggtgaatatcgccccgctgctggccggcgccggcgcgctgggcctggcaatttcatttggcgcgcagaccctggtcaaagatattattaccggcatttttattcagttcgagaacggtatgaataccggcgacctggtgacgatcggaccgctcaccgggacggtggagcgcatgtcgattcgctccgtcggcgtccgtcaggataccggcgcttaccatattattccgtggtcttcgataaccaccttcgccaacttcgtacgcggaatcggctcggtggtggccaactatgacgttgaccggcatgaagatctggataaggctaaccaggcgctgaaggatgcggtcgcggaagtgatggcgcaggaagagattcgcgggcttatcattggcgagccatccttcaccggcgtggtaggcttaagcaataccgccttcaccctgcgcgtcacctttaccaccctgccgctcaagcagtggacggtcagattcgccctcgatacgcaggtgaaaaggcattttgacctcgcaggcgtgcgggcgccggtacaaacttatcaggttctgccgatgccagcacccgcaggaccgcctgcccccgccgagcccacgttatag

SEQ ID NO: 173790 - DNA, 4266 bp, Klebsiella oxytoca
atgaaccgaagctttaatatcgtctggagcgctacacgtaatatgtttgtcgtcgcgccagaatttgccagcagtaatggacaccttctcagccatatacgaatcaacgttctggcagcatcgcttttatgcatctcaggctttgccctggcggaagaccgaacttttacgactaataactccggtgaatataaaataagcggaacctatatctccagcaacaacgacttcgatagtagaggaactcccgcgatctcagcttggggctggggtagtcaaaagattgttatcagtgatgagggtatagtcacgatcgcaacctcaggcatcggctctagtggaatatacattgacggagccaatactagcctgacgctggataaccagggatggtcaatactcaccgcgggcaatagctcgtcggcggtgaccgcaacttcaggggccaggatatccctcaccagcggctcaattgctacccaaggtgagagctcgtttggagtatctgcctctgatgctgacagtatagctaccctcaatgaagtcacgattgcaacaacaggggatcgggctggcggtttgattgcctacgatggtgggaaaattgctatgacgagcggcagtatcataactgaaggatattcagccaccagcgttcttgcatcttcatcagaaagcgttattgatctcaataacgtatctgtttcatcggcaggtgactggagtactgcgctatcagccaacgaagacgctcatgttacaatgacaggcggtagggtagccactgcagggatatattcagatggagttacatcctataacaacagcgtggtcaccctgaaagatgcgtcagtttcaacctcgggcagcaactctgatagcatttctgcaaattttggcggtactgttaacgtaacaggtggaacgattacaacaacgggtaactctgcccatggagtctattctggagatgcgaatagcgcaatcatcctggacaatgtcaaaatatcaaccacgggagaatggtcttacggattattttcgcgggggaatatcatcatgagtaacagtagtatactcaccactggtaactcagcctatggtataggaaatgacagtggcgctcttatgcagctcagcaatatcaccatatctacccaaagttatggggcccgaggactgtctactgataacggaaatataattttaaaagacagccaggtgactaccactggcaattacgcctcaggtattgtatcaagtaaagcggacctggatctggattatattgacatatcaacccatggccaatacgcatatggcgtagatgtctacgctaccgaaaagacgagtttaaaaaacagtcatctgaaaaccacaggcagtgagtccaatggtatacttgcattttcagctaaacttctcctggatgatgtcgatatatctacctccggcactcacgctgaaggaatatcagccaaagcggatagcaatattacaatgactggcggtagcattcaaacaacaggctcgagttccagcggaattaatatttattcttcagatcttcagttaaaccaggtttctatttctactcagggtgaggacgctcatggactcaaactcggaagcgggagcactcttaaaggccagaatttaaacattatcagtaataaatcctggggtgtattacaggaaaaagaatggaattcgacatcgttatcattaactaatagccagataaccggcaatagcgctgcctattatctggatgcgtcatatgcttattacgacgacgaggccaattcgctaaatatcaccggcggcagcgttaccgccacagcaaaggacgggagtgcattctatgtcaatgcaggcgctgcagatattaccgttgataatctgcaaaacgtcagtgccacaaatctgttgacggttaacgataacaattggcataacgttatattccgcgccaaaaatgacagtaccctgagcggtgctattcaggctggaaacagcaatgttacggtcgacctggacaaaaccagcctctggaatgttcacggcgattccgcgatcggcaatcttaccaacgctggtgtcattaatctcaatactgcttcaggttctctttatgcagcgaaattaaagctcaccgagagcagcgtactcaacatacaattggatcgcggcgttggtgaaccggttatcgtcacaagctacagcagccttaatggggcgttgaacattagtggtatcggtaatattaaaaattcgttaataaccacgccctacacctttacgcttattagcgcagataaggagatcaacggagacttcaataattttaccgttgccggaatagatgcgaaagaggccgactttttaaccgtacatggacaaattaaccctgacaataaaacgcaatatgagttactcacttcactttcctggtatgcagataaaaacaatgccgtaaccgatgctcatggaacctttacgctaagtgaagcgaacggcgaatttacagtaaataatcatctcgatgatgtcacaaatacgctgacctcaaccaatagcagcggctgggatgggaaatcattgactaaactgggcgacggtgtgttgattctttccgcggctaatacctacagcggtgatactcacgttaaagagggcaccttatggctggaaaacagcggaataattggctccgctggaagtaagcaaaaaattaacatcgcatcagcagctcatttcggcggtagcggcatcgttaatggtaacgtctttaatagcggcaatcttgccatgagcaaaagcggagaggttggcaacaacctgaccatcaatggcaactataccggtaataacggcaacctctttttcaacacccaattaggtggcgataactcgttaaccgataaactgacgatctccggtgattcaaacggtaattctatcgtgtatatcactaacgtgaatggcaagggtgaattgactgataaaggcattgaattaattaatatttcaggaaaatcaaacggtgtcttcacccaaggaaatcaggtccaaattggcttatatgaatatcgtttgtacaaggataccggagactggtatctacgctcgcaatcaaacgcacctgtagatcctaaacctgatgacgggaataacggcaatgtcgacccggtcaagcctgatgacgataataacggcgatgtcgacccggttaagcctgacgatggcaacagcagcaatatcggcccgatgaaacccgatgatggtaacaatggcgataccacaccatcaggttcgcatcaatatcgcgctgatataggcacatatcttggtaaccagtggatggtacgcaatttgcaaatgcaaacgctttacgatcgcgaaggcagtcagcttcgtacggctaatggcaatatgtggatgcggtttaaggctggacgtgccgattcccaggccgttagcggtaatgttgatattaacaacaactactctcaaatccagataggcggggatatactcgcctgggataacggtgaacaaagcctggtcgcaggcattatgggcagctatatcaatgccgatactgacagtaccggtaatcgaggtatggatggcagtcaactgtcagccagcggcaacgtttccgggtacaacgtaggcatttactcgacctggtttgccgattcccaaacgtaccgagggctgtacattgacagttggtatcagtacgggatgtatagtaacaccgtgaaaaatggggatattggctcaacgaactatgattcctatacccatacggcctcgctggaggcgggatatcgatacgacatcctccagaaagaaaggcatcagattagcctgacaccacaggcgcaaatcatctggcagaattattctgctgataccgttatcgacaaaggaagaacgcgtattgatgggcaaagcagcagtagctgggcttcccgcctcggtctgcgcgtggatggcaagctatataaaaatcgtacctctgtcattcaaccctttgctgaagtcaactggttgcataccaatgatgatatctccgttacatttaatcatgctgacgttcagatggatttaccagcaaatcgcgccgaactcaaagcgggaattgaggtgaatctgaataatcagtggagcgtaacaggcatggtgacgggtcagaaaggcagcaatcattacgatgaccttaacggcaacctcaacgtccgatacagctggtaa

SEQ ID NO: 173791 - DNA, 723 bp, Klebsiella oxytoca
gtgattgaatttaaaaacgtttccaagcactttggcccaaccaaagtgctgcatgatatcgatctgaagatcaaccagggcgaagtcgtggtgattatcgggccgtccggctccggtaaatcgaccttgctgcgctgtattaacaaactcgaagagattaccagcggcgagctgatcgtcgatggtctgaaggtcaacgacccgaaggttgatgagcggctgattcgccaggaggccgggatggtgttccagcagttttatctgttcccgcacctgaccgcgctggaaaacgtgatgtttggcccgctgcgcgtacgcggcgccaataaagcggcggcggaaaaactggcgaaggatctgctggcaaaagtgggcctcgcggaacgcgcgcaccactacccttccgagctttcaggcggccagcagcagcgcgtagctattgcccgggcgctggcggttaaacctaaaatgatgctttttgatgagccaacttccgcgctcgatcccgaactgcgtcatgaagtactgaaagtgatgcaggatctggctgaagaaggcatgaccatggtcatcgtcacccacgaaatcggcttcgccgaaaaagtggcttcccgcctgatctttatcgataaagggcgcattgccgaagatggcgatccgcaggtgctggtcaacaacccaccaagcccgcgtctgcgggagtttttacagcacgtcgcctga

SEQ ID NO: 173792 - DNA, 660 bp, Klebsiella oxytoca
atgcagtttgactggagtgccatctggcccgccatccccattttgctggaaggcgccaaaatgacgctgtggatttcggtcctcggcctggtcggcggtctgataatcggtttggtagccggtttcgcccgctgtttcggcggctggattgccaaccacattgcgctggtctttattgaaatcatccgcggcaccccgattgtggtgcaggtcatgttcatctacttcgctctgccgatggcctttagcgatttacgtatcgacccgttctccgcggcggtagtcaccattatgatcaactcgggcgcctatattgcggaaattacccgcggcgcggtgctgtcgattcacaaaggcttccgggaagccggcctcgccctaggtctttctcgtcgcgaaactattcgctacgtaatcctgccgctggcgctgcgccgtatgctgccgccgctgggcaaccagtggattatcagcattaaagacacctcgctgtttattgtcatcggcgtagccgagctgacccgccagggccaggaaattattgccggtaacttccgcgcgctggagatctggagcgccgttgcggttatctatctgatcatcaccctggtgctgagctttgttctgcgtcgtcttgaaagaaggatgaaaatcctgtga

SEQ ID NO: 173793 - DNA, 747 bp, Klebsiella oxytoca
atgaagtctgtatttaaagtttcactggctgcactgaccctggcttttgcggtttcttctcacgccgctgataaaaaactggttgtcgctaccgacacggcgtttgttccgttcgaatttaaacagggcgataagtacgtcggtttcgacgttgacctgtgggctgccatcgcaaaagagctgaagcttgactacaccctgaagccaatggacttcagcggtattattccggcgctgcaaacgaaaaacatcgacctcgcgctggcggggatcactatcactgacgagcgtaaaaaagccatcgacttctctgacggctactacaaaagcgggcttctggtgatggtgaacgcaaataataacgaaattaaggatgtcaaagacctgaacggtaaagtggttgccgtgaagggcggtaccggctcggtagattacgcgaaagccaatatcaaaaccaaagatctgcgccagttcccgaacatcgataatgcctatatggaactcggtaccgggcgcgccgatgcggttctgcacgatacgccaaacatcctttacttcatcaaaaccgcaggtaacggtaagttcaaagcggtaggcgactcgctggaagcgcaaaactacggtatcgctttcccgaaaggtagcgacgagctgcgtgaaaaagtgaacggcgcgctgaaaactctgcgtgaaaacggcacttataacgaaatttataaaaaatggttcggtactgaacctaaataa

SEQ ID NO: 173794 - DNA, 126 bp, Klebsiella oxytoca
atgaaaaaatcatgccagttttacaacctgttgttttataacaaccaggataattcctgctgcacgattttgataagggataacgttaaacgcaccgatatggggcgctattttggtgcatcataa

SEQ ID NO: 173795 - DNA, 504 bp, Klebsiella oxytoca
atgagtaccgcaaaactggttaaaactaaagcaacgaatctgctctatacccgtaacgacgtcgcagatagcgcgaagaaagcgaccgttgagctgctgaatcgccaggtgatccagttcattgacctgtctctgattactaaacaggctcactggaatatgcgcggtgcaaacttcattgccgttcatgagatgctggacggcttccgcaccgcgctcgtcaaccaccttgataccatggctgaacgtgccgtccagcttggcggcgtggcgctgggtaccactcaggtcattaacagcaagagcccgctgaaaagctatccgctggatatccatagcgtccaggaccacctgaaagagctggccgaccgctatgccatcgccgccaacgatgtgcgtaaagccatcgacgaagcaaaagatgaagataccgctgatatctttaccgccgcttcccgcgacctggatcagttcctgtggttcatcgaagcgaatatcgagtaa

SEQ ID NO: 173796 - DNA, 888 bp, Klebsiella oxytoca
atgcccggctcgtcccgcaaagtaccggcatggctgccgatactggttattttaatcgccatgatttccattcagagtggcgcatcgctggccaaatcgctgtttccgctcgtcggcgcgcccggtgttaccgccctgcgcctggctctcggtaccttcatcctggtggttattttcaaaccctggcgtcttcgctttgcgccggagcagcgtctgccgctgctcttctatggcctgtcgctgggcgcgatgaactacctgttctatttatcaattcagcgcattccgctaggcgttgccgtcgcgctggaatttaccggccccctggcggtggcgctctttggctcccgccgcccgctggatttcgtctgggtagcgctggcggtgcttggactctggtttctactgccgctggggcaaagcgttgcccagatcgatcccatcggcgcgctgctggcgcttggcgccggcgcctgctgggcggtctacattctcaccggccagcgcgcaggggaagagcatggtcctgccacggtcgccatgggatcgctcattgctgcgctggtcttcgtgccgatggggatgattcaggccagcgatacgctatttcagtggggactattgttaccgggccttgggatcgccattttatccactgctctgccctattctctggagatggtggccctcacccgcatgcccagcaagacctttggcaccctgatgagcatggagcccgctttggccgcgctttccggcatggtgtttcttggtgaaacgctaactgcaacccagaccctggcgctcggggcgatcattctggcatcaatgggctcgacgctgacaatgcgccgggagacaaaaattcagaaagtcgacatcagttaa

SEQ ID NO: 173797 - DNA, 513 bp, Klebsiella oxytoca
atgaataaaattgcacgtttttcagcactggccgttgttctggctgcatccgtaggcaccactgctttcgctgcgacttctaccgttaccggtggttacgctcagagcgacatgcagggcgaagctaacaaagcaggcggtttcaacctgaagtaccgctacgagcaagacaacaacccgctgggtgttatcggttctttcacctacaccgagaaagatcgttctgagtctggcgtttacaaaaaaggccagtactacggcatcaccgcaggtccggcttaccgtctgaatgactgggcaagcatctacggcgtagtaggtgttggttacggtaaattccagaacaacagctacccgaacaaaactgacatgagcgactacggtttctcttacggtgctggcctgcagttcaacccgatcgaaaacgttgctctggacttctcctacgagcagtctcgcattcgtaacgttgacgttggcacctggatcgctggcgtaggttaccgcttctaa

SEQ ID NO: 173798 - DNA, 1578 bp, Klebsiella oxytoca
atgaatgtcacgctgaaagaaacgctggtcgcccgcaggccggtactgaacccatggacaggattctactttttacaatcgctgtttattaacctggcgctgggctatgagtttagtctgctctataccgttgcttttacttgcgtgctgcatctgctgtggcggagctttccgcgcgcgcaaaaagtagtcgttggcgtctattcactgctggcggccatgtactatccgtttggccaggcctacggcgcgccgaatttcaacacgctgctggcgctgcacgccacgaacatcgaagagtccaccgaaatcctcaccattttcccgtggtacagctatctgctggccgtgtttatctttgcgctcggggtgattgccgtgcgccgcaaaccggaagcgccggcgcgctgggggaaaacagatacgctgggactgctgttctgcatcgctattttctttctgcaaccggtgcaaaaccttgcctggggcggcgtctttaaggtcatcgataccggctaccctgccgtccgcttcgttaaagatgtggtcgtgaataatagtgaagtactagatgagcaggcgcggatggcgcagctggcgaatattaaagacagctggcacgtgctggcggtaaagccaaagtatcatctgtacgtggtggttatcggagagagcgcgcgccgtgatgcgctcggcgcctttggcggccactgggacaatacgccgttcgccagctcggtcaaaggctatttattcaacgactatatcgccgccagcggttcaacgcagaaatccctcggtttgaccctgaaccgggtggtcgacgacaaaccgcagtttcaggataactttgtcaccctcgccaaccgtgccggttttcaaacctggtggttctcaaatcaggggcaaattggtgaatatgatacggcgattgccagtatcgccaaacgcgcagacgaagttcagttccttaaaaacggcgattttgaggccaacaaaaacactcaggatgagcagctattaaagctgaccgcgcaggtgcttgccacccgccgtacccagccgcagctaatcgtcctgcatttgatgggctcacacccgcaggcctgcgatcgcaccaaaggcaaatacgccgttttcgtgcagtcgaaagagacctcctgctatctctacaccatgacgcaaaccgatacgctgttgagcaatctttatactcagctacagaattcgggggaaaccttctcgatgacctatttttccgatcacggtctggcctttaaggagcgcgggaaagaggtgcagtatctggcacacgacgataagtaccagcagaatttccaggtgccgtttatggtgatctccagcgatgataaagcgcataagatcattaaagcgcgacgttccgccaacgactttctcagcttcttttcgcagtggaccggtatcagcgctcaggagatcaccccgcgctatcgctttatctcagagcagaaggctggccctatctacatcaccaacttccagctgaagaaggtcgactacacccatctggggaccgacgcgttcaccgtcaattaa

SEQ ID NO: 173799 - DNA, 126 bp, Klebsiella oxytoca
atgaatgaattcaagaggtgcttaaacgtgtttacccattctccttttaaagtgcggttaatgcttgtcgggatgctgtgcgatctgatcaacggcaaaccgcagcaggataaacccaacaactaa

SEQ ID NO: 173800 - DNA, 474 bp, Klebsiella oxytoca
atgaaccgtcgcgcaggtaagccaataacaaaaaaagtgacgcagctagtgaatgtcgaagaacacgttgagggatttcgtcaggtacgcgaggcgcatcgtcgggagttgattgatgactacgtggagctgatttccgatctgataatggaagtgggcgaagcccgccaggtggatatggccgcgcggcttggggtgtcgcagccaacagttgccaaaatgttaaaaagactggccagcgttgggctgatcgaacagatcccctggcgggggatctttttaacgcctgaaggcgagaagctggcgcatgaaagccgcgaacgtcaccagatcgtggaaaactttttactggtgattggcgttagcccggagattgcgcgtcgcgacgccgaaggtatggagcaccacgtcagcgaagagacgctggcgatgtttaaacagtttaccctcaagcaggggtcatcgggagaatga

SEQ ID NO: 173801 - DNA, 1107 bp, Klebsiella oxytoca
atgaacctcgtctttgttcagtcgctgatccgcgaccgctttctacacctgctgctggttgtcggcgttgttttaagcttctttgtaccgtttgcccctgcaggctggctacacgccattgactggcatacgattatcacccttagcgggctgatgctactgaccaaaggcattgaactgagcggcttttttgacgtaatagggcgcaaaatggcgcgccgcttcgtcaccgagcgccagctggctatatttatggtgctggcggccgcgctgctatccaccttcttaaccaacgatgtggcgctgtttatcgttgtgccgctcacgctgaccctgaaaaaatggtgcgctattccgaccagccggttaatcattttcgaagcgctggcggtgaacgccgggtcgttgttaacccctatcggtaatccgcaaaatatcctgctatgggggcgctccggcctctcattcccggcctttatcggccagatgctgccgctggcagcagcgatgatgatgacactgcttgcgctgtgctggttctgtttcccccccaggcatctcaattatcagagcagcgacagggcgccctcctggcggccaaagctggtctggagctgcctggcgttctatgtcgtctttttgaccgccctggagctaaaacaggagctgtggggactggcgctgatcgcgctgggtttcctgctgctcgcgcgggcggtgatcgttaacgtcgactggacgctgctgctggtgtttatggcgatgtttatcgatgttcacctcttgacccagctccccgttctacagcatgcgctcaacggcgttggccagctctcggcgggagggttgtggctgaccacgattggtctgtcgcagtttatcagcaacgttccggcaactattttactgctcaactacgttccaccatcggcgctgctggcctgggcggttaacgtcggcggatttggcctgctgccgggctccctggcaaacctgattgcgctgcgcatggctggcgatcgtcgcatctggtggcgcttccatctctattcgctccccatgctgctgtgggcggcgctggtgggatacggcctgctgcagctctga

SEQ ID NO: 173802 - DNA, 1041 bp, Klebsiella oxytoca
atgcgttatcaaaaattgggtcataccggcctttttgtctctgagctgtgcctgggcaccatgaccttcggtggtgaaggcggcctgtgggggaaagtggggcagctgcgccaggcggaggcagagcagttggtgggcaacgcgctggatgcgggcattaacttcatcgacaccgctgatgtctattcagaaggacgctcggaagagattaccggccaggcgctaaagaatctgaaagtgccgcgtgaaaacgtggtggtggcgactaaagtctttggcgaaaccggcactgcaggcgtgaactcgcgcggcagttcgcgctatcacattatcagcagcgtcaaagagagcctgcgtcgtctgcagctcgatcatatcgatctctatcagcttcatggtttcgatcctgcgacttcgatcgaagagacgctgtatgcgctggataatctggtgcagcacggccacgtccgctatatcggggtgtcgaactgggcggcatggcaaatagtgaaagcgctgggcatttccgaacgccttgggctggcgcgctttgcctctttgcaggcttactacacgcttgccgggcgcgatctggagcgcgagctggtgccgatgatgcagagcgaagggctgggcctgatggtctggagcccgctggcgggaggtctgctcagcggtaagtacgatcgcgatgggcagtcggcgagcggcggtcgtcgtcaggagtttgatttcccgccggtgaacagagcgcgggcttttgactgtattgatgtgatgcgcgagattgccgaggcgaagggcgtttcggtggcgcaaatcgcgctggcctggctgctgcaccagccggcggtgagcagcgtgattattggcgcgaagcgggtcgaacagcttaccgataatctggcggcgacccgcattgccctgaacgatgatgaactgtcgcggcttgatgcggtcagcgcgctgccgcgggaatatccgggctggatgctggagcgtcagggcgaatatcgccgtaatcagctcgcacagcagtaa

SEQ ID NO: 173803 - DNA, 1377 bp, Klebsiella oxytoca
atgaacagaacactgccggcagattttttatggggtaactcggtttccagtatgcaaaccgaaggggcgtggaatgagggcggaaaagggatgtcggtttacgatattcgtcagccggcggaatttgcttccgactggaaggtggcgaccgactcctaccatcgctatcgggaagatttcgacctgatgcaggatttgggcatgaactgttaccgcttccagattgcctggagccgcgtttgcccggaaggcgacggtgagttcaatgaagaaggtattgctttctatcaccagtttatcgacgagttaattgcccgtggcattgagccgatgatttgcctgtatcacttcgatatgccgctgtcgctggctgaacgctttaatggttttaccgaccgtcgggtaatggaggcctttattcgttacgggcagaagatgatcgactgctttggcgacaaggtgaagtggtggctgacctttaatgagcagaatctttaccatatgccggacgcgtttctgatttcaggctatatgcgcggcgagaagaccctgcgcgagctgtatcagatccagcatcacgtgatgatggcccacgttcatctgacgcagtatctgcaccaggctaagccgcagtgtttgatgggcgggatgctggcccatgcgctggtctatcccgccacctgcaaaccgcgcgatattctttgcgcccagcagctggacgagtttttaaaccagaacctgctgcgcgcctttgccggggagggctacagccctgaggtcatgcacgtggtcgcccgcgaaggcctggaggatatctaccgagcagaggatctgacgctgatggcgcaggttaaaatcgactatctggcctttagctactatgccagcaaagcgctggatagcgacccgatcccgccgggcacgccggtcaactattacatgcagtttggcgataaaaagaatgactatctggaggccaccgagtggggctggcagattgatccgctgggctttcgcaccattattacccgctactacaacgactggcgtctgccggtgttcccgatagaaaacggcattggggtgattgagtcctgggacggcgtaaaccaggtggctgacgactaccgcattgcctatcatcgcgaccatatcaacgccatgaaagaggcgatatttgacgatggcgcgcaggtgattggctacctgggctgggggttgatcgatatcctcagttcgcagggcgatatgcgtaaacgctacggagttgtctacgtgaaccgggacaaccacgacctcaaggaccttaagcgcgtaccgaagaaaagctatgcctggctgaaacgggtcatccatagtcatggcgcagagatgtag

SEQ ID NO: 173804 - DNA, 717 bp, Klebsiella oxytoca
atgacggccaaatatctgagtatcgcgcgggaaatcaaaaaacgtattatcagccgccagtatcccgccagcgcgccgttacccgatcagttcgccctggcggcagagttcagcaccagcaggatgaccattcaacaggcgatgcgccagctgattgtcgaaggccttatctacacccgtaaggggcaggggaccttcgtgcgcaaaaatttcctccagctttcgcagtgggagctacccggcagcgactattttggcgccaccaaaacctgggaacatttaggggaagtcaccagccgggtgattcgcttcgagctgcgtttccccacggaaaaagagcaaagctcgttgctgattgacgccgatgccccggtctatgatttcgtccgtctgcggttgctcaatgaggagcccgtgtcgctggatctcaccgtgatgcccgttgcgctggtgcccggcctgaataaaacgattctgcaaagctcggtgtttcgctacgtacaggagacgctggggcttaaaatgatgggctcgtatcgggtagtgcgggcgatgaaaccgcaggcgctggacagagaacatctcaactgcgaagcgaccgacccggtgctggaggtcgaacaggtgatctatctggaggatggtacgccgctggagtatgcccattgccactatcgctacgatcacggcggaatcattctggtcaataacggttaa

SEQ ID NO: 173805 - DNA, 915 bp, Klebsiella oxytoca
atgaaattatcaacactcttcgcggcagccttcgccatcgtgggcttttgcaacacagcttctgctgtaacttatcctctgcccaccgacggcagccgtctgattggtcagaaccaggtgatcaccattccggaaggcaacaagcagccgctggaatacttcgccgccgaataccagatgggtttatccaacatgctggaagccaacccgggcgtggacaccttcctgccgaaaggcggcaccgtgctgaacatcccgcagcagctgatcctgccggacaccgtgcatgaaggtatcgtcatcaacagtgcggaaatgcgcctctactactacccgaaaggcaccaacaccgttatcgtgttgccgatcggtatcggccagttaggtaaagacacgccggtcaactgggtcaccaaagttgagcgtaaaaaagccggtccgacctggacccctaccgccaaaatgcatgcggaataccgcgcggctggcgaaccgctgccagcggttgttccggccggtcctgataacccgatgggcctgtacgccctgtatatcggccgcctgtacgccattcacggcaccaacgccaactttggtatcggcctgcgcgtcagccacggctgcgtgcgtctgcgtaacgacgacatcaaattcctgttcgaaaacgtgccggtcggcacccgcgttgagtttatcgatgagccggtaaaagcgacgactgagccagacggcagccgcttcattgaagttcacaacccgctgtccacgaccgaagagcagttccagggcggtgaaatcgtgccgattaatctgaccaaatcagtgcaggcgattaccagccagactgacgtagaccagagcgtgctcgatcaggcgattcagaaccgttccggtatgccggtgcgtctgaactaa

SEQ ID NO: 173806 - DNA, 783 bp, Klebsiella oxytoca
atgaccacaatctcccgccatccggccttcttatcgctgcagggcggtatcaactttcgtgacctgggcggccagcgtaccgccgacggccgccgcgtgcggtcggggaagcttttccgctccggctcgctgcatatgatgacgaccgctgacttaacccacctggacgctatcccgctcagccgggtgatagattatcgcgatccgggagaagtgcatcgtagccccgataagctgaacgaaacggcccactatctcaacgccccggcgaatcctcacgttcgcgacgtcaacgctaaagtcaccgagctcagcgccgccacgctcaacgcccttaacggcgagcagtttatgctggagctctatcgccagctgccgttcaacaacgccgcttatcgccagctggccggttggctgatggaacccttcgacggcgcgctgctgcagcactgcgcggtgggcaaagaccgcaccggcgttggctgcgcattgacgctgttcgccctcggctgcgatcgccatacggtgatggaagagtacctgctgacccagggcatgctgactgaggtcgagaatttcatgctcgattccctcggcgatgaactgaccgctcgcggccggcagaacctggcggaaatcatgacggttcatgagtcttatcttgctgccgcgctttctcaaatcgacgaccgctacgccagcgtcgatgcctggctggagaaagagtatcagcttacgccgcaggcgcgtgaagcgctccagtcgcggcttctggaggggtaa

SEQ ID NO: 173807 - DNA, 1593 bp, Klebsiella oxytoca
gtgctagtatccagcaacgtcaccatgcagttcggcagtaagccgctgttcgaaaacatttccgtcaaatttggcggcggcaaccgttacggcctgattggcgccaacggtagcggcaaatcgacctttatgaagatcctcggcggcgatcttgagccgacgctgggcaacgtctccctcgatccgaacgagcgtatcggtaagctgcgccaggatcagtttgcgtttgaagagttcagcgtgctggatacggtgattatgggccacggcgagctgtgggaagtgaagcaggagcgcgatcgcatctactccctggcggagatgagcgaagaggacggctacaaagtggctgaccttgaagtgctatatggcgagatggacggctattccgctgaggcgcgcgccggcgagctgctgctcggcgtggggatcccggttgaacagcattacggtccgatgagcgaagtcgctcccggctggaagctgcgcgtgctgctggcgcaggcgctgttctctaatccggacattttgctgctcgacgaaccgacgaacaacctggacatcgacaccatccgctggctggagcagacgctcaacgaccgcgatagcaccatgatcatcatttcgcacgaccgtcacttcctgaatatggtctgtacccacatggcggatctggattacggcgaactgcgcgtttatcctggcaactacgatgaatacatgaccgcggcgacccaggcgcgcgaacgtctgctggctgacaacgccaagaaaaaagcgcagatcgccgacctgcaatctttcgtcagccgttttagcgctaacgcctctaaatctcgccaggcgacctcgcgcgcccgtcagattgacaaaatcaagctggacgaagtgaaagcctccagccgccagaacccgttcattcgctttgagcaggataagaagctgttccgtaacgccctggaagtggaagcgctggctaaaggttttgataacggcccgctgtttaaaaacttcaacctgctgctggaagtgggagaaaaggttgccattctgggcgccaacggcgtgggtaaatccacgatgctgaaaaccctggtcggcgatctggcgccggacaacggtaccgttaaatggtctgagaatgcgcagattggctactacgcgcaggatcatgaatatgaatttgaaaacgatctgacggtatttgagtggatgagccagtggaaacaggaaagcgacgatgagcaggcggtgcgcagcatccttggtcgactgctgttcagccaggacgatatcaaaaagccggcgaaagtactctccgggggcgaaaaaggccgtatgcttttcggtaagctgatgatgcaaaaaccgaatattctggtgatggatgaacccaccaaccacctggatatggaatcgatcgaatcgctgaacatggcgctggagatgtatcagggcacgctgattttcgtttcccacgaccgtgagtttgtaagctcgctggcgacccgagtgattgaaattacgccggagcgcgttgtggacttcaccggtaactacgaagattatctgcgcagcaaaggtatcgaatag

SEQ ID NO: 173808 - DNA, 2364 bp, Klebsiella oxytoca
atgaagactttgaaaaactggactttacgccaacggctggagcaccacgttgagctgaccgtcgacggccaacacaccctgtgtctgtacgttctggaagagaatatgttccgcgtgctgctgaaacggcacggtcagctggcggtggatcgcacctggagtatcgctcccggacaggatgtgccgtgggaaggccgtccgcgcgaagagctaagcggctttagcctccccgcctggcagctcacggaacaggaaggcaccctctgtatcgccaccgaacagctgcgcgttatcgtccaccagccgctgtggctggaatggagctatcgcgatgaagccggcgagtggcagccgctggcgaacgaccgcccgaccagcgcctatctggcgaatgcgcacggcgacggcgttgctcactacctgagccgacgtaaagatgagcgcttctacggtctgggtgagaaggcgggcgatctgcagcgtaccggcaaacgctatgagatgcgtaacctcgacgcgatggggtataacgcggtgagcaccgacccgctgtataaacatattccatttaccatcgcgcagcgtagcgatgtcagctacggcctgttttacgataacctgagcagctgctggctggatctcggtaacgaaatcgataattaccataccgcctatcgccgctggcaggcggaagctggcgacatcgattactatctgttcaccggcaagcgcgtactggatatcactaaagccttcgttcgcctgaccggtaaaacgctgtttgggccaaaatggagcctcggctatagcggttcgacgatgcattacaccgacgcgccggatgcgcaaaaccagctgatgaactttatccgtctgtgcgatgaacacgccattccgtgcgattcgtttcagctctcatccggctatacctcgattaatggcaaacgctatgtctttaactggaactacgataaagtgccgcagccgcaggtgatgagccaggccttccacgatgccgggctgaagctcgccgccaatattaagccctgcctgctgcaggaccatccgcgctataacgaagtggcggaacgcgggctatttattcgtgattcacaggccgatgcccccgagcgctccagcttctgggacgacgaagggtcgcacctcgactttaccaacccgcagaccgtcgcctggtggcaggaaggcgtgacaacccagctgctggagatgggtatcgacgccacgtggaacgataataacgagtatgaagtgtgggacggcgaagcccgctgttatgggtttggccaggagattgccattaaacatattcgcccggtcatgccgctgctgatgatgcgcgcgtcgctggaggctcagcagcgctttgcaccgcacaaacgtccgtatcttatctctcgttccggctgcgccgggatgcagcgctatgttcagacctggagcggtgataaccgtactaactgggacacgctgcgctacaacacccggatggggctgggaatgagcctctccggactgttcaacgtcggccacgatgttggcggcttctctggcgataaaccggacccggaactgttcgttcgctgggtgcaaaacggcgttatgcatccgcgctttaccattcactcatggaatgacgaccagacggttaatgaagcgtggatgtatccggaaatcacgccggccatccgtgcggccattgagctgcgctatcgtctgctgccgtacctctataccctgctctggcaggctcacgccgacgatgaaccgatgctgcgcccgaccttcctcgatcacgagcacgatccgcagacgtttgccgaatgcgacgacttcctgttgggtcgcgatctgctggtcgccagcgtcgtcgagcccggtgagcgtcagcgccgcgtctggctgccggctaatcaggacggctggtacgactttgatagccaccagtggttcgccggcgggcagtggatcgtccttgatgcgccgctggaaaagctgccgctgctggttcgtgccggagcaggcctgccgctcagcgaacgcatccgtcacgtcgatgcgcaaaaagacgatcgtcgtgagctgaaactgttcccgctgaaaggcgtgggaacccgccgcggcctgctgtttgaggatgatggcgaaagctggggttaccagaatggccatgcgctgtgggtagagtgggaaatggtttgcgatagcgccagcatcaatctgaaggtcaacgcgcgcggcgattatcgaccggcgtggaaagcgttgaaggtgtcgttaccggcaggggaaacccgcaggctgctggtgaatggtgaagaaaagagcgagtggcgggtgtag

SEQ ID NO: 173809 - DNA, 1302 bp, Klebsiella oxytoca
atgagccaaggtctcaataatgatatggcggtgagtaaatcaggccgcatagtaaaaaatctgcgctggtggatactggtgctgtttttgctgggcgtgaccgtgaactacattacgcgcaactcgctggggattatcgccccggaattaaaaacctcattggggattaccaccgaacagtattcatggatagtcggcgcatttcagctggcctataccattttccagccgctctgcggctggctcatcgacgtaatcggcctcaagctcggctttatgatttgcgccacgctgtgggccgtcgcctgcattgcccatgccggtgcgggaagctggctgcacctggcgatcctgcgcttttttatgggcggcgctgaggctgcggcgacgccagccaacgccaaaacgctgggtgagtggtttccaaaatccgagcggccgatagcggctggctgggctggcgtcggtttctcggtcggcgccatgctggcgccgccgattatctactttgcgcacgcctcgttcggctggcagggcgcattcatgttcaccggcgcgctggcgctcttgtgggtcgtgctgtggtgggcgttttatcataatccggagaagcaccctaacctcgggaaagctgagctggcgctgatccagcaggataatgaagcaccgccggtcaaactgcccttctttaccgcgctgaaaaccgtatcaaaaaacaagcgcttctacggtatcgccattccggcctttatggcggaacccgcctgggcggtgctgagcttctgggtaccgctctatctggcaaaagagcacgggatggatttaaagcaaatcgctatgttcgcctggctaccgtttctggcggccgacctcggcagcgtcgccagcggctatctgaccaaactgtatacccgctggttcggctgttcacgggtgaactcggtggtcgccagctccgtgaccggcgccttcctgatgatttcgctcgccaccgtggcgatcacccgcgatccctatatcaccatcgtactgatttcaataggcggcttcggtcaccagattatctcctgcatgctcagcgcgctggtggtggagtcgttcgataaaggacagatggcgaccgtgaacggcatgcgcggatccgccgcgtggatcgccagctttctgttctcactgttaattggggtcaccgccgacaaaatcggcttcaacccgctgtttatcgccatggggttctttgacctgattggcgcggtattcctggtggcatttattgctgaacgtcgcgcaaaacgcgcctga

SEQ ID NO: 173810 - DNA, 1074 bp, Klebsiella oxytoca
atggataaaaagctaaaagtgagcgaaatagcgggccgcacggggctctctgtcagtacggtatcgcgagtgctggcagggaaagcgaataccagcgccagagcccgccagagggttctggagtgcgctcgcgagctgggcgtcatggacggtatcgccgccgggagaatgctgctcaataatctggtggtctttgcccctcagcgggcgttcgatgagcgtacagatatttactactatcgcgttattcagagcatcaattcggcgctggtgccccatgaggtgcatctgcgctactgcgcgctggaggagaatgacagcgatgccaatttgtttttgcagcgtatgcatgaaacatcgacccaggcggccatcttactgggaatcgacgatccgcatattcacgatctggcggcggacctggctaaaccctgcgtgatgattaactgccacgacgccggaatgcgcctcccttccgttgcgccggatcatcgactgatcggtcaattcgccgcccgctatctgtttgagatggggcaccaggcgatcatgaacgtgatgtgcctgcgccgctataccatggaactgcgtttactggggattaagcaggcgtggcgtgcgcggaatctgcgcttcgtcgatagcatggatttaatcgacgtcgccaatttcagcgcccgggatactgagacaaaagtgggcgagtggctggatcagcgcggtgatggcccgctgccaacggcgtttctggtaggcggtgattttatggcggcagggacgatcgctgctctgcagaagcgcggattacgcgtgccgcaggatatttctatcatgagtatcgacggctttaacctggcggcgattcaggatgtgccgttaaccgctgtccacgtcccgcgcgatgaattaggcgttgaagcagtacatttgttgcagcagaggctgattcgtcccgatgcgccgcacggctcactattattgcatggtacgctggcggtacgtgattcggtgcggcggatacgtgccggtaaccgccgcaccgccgttgagcctaaggggttatacgacgattaa

SEQ ID NO: 173811 - DNA, 1266 bp, Klebsiella oxytoca
atggctattacctgtacctgtgaaactttacctgccgacccaaaagcggccatccgccagattaagcaagagctgcgggcgcaaattggcgacgtgcaggcggtgttcgatcgtctgacggcgcgaatcgctgcgcgtgtggaagagattgatgcccttaaaaccagcggacaggacgtctggccgacgatcccgttcgccgatattgcccgggatcgggttacgcaagcccagcgcgagctcatcaagcgtcgcggctgcgtggtgatcaagagccattttccccgcgaacaggcgctgggatgggataactcgatgctcgcgtatctggaccgcaaccatttcgatgaggtctacaaaggccccggcgatacttttttcggttcactggaagcgtcgcgcccggaaatctatccgatttactggtcccaggcgcagatgcaggcgcgccagagcgatgaaatggccgccgcacagtcatttcttaaccgcttgtggacgtttaaccacgacggcaagcagtggtttaacccggatatcagcgttatttacccggaccgcattcgccgccgcccgccgggaaccacctcgaaaggtctgggcgcgcataccgattccggcgccctggaacgttggctgctaccggcctatcagaaagtgtttgccgacgtgtttaacggcaatgttgatgcttacgacccgtgggacgcggcgcaccgtactgacgtcgaagagtacacggtcgacaataccaccaaatgctcggtattccgtaccttccagggctggaccgcgctctccgatatgatccccgatcagggcctgctgcacgtcgtgccgatcccggaagctatggcttacgtactgctgcgtccgctgctcgacgatgtgccggaggatgaactgtgcggcgtcgcgccgggcaaggtattgccgatttcggaaaaatggcacccgctgctgatcaaagccttaagttctattccggcgctcaatgcgggcgattcggtatggtggcactgcgacgtcatccactcagtcgcgccggtggaaaatcagcaaggctggggcaacgtcatgtatattcccgccgcgccgatgtgtgagaaaaacctcgcctacgcgcagaaggttaaagccgcgctggcgcgcggcgcttcgccgggagatttcccgcgtgaagattatgaaaccgactgggaaggccgcttcacgctggaggatttaaatgtccacggcaagcgggcgctggggatggcggattaa

SEQ ID NO: 173812 - DNA, 816 bp, Klebsiella oxytoca
atgaccgttaaagttatcgtcaccgatatggacggaacttttctcaatgacgccaagcagtacgatcgctcgcgttttcttgcgcagttcgcgcaactccagcagcagggtattgaatttgtggtcgccagcggcaaccagtactatcagctgatctcttttttcccggaaatccgcgaccaaatttcctttgttgccgagaacggcgcgctggttttcgaacacggtcaacagctgttccacggtgaacttacccgccatgaatcccaggtggtgattggcgaactgctcaaagacccgcagctcaactttgtcgcctgcggcctcgagagcgcttacgtcagcgatcgcgcgcccgacgcctttgtcgcgctgatgtcaaagcactaccatcgtctgcagcgtattggcagctaccatgacatcgacgataagctgtttaagttttcccttaacctgccggatagcgaaattccgcagcttatcgacaaactgcacgtctcgctggacggcattatgaagccggtcaccagcggttttggcttcgtcgatttgatcatccccggcctgcataaagccaacggtatcagccgcttgcttaagcgctggaacatttcgccgcaggcgtgcgtagccatcggcgacagcgcgaacgacacggaaatgctgaagctggtgagatactctttcgcaatggccaatgccgccgaaagcattaaagcggtatcgcgttatgctaccgatgacaacaaccacgacggcgcgctgaaggtgattcaggccgtcctcgaccacgccaccccgttcgacgagtaa

SEQ ID NO: 173813 - DNA, 2433 bp, Klebsiella oxytoca
atgacaacgttgaaactggatactctgagcccgcgcatacaggcgcataaaatggcgctggtgcatatcgtcaagccgccggtctgtaccgaacgcgccctgcactatacccaagcctatcagcagcatctggataagccgatcccggtacgccgcgcgctggcgctggcccaccacctggcggaacgcacaatctggatcaagcacgatgaactgatcgtcggcaaccaggccagcgaagttcgcgcggcgccaatcttcccggaatacaccgttagctggatcgaaaaagagatcgacgacctcgccgatcgccccggcgccggttttgccgttagcgaagaaaacaaacgcgtgctgcacgaagtgtgtccgtggtggcgcggtcaaacggtacaggaccgctgctacggcatgttcaccgatgagcaaaaagcgctgctggccaccggcattatcaaagcggaaggcaatatgacctccggcgatgctcaccttgcagtcaactatccgctgctgctggaaaaaggcctcgacggcatgcgcgcgaaagtcgccgagcgccgttcgcgcattaacctgaccgtactggaagatctgcacggcgagcagttcctgaaagccattgatatcgtgctggaagcggtgagcgaacactgtaagcgctatgccgggctggcgcgcagcatggccgcgacggagagccgtgaatcccgccgcgacgagctgctggcgattgccgaaaactgcgacatcatcgcccatgagccgccgaaaaccttctggcaggcgctgcagctgtgctatttcatccagctgattctgcagatcgagtccaacggtcactcggtctctttcggccgtatggaccagtatctctacccttactaccgccgtgacgttgagctggcacactctctggatcgcgaacacgccattgagctactgcactgctgctggcttaaactgctggaggtgaacaaaattcgctccggctcgcactccaaggcttccgccgggagcccgttgtatcagaacgtcaccatcggcggccagaatctggtggacggtaaagcgcaggatgcggtgaacccgctctcctacgccatcctggaatcctgcggtcggctgcgttcgactcagcctaacctcagcgtgcgctatcacgcgggcatgagcaacgacttcctcgacgcctgcgtgcaggtgatccgctgcggcttcggcatgccggcgttcaacaacgatgaaatcgtcatcccggaatttatcaagctggggatcgagccgcaggacgcctacgactatgccgctatcggctgcattgaaaccgccgtcggcggtaaatggggctatcgctgcaccgggatgagctttatcaacttcgcccgcgtcatgctggcaaccctggaaggcggccgcgacgccaccagcggccaggttttcctgccgcaggaacatgcgctgtcaaaaggcaacttcgacaactttgaacaggtcctggccgactgggatacgcagatccgctactacacgcgcaaatctatcgagattgagtacgtggtcgataccatgctggaagagaacgtgcacgatatcctctgctcggcgctggtcgatgactgcattgagcgtgcgaagagcatcaagcagggcggcgcgaaatatgactgggtatccggtctgcaggtcggtatcgctaacctcggcaacagcctggcggcggtgaagaaactggtgttcgaccagggcgtcattggtcaacaagagctggccaaagcgctggctgaagacttcgaaggcctgacccacgagcagctgcgccagcgcttaatcaacggcgcgccgaaatacggtaacgatgaagatagcgtcgatattttgctggctcgcgcctaccagacctatattgatgagctgaagctgtatcataacccgcgctatggccgcggcccgatcggcggtaactactacgccggcacctcgtccatctccgccaacgtgccgtttggcgctcaaacgatggcgacgccggatggccgtaaagcgcactcgccgctggcggaaggggcaagtccggcttcgggtaccgaccacctggggccgaccgcggtgatcagctcggtaggtaaactgccaaccggctcaattcttggcggcgtactgcttaaccagaagctgaacccggccacgctggagaatgagtcggataagcagaaactgatggtgctgctgcgcaccttcttcgaggtgcacaaaggctggcatattcagtacaacatcgtgtcgcgcgaaacgctgctggaagcgaagaaacatcctgaccagtatcgtgatttagtggtccgcgtggccggatactcggcgttctttaccgccctgtcgccggatgctcaggacgatattatcgcccgtaccgagcatacgctgtaa

SEQ ID NO: 173814 - DNA, 900 bp, Klebsiella oxytoca
atgatcttcaacattcagcgttactcaacccatgacggcccggggatccgcactgtcgtattcctcaaaggctgttcgctgggctgccgctggtgccagaacccggaaagccgcgcccgcacggcggatttgctgtatgacgcccgcctttgcctggacggctgcgacctctgccagcaggctgcgccggaagtgattacccgtaagctggacggtctgattatccatcgcgaaaagctcaccgatgcgcatatcggcaaattgcgcgactgctgcccgacgacggcgttaacggtgtgcggcgaagagaaaagcgtcgaagagattatggccacggtgctgcgcgacaaaccgttttacgaccgcagcggcggcggcatcacgctttccggcggcgagccgtttatgaatcccgagctggcccgacagctgtttgaggccagccaccgcgccgggatccacaccgcggtcgaaacctgcctgcacgtgccgtggaaatacgtcgaacccgctttgccgtttatcgatctgtttctcgccgatctcaagcacgtcaacgaagcgattttccagcagtggacggacggcagcgcccgtcgggtactggataacctgcagcgcgtcgcgcaggccggaaagaaaatcatcattcgcgtaccgctgatccagggctttaacgccaacgaaagcgatatcgccgccattaccgattttgccgctgaccgtttaaaggttggcgagatccactttctgccttaccacacgttaggcatgaataaataccaattactcagtcagccctataccgctccggataaaccgcttgctgcacccgagctgctcgccttcgcgcagcactatgctcagagcaaaggtttaacggcgactctacgaggataa

SEQ ID NO: 173815 - DNA, 756 bp, Klebsiella oxytoca
atgagcgtggagctgagcgatgcggagatgctgcgctataaccggcagattattctgcgcgatttcgattttgacggtcaggagcagctgaaagcctcccgcgtgctggttgtcggcctcggcgggctgggctgcgccgccgcgcagtatctggcggcggcaggcgtaggcctgcttaccctgctcgatttcgacaccgtttcgctctccaaccttcagcgccagactctgcacagtgacgccaccatcggccagccgaaggtcgactccgcccgcgccgcgctggcgcggattaatccccacgttcagctcacggcgctcaacgcgcggctggaagacgaggcgctggcggcgcaaatcgccgcccacgatctggtgctcgactgtaccgacaacgtcgcgatccgtaaccagctcaacgccggatgtttccgccataaaacaccgctggtctccggcgcggcaattcgcatggaagggcaaatcagcgtttttacctggcaggaagatgaaccctgctaccgctgcctgagccgtctgtttggcgaaaacgccctcacctgcgtagaagccggggtgatggcgccgctggtcggcaccattggttcgctacaggcgatggaagcgataaagttgctgacccgctacggcagcccggcgacgggaaaaatcgtcatgtacgacgccatgcgctgccagttccgcgaaatgaaattgatgcgtaaccctcagtgtgaggtgtgtggcacgccttag

SEQ ID NO: 173816 - DNA, 1236 bp, Klebsiella oxytoca
atggattttaccgccggactgatgccgctcgacacagccctgacccagatgctcaatcgtattacgccgctgaatgcgacggaaaccgtaccgctgttgcaggccttttcgcgcgtgaccgcccatgatctcgtttcaccgctcaacgtgcctggttttgataactcggcaatggacggctatgcggtacgcctggcggatctcaccgacggcgcagcgctgccggtcaccggcaaggccttcgccggtcaaccttttaacggtgactggccggcgggcacctgtatccgcattatgaccggcgcaccggtgccggaaggctgcgacgcggtggtgatgcaggagcagacggaacaaaccgatgggggcatccgcttcctcgcgccggtgaaaagcggacagaatatccgtcgtctcggcgaagatatcgcccacggtgcggtcgttttccctgctggcacccgcctgaccgttgccgagctgccggttctggcctcgctggggattgccgacgtcgaggtgatacgcaaagtgcgcgtggcggttttctctactggcgatgaactccagctgccgggccagcccctcgccgacgggcaaatttacgatactaatcgcctggcggtacacctgatgctgcaggagctgggctgcgaggtcattaacctcggcattattcccgacgatccggctaagctgcgggaagtctttatcgaggccgatcgacaggcagacgtggtgattagctccggcggcgtctccgtcggcgaagcagactacaccaaagcgattctcgaagaactgggtgaaatcggcttctggaagctggcgattaaaccgggtaaacctttcgctttcggcaagctcaaccacagctggttttgcggtctgccgggtaacccggtttccgcaacgctaaccttttaccagctggtccagccgctgctggcgaagctctccggcaacggtgggcaggctcagccgatgcgtctgcgcgtgcgcgccgcaacccatctgaaaaaatcgcccggacgactcgattttcaacgcggcgtgctgcagcgcggtccggacggcgaactgacggttaacagcaccggtcaccagggatcgcatatcttcagctcattcagcctcggcaactgttttatcgtgctggagcgcgagcgcggcaacgtggaagcgggcgaatgggtggacgttgagccctttaatcatctgttcggagggctgtaa

SEQ ID NO: 173817 - DNA, 942 bp, Klebsiella oxytoca
atggggaaggcggttatagcaattcacggcggagccggggcgattagccgcgcgcagatgacgccggagcgcgagcgggagtacgtggcagcgctgtcggcgattgtcgatagtggacaaaaaatgctggcggccggggccagcgcgctggatacggtaaccgaagcagttcggctgctggaagagtgcccgctatttaatgccggtattggctccgtgtttacccgcgatagtcgccatgaactcgatgcctgcgtcatggatggttacagcctacaggcgggagccgtggccggcgttcagcatttacgcaatccggtgctggcggcgcggctggtgctggagcaaagtccgcacgtgctgctgattggcgaaggggcggaagcgtttgccgcttcccgcggtatggcgcgcgtcgataacagcttgttttctactcctgcgcgtttactgcagctgcgtcaggcgcaggaaggcgacgatatcgtgctcgatcaccacgccgcgccgctggatgagcggcacaaaatggggaccgtcggcgcggtagccatggatctgacgggcaacctcgcggcggcgacctcaaccggcgggatgaccaataagctaccgggacgcgtcggcgacagcccgctgccgggagcgggctgctacgccaataacgccagcgtcgccgtgtcctgtaccggtaccggggaagtgtttatgcggaccctggcggcctacgatatttcggcgctgatggagtatagccagcttagcctgcaggaggcctgcgaaagggtagtgatggagaagcttccggcgctgggcggtagcggcggcctgatcgccatcgacagagaaggcaacgtggcgctgccgtttaacagcgaaggcatgtaccgtgcctggtgttatgcgggcgatacgcccacgattggtatttatcgcgaataa

SEQ ID NO: 173818 - DNA, 1854 bp, Klebsiella oxytoca
ttgccgcatagtcaagaaatcgatgccgatgatgttctgcaggtgcgcggcctgaatgtcgtgtttaatcagcaacagcaggctttttccgccgtccgcgacctgtcgtttaccctgcggcgcggcgaaacgctggcgattgtcggcgagtcgggctcgggaaaatcggtgacttcgctggccctgatgcgcctgctcgatcgggcggtcagcgaagtgcgcagcgatgcgctacttctgcgccgtcgcagtcggcaggtgattgagctgagcgaacagtctgacgctgaaatgcgcggcgtgcgcggcgcggatatggcgatgatcttccaggagccgatgacctcgctcaatccggtcttcaccatcggcgagcagattgccgaatctatccgcttacatcagggcctgaagcatgatgaggccctgcgcgaagcgaaaaaaatgctcgatcaggtgcgcattccggaagcggaagccatgctctcacgctatccgcaccagctttccggcgggatgcgtcagcgggtgatgatcgccatggcgctctcctgtcgtccggcggtgctgattgccgatgaaccgacgaccgcgctggacgtcactatccaggcgcagatcttacagctgattgccgtcctgcaaaaagagatggcgatgggcgttatctttattacccacgatatgggggtggtcgccgatatcgccgaccgcgtgctggtgatgtatcgcggcgaagcggtggaaaccggcagcgtggaagagatttttcgcgcgccgaagcacccgtatacccaggcgctgctggccgcggtgccgcggctgggcgcgatgcgcggcacttcgctgccgcgtcgcttcccgctgttaaaccagagcccgtcgtcggaggggcagaacaccgttgtggccggagaaccgatccttaaagttcgcgatctggtggcgcgcttcccgctgcgtagcggaattctcaaccgcgtaacccgtgaggtgcatgcggtcgaaaaggtcagctttgatttatggcccggcgaaaccctgagcctggtgggcgagtccgggtgcggtaaatcgacgaccggccgggcgctgctgcggctggtagagacccagggcggcagcattatcttcaacggccagcgaattgatatgctaacgggcagtaagcttcaggcgctgcgccgcgatattcagtttatttttcaggacccgtacgcttccctcgacccacggcaaacggtgggctattcgattatggagccgctgcgggtgcatcggctgctggagggcgatgccgcccgtgaacgggtcagctggctactggaacgcgtcgggctggagccggaacatgcgtggcgctacccgcacgagttttccggcggccagcggcagcgcatctgtattgcccgcgcgctggcgctcaatccgaaagtggtgattgccgatgagtcggtatcggcgctggacgtgtcgattcgcgcgcaaattatcaatctgatgctcgatctacagcgtgagatgggcatcgcatttctgtttatctcccatgacatggcggtggttgagcgcatcagccaccgcgtggcggtgatgtatcgcgggcgtattgtcgagattggcccgcgccgcgccgtgtttgaaaacccgcagcacccctatacccgtaaactgatggccgccgttccggtggctgaccctgcgcatcgccgtccgcagcgcgtgctgctctccgacgagctgccgggtaacatcttcaagcggggcgaagaggggatcagtacaccgttacagcaggtggggccggggcactttgtcgccagagagtccgccgccgacgtgctggcgcgctaa

SEQ ID NO: 173819 - DNA, 1539 bp, Klebsiella oxytoca
atgactcaacgcgtatcaggcaaatggctgttggcgctgggcgtcgcctcggcgctgacagccgctccggctctggccgcaaaagatgtggtggtggcggtcggttctaattttacgaccctcgacccgtatgatgctaacgacacgctgtcgcaggccgtcgccaagtccttctatcaagggctgttcggcctcgataaagagatgaagctacagaacgtgctggcggaaagctataccgtttccccggacggcctggtgtataccattaagctacatccgggggtgaagttccaggacggtaccgaatttaatgccgaagcggttaaggcgaacctcgatcgcgccagcaacccggaaaaccatctcaagcgttataacctgtataaaaatatcgccagcaccgaagcggtagacccgaccacggtgaaaattaccctcaaacagcctttctcggcgttcattaatattctggcccatccggcgacggcgatgatttctccggcggcgctgaagaaatatggtaaagagattggcttccatccggttggcaccgggccttatcagctcgatacctggaaccagaccgattttgtgaaagtgaaaaaattcgccggttactggcagccagggctgccgaagctggactccatcacctggcgcccggtcgtggataataatacccgcgcggcgatgctgcagaccggcgaagcgcagtttgcgttcccgatcccctacgagcaagcgccgctgctggagaaaaacagcaagctagagctggtggccagcccgtcaattatgcagcgctatatcagcatgaacgtgacgcagaagccgttcgataatcccaaagtgcgcgaagcgattaactacgctatcaaccgtcaggcgctggtaaaagtcgcttttgccggctacgccacaccggcgaccggcgtggtgccgccgtctatcgcctatgctgcaagctacagcgcctggccgtacgatccggctaaagctcgtgagctgctgaaagaggcgggttatccgaatggctttaccacgacgctatggtcatcgcacaaccacagcacggcgcagaaagtactgcagtttacccagcagcagctggcgcaggtgggcattaaggcgcagctgacggcgatggatgcgggccagcgcgcggcggaagttgaaggtaagggacagaaagagagcggcgtacgcatgttctacaccggctggacggcgtcgaccggggaagccgactgggcgctttcgccgctgtttgcgtcgcaaaactggccgccgaccctgtttaatacggctttctacagcaatccgcaggtcgataaagatctcaatgacgcgctgaaaaccaccgatgcgcaggaaaaaacgcggctgtataaagacgcgcaggatactatctggaaagagtcaccgtgggtgccgctggtcgtagaaaagctggtctcggcgcacagtaaaaatctgaccgggttctacatccagccggataccggatttagctttgaacaggcggatcttaagtag

SEQ ID NO: 173820 - DNA, 921 bp, Klebsiella oxytoca
atgctcaattatgtgattaaacgcctgctggggctgatccccacgctgctgattgtagcggtgctggtgtttctgttcgtgcatatgctgcccggggatccggctcggctgattgccgggccggaagccgatgcccaggtggtgggaatggtgcgccagcagcttgggctcgatcgcccgctgcacgtgcagttctggcactatatcagcaacattttgcagggcgactttggcacctcgatggcttcccgccgcccggtgagcagcgaaatcgccagccgttttatgcccactttctggctgacgattgccagtatgggctgggcggtcatcttcgggatggcggcagggatcgtggcggccgtgtggcgcaatcgctggccggatcgtataggcatggcgctggcggtcaccggcatctcgttcccggcctttgcgctcggtatgcttttgatgcagatcttttccgttgaactgggctggctgccgacggtgggcgccgacagctggcggcactatattctgccttcgctcaccctgggcgcggcggtggcggcggtgatggcgcgttttacccgcgcctcgttcgtcgatgttctgcatgaagactatatgcgcaccgcgcgggcgaaaggcgtcagcgaaacgctggtggtgctcaagcacggcctgcgcaacgcgatgatcccggtcgtcactatgatggggctacagttcggctttttgctcggcggttcaatcgtggtggaaaaggtctttaactggccaggtctcggacgtctgctggtggactcggtggagatgcgcgattacccggtgattcaggcggaagtgctcctgttttcgctggagtttattcttattaatttagtggtggacgtactgtatgccgccattaatccggctatcaggtataagtaa

SEQ ID NO: 173821 - DNA, 948 bp, Klebsiella oxytoca
atgccgccattaatccggctatcaggtataagtaaggtgcgattgctcaactggagaagacaagcggttatcaacgcgatgccgggggttaaacccgggcagatacgtaccccgtggcacgagttctggcggcggtttcgcggccagccggtggcgatgggcgcggggatatttgtgctgctgctgattgcggtggcgatcgtggcgccgtggatcgcgccgttcgatgcggaaaactattttgactacgatcggctcaacgatggcccgtcgatgatgcactggttcggcgttgattcgctggggcgcgatatttttagccgggtgctggtcggcgcgcagatttcgctggccgccggggtactggcggtattgatcggcgcggctatcggcaccgtacttgggctactggccgggtattacgaaggctggtgggatcgcatcattatgcgcatctgcgatgtgctgtttgctttccctggcattcttctggcgattgccgtcgtggcggtgatgggcagcggaatgtcgaacgtcatcatcgcggtggcgatcttttcgatcccggcatttgcgcgtctggtgcgcggcaatacgctggtgcttaagcagcagacttttatcgagtcggcgcgcagcattggcgccagcgacgctaacattctgtttaaccacattttgcccggaacggtatcatcgattgtggtctactttacgatgcgcatcggagtgtcgattatctctgccgccagcctgtcatttctgggccttggcgcgcagccgccgacgccggagtggggggcaatgctgaacgaggcgcgggcggatatggtgatggcgccgcacgtggcgctgttcccggcaattgccatttttctgacggtgctggcgtttaacctgctgggtgatggcctgcgcgatgcgctggatccgaagataaaaggttag

SEQ ID NO: 173822 - DNA, 1326 bp, Klebsiella oxytoca
atgagcaatgtcacccctcagccgaagatcggctttgtctctctgggctgcccgaaaaatctcgtggactcagaacgtatcctgactgaactgcgtaccgaagggtatgatgtggttccctcctacgataacgctgatatggttatcgttaacacctgcggctttatcgatagcgccgtgcaggagtcgctggaagcgattggcgaagcgttgaaagaaaacggcaaagtgatcgtcaccggctgcctgggcgcaaaagaagatcagatccgcgaagtgcatccgaaggtgctggaaattaccggcccgcacagctatgaacaggtgctggagcacgtccaccactacgcgccgaagcctaaacataacccgttcctgagcctggtgccggaacagggcgtgaagctgacgccgcgtcattacgcttacttaaaaatttctgaaggctgcaaccatcgctgcaccttctgcatcatcccgtccatgcgcggcgatctcgtcagccgtccgattggtgaagtgctggcagaagccaaacgcctggccgacgcgggggtaaaagagctgctggtgatttctcaggacacctccgcctacggcgtcgatgttaaacatcgcagcggcttccacaacggtatgccggttaaaaccagcatggttagcctgtgcgaagaactggctaagcttggcatctgggtgcgcctgcactacgtctatccctatccgcacgttgatgatgtgatcccgctgatggcggaaggcaaaattctgccctacctcgatatcccgctgcagcacgccagcccgcgcattctcaagatgatgaagcgtcccggctccgccgaccgtcagctggcgcgtatcaagcagtggcgcgaagtctgcccggaactcaccctgcgctcgacctttatcgtcggcttcccgggcgagacggaagaagatttccagatgctgctggacttcctgaaggaagcccgcctcgaccgagtcggctgcttcaagtacagcccggtggaaggcgcgaccgccaacgaactggcggatcaggtaccggaagacgttaaagaagagcgctggaaccgctttatgcagcttcagcagcagatctccgccgagcgtctgcaggagaaagttggccgcgaaattatggtgctgatcgacgaagtcgatgaagaaggagccattggccgcagcatggccgatgcgccagaaatcgacggcgcggtgtacctcaacggcgaaagtaaagtcaaaccgggcgacgttgtgcgggtgaaagtcaaacacgccgacgaatacgatctgtggggcagccgggtttaa

SEQ ID NO: 173823 - DNA, 519 bp, Klebsiella oxytoca
atgtttaaaaagttgggtggttcagcgtgcgcgctggtaatgattggcacagcgccagtttatgccgacgagctggcgttatattcagtgaataccggttcatttgtctatcatatgaccggcaatcacggccaatataacgaaaaattcaataatcaatttttttccgttgagcgcaagctgtcggcagattcgaagtacagcctgttagtcgggaccatgaaaaatagttttgacgatcgctgcctctctctgggggcaaggagagactggtatgcggggacaaatggctggacgtttaagggcgtctatgcctacaccggggagttcttctttaaagcttttagcgattgcggcgattcaggtacctatcgaacggcgaagaaactgaccggcgtcggtttctctccctatatttatcatggcctgcagtacaattttaccccttatttcggcgtagaaaccgggattattatcccggcgatatttgtggtgagcgtgcagtggagttttcgttga

SEQ ID NO: 173824 - DNA, 1245 bp, Klebsiella oxytoca
atgattaatcccggcagaagaaactatatcttgttgagtcttttcgacttcctctacctcttcgcctggtcctcgaccatggcattctttgttatctggacgacccagcatctcgggattagcgccacgaaaaccggcctgctctactcggttaacgcctttattgccctgctgatgcagcccttctttggctttatttccgataaattcggcctgaaaaaacgactcatctggtttctcgtcgccatgctgctaccggtgggtccgttctttatttatttatatgcaccgctgctggtgcacagcttctggctgggcgcgctgctcggcggggtatacctggggattatttttaactccggctgcggggtgatcgattcgtatatcgataaaatttcgcggcgctaccagttcgaatatggccgcgtaaggatgtggggatcgttaggctgggccgccgcggcgtggatcgtcggtaagtatatcgacagcaatccgaaccttgctttctggctggccagcatcgccattgtgattgccgcgatctgttttatgctgaccaaaatcgaactgagcgaagcggagatgcagaaaaccagcgccctgaaagtttcccatgccctggagctggcgaagaacgggcagttctggatgctgctggtcttcacccttttcgtcacgcaaatctacgatacctacgatcagcagtttgcccagtacttttccctgcagttcccgacgcccgaggaggggaatcgctggtacggaattctggcctccattcaggtgtgcggggagacgctgtttttatgcctgatgccgtggtttgtaaaccgcaccggcgcgaagtgggcgctgatcatcgccggactgatcatgtcggtccgtatcgtaggctccgcgatcccgctgggtccggtgtggatcggcgcagtcaaaatgatgcatgcgctggaaaaaccgctgatcctggtgtcggtatttaaattcattgccgccaacttcgacaacaagctgtcatcgacggtttacctgctggtgctgtttgtcgcctccatcgccaccgccgtttactcgccgctggcggggtatttgtatgacactatcggcttcgcgcagacgtattatatcctgggcggtgttgccggggtatttacgttaatttcggtatttacgcttcgcgataatagagaaccgaccgcgccggggtctgcgccaggcgctggcgttgcgcaaagccattaa

SEQ ID NO: 173825 - DNA, 384 bp, Klebsiella oxytoca
atgaacgttgacagactgtatcgtaacctgatgaataaactgattaatgcctccattgatcttgatgcttatttacagttgcgtaaagcaaaaggctatatgtcagtcagcgaaaacgaccatctacgtgataacttgtttgaactgtgccatgaaatgcgtgaatacgcgccgcgcctgcagcacgccgttgcgccggaggaaaaggaagccctgcgccttgcgggcgaagccgtcgcttccgcggcggtatgcctgctaagcggacatcatgattgcccgtcctacattgcggtcaacgtagataaactggaaagctgcctggcggtattgcggctaaacattcagaaattgaatgattttgcccccattacccacgcctga

SEQ ID NO: 173826 - DNA, 1113 bp, Klebsiella oxytoca
atgcaccagaccgtcaccctgatagcgcttaccacgctgttgttacccactgccgtccttgccgcccgggagcgcgtggaggtgttgcagaaccagctcgaacacccgtgggcgctggccttcctgccggacgatcgcggtattttgattaccctgcgcggcggcgaactcaagctctggcagcgcgacaaaggcctctcgtcggcgatcccgggcgtaccgcaggtctgggctaacgggcagggcggtttgctggacgtggcgctggcaccggactttgcccagtcgcgccgggtctggctgagctatgccgagggcggggatgaggataaagccgggaccgcggtgggctatggccgattgagcgaggatctccagcgtctggaaaacttccaggtggtgttccgccagcagccgaagctctcgaccggcaatcattttggcggacggctggcgttcgacggtcgtggtcatctgtttatcggtctcggagagaataaccagcgttcaaccgctcaggatctcgataagctgcagggaaaagtggtgcggctaacggctgatggcaaggtcccggccgataatccttttgtcggccagtctggcgtcaggcctgaaatctggtcttacggaattcgtaaccctcagggattggcgataaacccgtggagcgatacgctgtggttacatgagcacgggccgcgcggcggggatgagatcaatatcgtgcaaaaaggtaaaaactacggctggccgctggcgacgcacggcattaactacagcggcctgccgatcccggaagccaaaggcaaaaaggcggaaggcaccgaagcgccgctatttgtctgggagaagtcgccggcggtgagcggtatggcgttttacaacgcgcaggtttttccgcagtggcaacacaggctgtttatcggcgcgctgaaggatgaatcgctcattgtgctcaaggttgatggcaataaagtcacggagcaggagcgcattctgaccgatcgcggtagacgcattcgcgacgtacgcgttggacccgatggttatttgtatgtgttaaccgacgaatccaacggtgagctgctgaaggtgagtccggcgggttaa

SEQ ID NO: 173827 - DNA, 627 bp, Klebsiella oxytoca
atgattacgctgtggggcagaaataactcaaccaatgtgaagaaagtgcgctgggtgctggaagaactcgacctcccgtatcagcaaattctggcaggcctggagttcggtctgaatcacgatccggcctatctggccatgaaccccaacggtctggtaccgctattgaaagatgcaacgaccgatgtcgtgctctgggaatcaaacaccattatccgctatctggccgcgcagtatggtcagaatcgcctgtgggtggagtcgccagccgagcgcgcccagggagaaaaatggatggactgggccaacggttcgctctcgcctgcccatcgacccgttttaatgggcctggtcagaacgccggtagaaaaacgcgatcctgccgccattgaagccggtattgccgcctgcgagacgctgttcgctattctggacgacgagctgtcgcgccatcagtggctgtcgggcgatgccttcggcctcggcgatatcgccgtcgcgccgttcgtctacaacctgctggaaacggtaaaaacctggcagccgcgcccgcatctgcagcgctggtaccagcagatcggcgaacgtcaggcctggcgcaacgtggtgatgatcccggtcacctga

SEQ ID NO: 173828 - DNA, 1212 bp, Klebsiella oxytoca
gtggctcttatgacgcatgatgctttttcccttcgcggcctcgcggcaggctgcgcgcttttatttctcgtcgcgcctgcggtgcaggctgcggaacaactccccgatgcgccatccattgacgcgcgcgcctggatcctgatggactatgccagcggcaaagtactcagcgaaggcaatgccgatgaaaaactcgatccggcaagcctgaccaagatcatgaccagctacgttgtcggccaggcgctaaaggcgggtaagattaagtctacggatatggtgaccatcgggcgcgatgcgtgggccaccggtaacccggcgctgcgcggctcctcggtgatgttcctcaagcctggaatgcaggtgtcggtggaagatcttaacaagggcgttatcattcagtccggcaacgacgccagcatcgcgattgccgactacgtggcgggcagccaggacgcctttgtcagcctgatgaacggctatgcgcagaagatgggcctcaccaataccacctttaagaccgtgcacgggcttgatgcgccgggtcagttcagtaccgcccgcgatatggcgctgctgaccaaagcgatgatccatgatgtgccggaagagtatgcgatccacaaagaaaaagagttcactttcaacaaaatccgtcagccgaaccgtaaccgcctgctgtggagcacgaaccttaacgctgacggcgtgaaaaccggaaccactgccggtgcgggctacaatctggtctcttccgcgacgcaaaacgacatgcgcctgattgccgtcgtgctcggtaccaaaactgaccgtatccgatttaacgaatctgaaaaattgctgacctggggcttccgcttttatgaaaccgtgacgccgattaaacctgatgccaccttcattacccagcgcgtctggtttggcgatagcagtgaagcgaagcttggcgcgggcgatgccggttccatcacgctgccgaaaggccagttgaaaaacctgaaggccagctacactttgaatgatacgcaactgaccgcaccgctgactaaaggtcaggttgtcggcaccatcgactttaaactgaatgataaaaccattgaacagcggccgctgattgttatggaagcggtcaatgaaggcgggttctttagccggatgatcgatttcgtgctgatgaaactgcacggctggttcggcggctggttctcgtaa

SEQ ID NO: 173829 - DNA, 759 bp, Klebsiella oxytoca
atggaaactcgtcgtgacgaacgcatcagccagcttattcaggcactcaagcgcagtgataaactgcatctaaaagaagcggccaccctgcttggggtgtcggagatgactattcgtcgcgacctcaacggccacagcggcccggtcgttttgctgggcggctatatcgttctggagccgcgcagcgcgacgcactatctgctaagcgaccagaaaacgcgccttgttgatgaaaaacgccgcgccgcccgccatgcggcaaagctgcttgaggcccatcagatggcctttttcgactgcgggaccaccacgccgtggattatcgatgccatcgacaacgccctgccgtttaccggggtctgctattcgctcaacaccttcctttccttgcaggaaaagccacagtgccgcgcgattttgtgcggcggcgagttccacgccagcaacgccatttttaaaccgctgagcctgcaggatacgctaagccatctttgcccggatatcgcgttttattccgccgcgggcgtcgattgcgagcatggagcgacctgctttaacctcgaggagctgccggttaaacactgggcgatgaaaagcgcgcgctaccacgtgctggtcgtcgatcacagtaaatttggcaaagttcggccggcgcggatgggcgatttatcgcagtttgacgtgattgccagcgacgtgtgtccggatgacgagctgcttacgctggcgaaagaaaaacagatttcacttctttactaa

SEQ ID NO: 173830 - DNA, 594 bp, Klebsiella oxytoca
atgctggaaaatattaactactcgctgtttgcattactcaatgccactccctcgtccccgtggtgggcgatagagatcgcgacgtttatcgccaaagacctgattattattgtgccattattggtattagccttatggctttggggtccaaaccagcgtcagctagtatttaaggtgatgatggcattagccattagtcttacgctgtcatggatattcggcgcgctttttccgcacgaacggccgttcgccgccggtatgggttataacttcctgcaccactcgcccaacaactccttcccgagcaatcacggcaccatctgctttacctttgcgctggcctttatgttctggcaccgcctgtggtcgggagtcctgcttttcgccgttgcctgcgcaattgcctggtccagggtctatctcggcgttcactggccgatggatatgctgggcggacttctcaccgcgatgagcgcctgtctaagcgcccagcttttgtggcaaagcggcggaaagaccctttatcagcatctgcagcggctgtaccgcctgttcttttcgctaccgattcgcaaaggctgggtgcgcgaataa

SEQ ID NO: 173831 - DNA, 516 bp, Klebsiella oxytoca
atgcacaattcttcactttcaggcaaacgcctcggacgtcaggcgctgctctttccgctgtgcctggtgttatacgaattcgccacctatatcggcaatgatatgatccagccgggcatgctctcggtcgtggaagagtttggcgttggcaatgaatgggttccgacctccatgaccgcctatctcgccggcggtatgtttttacagtggctgctgggcccgctttcggaccgcatcggccgccgtccggtcatgctgaccggggtggtgtggtttatcgtgacctgcctggcgacgctgctggcgcaaactattgagcagttcacgctgctgcgctttttgcagggtatcagcctgtgctttattggcgcggttggctatgcggcgatacaggagtcttttgaagaggcggtatgcatcaagattaccgccttaatggccaacgtcgcgctgattgcgccgctgcttgggccgctggtgggcgcggcctgggtacaatcttgccgtgggagatga

SEQ ID NO: 173832 - DNA, 723 bp, Klebsiella oxytoca
atgatgtttgtcctgtttgccgtactggccgctatcgccttcttcgggctacagcgggcgatgccggaaaccgccacccgcatgggcgagaaactctcggtcaaagagctggggcgtgattatcgtgaagtgctgaaaaacctgcgctttgtcgccggcgcgctggccaccggttttgtcagcctgccgctgctggcgtggatagcccagtcgccggtgattatcattagcggcgagcaggcgaccagctacgaatatggcttgctgcaggtgccaatctttggcgcgttgatcgccggtaacctggtgctggcgcgccagacttcccgcaaaacggtgcgttcgttgattatcctcggcggctggccaattatgcttggcctgctgatttccgccgtcgctacggtcgcctcgacgcacgcttatttgtggatgaccgccgggctgagcgtttacgccttcggcattgggcttgctaacgccgggctggtgcgcctgacgctgtttgccagcgaaatgagcaaggggacggtatcggcggcgatggggatgctgcaaatgctgatctttaccgtgggtattgaagtgagcaagcacgcctatgagtctggcggcagcggactcttcagtttgctgaatttgcttagcggggtgctctggctggcgatgatggtctacttcctgaaggacaaacgcgtaggcagctccctcgaaccgcagtaa

SEQ ID NO: 173833 - DNA, 816 bp, Klebsiella oxytoca
atgagcatcaaattgattgcggtagacatggatggcacctttctgagcgatgccaaaacctataaccgtcagcgcttcctcgcccagtatcagcggatgcgcgagcagggtatccgcttcgtcgtcgccagcggcaaccagtattaccagcttatctccttcttcccggaggtagcgcacgagatcgcctttgtcgccgaaaacggcggctgggtggtcagcgccggagaagatgtatttaactgccggataccgcaggaacatttcaataccgtcatcgatcatctccagacgctgaccaacattgaaatcatcgcctgcggtaagcgcagcgcttataccctcaaccagtataatgatgagctgaaagcggtcgcggcaaagtactatcatcgcctcgaactggtcgacgactttaatcatattgctgatgatgcgattctgaaatttggcctcaacgtcccggaccagctgatccctgagatacagcctaagctgcacgccgcgcttggcgatatggtaaccgcagtcgctaccggctacggcagcattgacctgattattcctggagtacacaaagctaacggcctgcgcatcctgcaggagcgctgggggatcgacaatcatgaagtggtcgcctttggcgatagcggcaacgatattgaaatgctgcagcatgccggattcggttacgcgatggccaacgccgccgcgccggtgaaggccgttgctggctatcgtgcgccgcacaataacgaagaaggcgtactccatatcattgataaagtgcttaatcgcgaagcgccgttcgtctga

SEQ ID NO: 173834 - DNA, 1122 bp, Klebsiella oxytoca
atggcctcatgggcgacccgcacgccggcgattcgcgatctgctcgcgctctcgacggcggaaatggggattgtattatttggactatcaataggttcgatgagcggcatcctctgctcagcgtggctggtcaatcgattcggcacccgaaaagtgattcgtaccaccatgtcctgcgcggtggtcggcatgctggtcctcagcgccgcgctatggtttacctcggcggtgctgtttgctgttggcttagccatcttcggcgccagctttggttcagcggaagtggcgattaacgttgaaggcgccgccgttgaacgcgaaatgaataaaaccgtgctgccgatgatgcatggtttctacagcttcggcacgctcgtcggcgccggaataggcatggcggtcaccggcttcggcctgcccgccgcgccgcacattctgctggcggcgctggtggctgtcgcccccatcgctatcgccattcgcgcaattccggaaggtaccggcaagaatgcagcggaagcggcgcgccatgaaggcaaaggcctgccgatatggcgagatgctcagttgctgctgattggcgtcatcgtcctggccatggcctttgccgagggttccgccaacgactggctgccgcttctgatggtggacggccacggcttcagtccgacttccgggtcgctgatttacgcgggcttcaccctcggtatgaccctcggccgttttaccggcggttggtttattgaccgctacagccgggtgacggtggttcgcgccagcgcggtcatgggcgcgctgggcattggcctgattatttttgtcgataacccgtgggtcgccggcctctccgtactattatggggcctcggcgcatcgctcggcttcccgctgaccatttccgccgccagcgacactggcccggatgcgccgaagcgcgtcagcgtggtggcgattaccggctacctcgccttcctcgtcgggccgccgctgctgggcttcctcggcgagcacttcggcctgcgtagcgccatgatggtagtgctggcattggtgctggtcgcggccatcgtcgcccgggcggttgcgaagccacactctgaacccgtgatggagaacagttaa

SEQ ID NO: 173835 - DNA, 543 bp, Klebsiella oxytoca
atggcccgtcgaccaaacgacccgcagcgtcgggagcggattttgcaggcgacgctggacacgatcgcgatacacggcatccacgcggtcacgcatcggaaaatcgccacctgtgcgggcgtacctttgggctcgctgacctactatttcagcggtatcgaggcgctggtcgaagaagcgttcagcctgtttaccggccagatgtcggcgcagtatcagctgttttttgccgatgtgcatagccgcgaagaggcctgtgacgcgattgccgagctgatattcagcgcccaggtgaccaccgcacgcaatatggagctgatgtatcagctgtatgctttttgcagcagccagccgaatttaaaagcagtcatgcaaaactggatgctgcgcagccagcagactctggaacagtggtttgaaccagcaacggcccgcgggcttgacgcctttatcgagggtatgacgctgcacttcgtgaccgacagagcgccgctatccagagaagcaattcgactgatggtgggaaggctggcgggagagtga

SEQ ID NO: 173836 - DNA, 1686 bp, Klebsiella oxytoca
gtgaatataaacgtcgcagatttgttaaacgggaattacatcctgttattgttcgttgtacttgcactgggactctgcctcgggaaactgcgtctcgggtcggtacaacttggtaattccattggcgttttagtggtttccctattattagggcagcagcatttcagtattaacactgacgccctcaatctcggctttatgctgtttattttttgcgtcggcgtagaagcgggccccaactttttttctattttttttcgcgatgggaaaaattacctgatgctcgcgctggtgatggtcggcagcgcaatgctgatcgccatggggctgggtaagctcttcggctgggatatcggcctgacggccgggatgctcgccggcgcgatgacgtccactcccgtgctggtcggcgccggggatacgcttcgccacttcggcatgcccagcgatcagctcgccctttcgctcgatcatctgagcctcggctatgcgctgacctatctgattggcctggtcagcctgatcgtcggcgcccgctatatgccgaagctgcagcatcaggatttgcagaccagcgcccagcaaatcgcccgcgagcgcggtctcgataccgactcccggcgtaaggtctatttgccggtgatccgcgcctaccgcgtcggtccggagctggtggcgtgggctgatggtaaaaatctgcgcgagctgggtatttaccgccagaccggctgctacattgagcgcatccgccgcaacggcattctcgcgaacccggacggcgatgcggtgctgcagatgggtgatgatatctccctggtgggttacccggatgcccatgcccgcctcgacccaagcttccgtaacggcaaagaggtcttcgaccgcgatctgctcgatatgcgcatcgtcaccgaagagatcgtggtcaaaaaccacaatgccgtcggccgtcgcctggcgcagctgaagctgaccgaccacggctgcttcttaaaccgcgtcattcgcagccagatcgaaatgcctatcgacgataacgtggtgctcaacaagggcgatgtgctgcaggtcagcggcgacgcgcgtcgcgttaaaaccgtcgccgatcgtatcggcttcatctccattcacagccaggtgaccgacctgctcgccttctgcgccttctttatcgttggcctgatgatcggcatgatcaccttccagttcagttcgttcagcttcggcatcggtaacgccgccggtctgctgtttgcgggcattatgctcggcttcctgcgcgccaaccatccgacgttcggctacatccctcagggcgcgctgaatatggtgaaagagttcggcctgatggtatttatggccggcgtggggctcagcgcgggcgccgggattaacaacggcctcggcgccgtcggcggtcagatgctggcggcgggcctgatcgtcagcctggtaccggtggttatctgcttcctgttcggcgcgtacatcctgcgcatgaaccgcgcgatgctcttcggcgccatgatgggcgcccgtacctgcgcgccggcgatggaaattatcagcgatactgcccgcagcaatatcccggcgctgggatacgcggggacctacgccatcgctaacgtattgttaaccctggcaggtacgctgattgtcatcatctggccgggactacagtga

SEQ ID NO: 173837 - DNA, 384 bp, Klebsiella oxytoca
gtgaaatctgagcgtgcttgggccggtattatctgtgggttctttctatttatcgtggtttgcttatcgctgctgttacatatgaaaggcgcctttcgggctaccggtaaccctgagctcgggctgctgttctttttgctacccggtgcggcggcaagctgcctctccccgggtcagcgggtgctgcgtccgcttatcggcgctatgctggctgcgcctatttgtctggtcgtcatgcggttattcttcgtcactcaacgatctttctggcaggaactggcgtggctatttagcgcggtgttctggtgcgcgctgggcgcgctgtgctttttatttatttgcgcctggcttgataccagacgcaagccctcgtcagaggagtga

SEQ ID NO: 173838 - DNA, 264 bp, Klebsiella oxytoca
atgtttacggtaatttttggtcgtccaggttgcccatattgcgttcgcgccaaagaactggcggaaaaactgagcaacgagcgcgatgattttaactatcgctacattgatatccacgctgaaggcatcagcaaagccgatctggagaaaaccgtgggtaaaccggttgaaaccgtaccgcagatttttgtcgatcagaagcacattggcggctgcaccgactttgaagcctgggcgaaagagaatctcggtctgtttgcctga

SEQ ID NO: 173839 - DNA, 291 bp, Klebsiella oxytoca
atgcgatcgcccgcagcattacccaaaagcgttctggtagttgagtttatcggcatggtgctgttgaccctggcctggctctcgcttaatcagtacgtcagcctgcctgcgccgttttccagcccgaccgcggcgctgctgatgatcttcgcggggatcctgctgatgcttccggccgccgtggcgttaatctggcgtgtggcgaaagttgttgccccgcagttgacgcaaacgaaaaattccccttcatcattgcctgacagagaaaaacgagatgacgccgaccattga

SEQ ID NO: 173840 - DNA, 723 bp, Klebsiella oxytoca
atgacgccgaccattgagctgctgcgtagccaccgttctattcgccattttaccgacgcgccgatcagcgaagaacagcgcgccgcaattatcgccagcgcgcagggagcctccagctccagttttttacaatgtacctcaattattcgcgttaccgacccggaaatacgtcaacagctggtgccgctgagcggcggacagcagcacgtggcgcaggctgcggaattctgggtattctgccctgattttaaccgcaatctgcaaatctgcccggacgctcagctgggtctcgccgaacagctcctgctgggctgcgttgacaccgcgattatggcgcagaatgcgctggtggcggcggaatctcttggcctgggaggcgtctatattggcgggctgcgtaacaatattgatgcggtgacccagctgctgaagctcccacagcacgtaatgccgctgtttggcctgtgccttggctggcctgacgataatccggaagtgaaaccgcgcatgccgtcggcgatgctggttcatgaaaatcactatcagccgctggatgagacggtccttgctgaatatgacgagctgttggcgcactattatctctctcgcggcagcaacacgcgtcgcgatacctggagcgaccatatccgccggactatcgtcaaagaaagccggccatttattctggaatatctgcataagcagggatgggctacgcgctga

SEQ ID NO: 173841 - DNA, 903 bp, Klebsiella oxytoca
gtgaaaattgccatattatcccgggatggaacgctttattcatgtcgacgcctgcgcgaagccgcgcaaaaacgcggtcatcaggtggaaatcctcgatccgctttcctgctatatgaacgtcagcccggtggcctcgtcaattcactataaaggccgccagctcccgcattttgacgccgtgatcccgcgtatcggcacggcgatcacctactacggcaccgcggcgctgcgtcagtttgagctgctcggcagctatccgctgaatgaatcggtagccatcacgcgcgcccgcgacaagctgcgttcgctccagctgctggcgcgccagggcatcgacctgccgctcaccggtattgcccactcgccggacgacaccagcgatctgatcgccatggttggcggcgcgccgctggtggtcaagctggtggaggggacgcaggggatcggcgttgtgctggccgaaacgcgccaggcggcagagagcgtcattgacgcttttcgcggcctgaatgcgcatattctggttcaggagtatatcgccgaggcgaaaggccgggacgtgcgctgcctcgtggtgggtaatgaagtggtcgcggcgattgagcggcgggccaaggagggcgattttcgctccaacctgcatcgcggcggcgtagcctcggtggcgcttatcagcgagcaggagcgtgaaatggccattaaggcggcgcaaacgctcgggctggacgtggcgggcgtggatatactgcgcgccacgcgcggaccgctggtgatggaagtgaacgcttctccggggctggagggggttgaaaccaccaccggcgtcgatattgccggcaagatgatcgcctggattgaacgacaagcgacgcccggattttgtctgaaaatggggggatag

SEQ ID NO: 173842 - DNA, 480 bp, Klebsiella oxytoca
atggattcactggtcgttccgggtcttgatacgttacgtcaatggctcgacgaattgggcatcagcttttttgagtgtgattcctgccaggcactgcacctgccgcatatgcaaaatttcgaaggcatttttgatgccaaacttgacctggttgataacgtggtgcttttctccgcgctggctgaggtgaaaccctccgcgctcctgccgctttccgccgatctttctgcgattaacgccagctcgttgacggtgaaagctttcctcgatattcaggatgataatctgccgaaactggtggtttgccaggcgttgaccgtcggcgtcggcgtgacgatcgatcagtttgcatggtttttccgccagagcgaagaacagatatcgatggtcatccttgaagccagtgctaaccaggtgctgtataagtctgaggaagaagagccgatagctgagaatattcagtaccattttcttcactga

SEQ ID NO: 173843 - DNA, 1113 bp, Klebsiella oxytoca
atgaccgcctttggtaaaaaatggttaacaggtctggttacgggtgcgctgatggccgtctctgccggttcgctcgcagccgaacaaaaaaccctgcatgtatataactggtctgattatattgctccggatacggtggcgaattttgaaaaagagaccggtattaaagtggtgtatgacgtttttgactccaatgaagtgctggagggtaagcttatggcgggcagcaccggatttgacctggtggtgccgtcggccagcttcctcgagcgccagctggcggcaggggtgttccagccgctggataagagcaagctccccaactggaaaaatctcgatccggaagtgctgaaactggtcgcgaagcacgacccggacaataaatacgcgattccctacctgtgggcgacaaccggcataggctataacatcgataaagtgaaagccgtgctgggcaaagatgcgccgctggacagctgggatctggtgatgaaaccggaaaatctggagaaactgaaaagctgcggcgtctccttccttgatgccccggaagagattttcgccaccgtgctgaactacctcggcaaagatcctaatagcaccaaagccgatgactacactggcccggcaaccgacctgctgctgaagctgcgtccgaatattcgctacttccactcttcgcagtacatcaacgacctggcgaacggcgatatctgcgtcgcgatcggctgggcgggcgacgtatggcaggcggctaaccgggcgaaagaagcgaagaacggggtcaacgtttcctactttatcccgaaagagggcgcgctggcgttctttgacgtcttcgctatgccggcagatgcgaaaaacaaagaagaggcttatcaattcctgaactatctgatgcgtccggacgttatcgcgcatattagcgatcatgtctattacgctaacggcaacaaagcatctacgccgctggtcagcgaagcgatccgcagcaatccggccatctacccgccggctgacgttttcgccaagctgttcaccctgaaagtccaggatccgaaaatcgatcgcgtgcgtactcgcgcatggacgaaggtgaaaagcggtaagtaa

SEQ ID NO: 173844 - DNA, 1179 bp, Klebsiella oxytoca
atggtgcgcctgcaccatgatttgatttctgccggagaacaccccgtgaatgatgtaattcctcgcccgcaggcgaaaacccccaaagcgctgaccccgctgctcgaaatccgtaatttaacgaagtccttcgatggccagcacgccgtcgatgatgtcaatctcaccatttataaaggcgaaatttttgccctgctgggcgcatccggctgcggcaagtcaaccctgctgcgcatgctggcgggattcgaacagcctaccgccgggcagattgtcctggatggcgtcgatctggcgcgggttccgccgtatcagcggccgattaacatgatgtttcagtcctatgcgctctttccccatatgacggtggagcagaacatcgcctttggcctcaagcaggacaaattgcctaaggctgaaatcaccagtcgggtgcaggagatgctggcgctggtgcatatgcaggagttcgcaaagcgtaaaccgcatcagctctccggcggtcagcgtcaacgcgtggcgctggcccgcagcctggcgaaaagaccgaaactgctgctgcttgacgagccgatgggcgcgctggataagaagctgcgcgacaggatgcagctggaagtggtcgatattcttgagcgcgtcggcgtcacctgcgtgatggtgacccacgatcaggaagaggcgatgaccatggcggggcgtatcgccattatgaaccgcggcaagttcgtacagatcggcgagccggaggaaatttacgagcacccaactacccgctacagcgcggagtttatcggttcggttaacgtctttgaagggctggtgaaagagcgccaggaagatggcctggtgctggcttccccgggcctgacgcatccgctgaaggtcgatcccgatgcctccgtcgtcgataacgtcccggtgtgggtggctctgcgcccggaaaaaattatgctctgcgaggacccaccggcggatggctataacttcgcggtaggtgaggttatctatattgcctatctcggtgacctgtctatctaccatgtgcgactgaaaagcgggcagatgctcagcgctcagctgcagaacgagcaccgttaccgcaaaggtgcgccaacctggggcgatgaagtccgtttatgctgggacgccgatagctgcgtcgtgctgacggtgtga

SEQ ID NO: 173845 - DNA, 954 bp, Klebsiella oxytoca
atgagtacattagaacccccgtcaggcgtaaacaaaccgggcggtttcgcgctgtggctggcgcggctgcagatggcccacgggcgcaagctggtgattgcgctgccttacatatggctgatcctgctgttcctgctgccatttctgatcgtctttaaaatcagcctggcggagatggcgcgggcgatcccgccctacaccgatctgctggagtgggccgacggccagctaacgttaacgctgaatctcggtaatttcctgcagcttaccgacgatcctctctattttgaggcgtatctgcagtcgctccaggtggcagggatctcgacgttctgctgtctgctgctgggttatccgctggcgtgggcggtggcgcacagtaatccatcgacccggaatatcctgctgctgctggtcattctgccgtcatggacgtcgtttctgatccgcgtctatgcctggatggggctgctgaaaagcaacggcgtgctgaacaacttcctgctgtggctgggggttatcgaccagcctctggagatcctgcacaccaacctggcggtctatatcggtattgtttatgcctatctgccgtttatggtgctaccgatttataccgccctcacgcgcatcgattactcgctggttgaggcgtcgctggatctgggcgcccggccgctgaagaccttcttccaggtgatcgtcccgctcaccaaaggcgggattattgccgggtcgatgctggtgtttattccggcggtaggggagttcgttatcccggaactgctgggcggcccggacagtattatgattggccgcgtgctgtggcaggagttctttaacaaccgcgactggccggtggcttcggcggtagcgatcgtgatgctgctgttgctgatcgtaccgatcatgtggttccacaagcatcagcaaaaacaggtgggggaacacggatga

SEQ ID NO: 173846 - DNA, 846 bp, Klebsiella oxytoca
atgaataatttaccggtagtccgttcgccgtggcgaatcgtcattttgctgcttggctttacctttctgtatgcgccgatgctgatgctggtgatttactcgttcaacagctcaaagctggtgacggtatgggccggatggtcgacgcgctggtatcgcgagctgtttcatgacgatgcgatgatgagcgcggtaggcttaagtctgaccattgccgcctgcgccgcgacggcggcggcgatcctcggtaccattgccgcagtggtgatggtgcgttttggccgcttccgcggttcaaacggctttgcttttatgatcaccgcgccgctggtgatgcccgatgtgattaccggcctgtcgctgctgctgctgtttgtcgcgctggggcattcgattggctggccgtcggatcgcggcatgctgaccatctggctggcgcacgtgaccttctgtaccgcgtacgtcgcggtggtcatttcatcgcgcctgcgtgagctggaccactctattgaagaggcggcgatggatctgggcgccgcgccgctgaaggtctttttcgtcattacgctgccgatgattatgccggcggtggtctccggttggctgctggcctttacgttgtcgctcgacgacctggttattgccagctttgtttccgggccgggggcgacgacgctgccgatgctggtcttctccagcgtgcgcatgggggttaacccggagattaatgccctggcaacgttaatcctcggcgtggtcggcattgttggttttatcgcctggtatttgatggcccgcgcggaaaagcagcgggtgcgcgatatccagcgtgcaagaagcggctga

SEQ ID NO: 173847 - DNA, 489 bp, Klebsiella oxytoca
atggaagactttacgttgggattgtttactaaaacgcgttcgtctcatgctcgtcttaacgttcctgcgctggtgcaggtggcggccttcgccattattttaatccgcggcctggatttgctgatgatcctcaaccagcttggcgttcagggaatcgcggattttgtccatcgcagcgtgcagacgtgggcgctcaccctggtgtttctctcaagtctggtgctggtatttattgaaatctggtgcgcgttttcgctggtaaaagggcgcaactgggcgcgttggctgttcctgttgacgcagattatcgtgattggctacctgtgggccgcttcattgggctacggttatcccgagctgtttagtattgccggggaatcgaagcgcgaaatctttcgctccctggtgctgcaaaaactaccggatctgctggtgctggcgatgctgtttgtgccggccccgtgccgacgctttttccgtttacagtaa

SEQ ID NO: 173848 - DNA, 1131 bp, Klebsiella oxytoca
atgcactgcgcactctatgacgcgggccgctgtcgctcctgccagtggctggaactgccggtatcgcaacagctcgccgataaaatggccgatttgcgcacgcttctcgccgatgcccccgtcgctgactggtgcgcgccggtttgcggcccggaaagcgggtttcgcaacaaagcgaaaatggtggtcagcggtagcgtagagcgcccgctgctcggaatgctgcaccgtgatggcgccccggaagacctcaccgattgcccgctctatccgccaggcttcgcccccgtcttcgctgcgctcaagccgtttatcgcccgcgccggactcacgccctataacgttgcccgcaggcgcggagagctgaagtacattctgctgaccgaaagccggctcgacggcgggatgatgctgcgctttgttctgcgttcggagaccaagctggcccagctgcgcgccgcgctgccggcgctccaggcgcagctgccgcagctgaaagtgattaccgccaatattcagccggtgcatatggccatcatggaaggagagcgggaaattttcctcaccgaccagcaggcgctggcggaaaactttaacggcgtgccgctatggatccgcccgcaaagcttctttcagaccaacccggcggtggccagccggctgtatgccaccgctcgcgactgggtgcgccagctaccggttaatcatatgtgggatctcttttgcggcgttggcggctttggtctgcactgcgccacgccggagatgcgcctgaccgggattgagattgccgctgaggccatcgcctgcgccagacaatcggcggcgcagctcggactgcagaatctgcatttccaggcgctcgattccacgcagtttgctaccggcgaaggcgaaattcccgatctggtactggtgaacccgccgcgtcggggtatcggcgacggactgtgcgactatttaaaccgtatggcgccggattttattatctactccagctgcaacgcccgcacgatggcgaaagatatcgcccggttgaatggctaccgcatcgcgcgcgtccagctattcgatatgttcccgcataccgcccactacgaggtgttgaccctgctggttcgcgaagtataa

SEQ ID NO: 173849 - DNA, 717 bp, Klebsiella oxytoca
gtggcaaaaaaaattctgttggttgaagatgatgaagatatcgctgcgctgctgcgcctgaatctgctcgatgagggatatcagattgttcacgtagcggacggggcgcaggccctgcggcagctggaaaaggatctctgggatgcggtgatcctcgacctgatgctgccgggcgttgacggtctggaaatttgtcggcgtattcgtcagcaaacccgctatttgccggtgattattatcagcgcccgcgccagcgaaacccagcgggtgcagggccttgaaatgggggcggatgattatctggccaaacccttttcgattctcgaactgaccgcccgggtcaaagcggtgtttcgtcgccaggaggcgatggggcaaaatttgttaatggatgccgggcgtatcaatagccacggcttgagcatcgatcctctatcccgcgacgttaagctgcgcggcgagatggtggatctcaccccgcgcgagttcgatcttttatactattttgctcgtcaccccggggaggtcttttcccgtcttgagctgctcgatcgggtgtggggctatcagcacgacggctatgagcatacggtcaatacccatatcaaccgtctgcgcaccaaaattgagcgtgacccggcggagccggacatcattttgaccgtctggggtaaaggctataaatttgccgtggagcgcaaagaggcgcagccatga

SEQ ID NO: 173850 - DNA, 1473 bp, Klebsiella oxytoca
atgatccgccgtctcagcctcagccagcgcctggcgctggtgtttacctcgttactgctgctttgtgcgttagccgtttgcctgatccagctctacagcagcgcgcagtacggcaacgtgatggtccagcgtctttccgccgggctggcgcagcaaatcgccgctcgcgagccgctgctggacgctcaggggcaggttgaccgccggatgctgaaaccgcttttcgaccggctgatgaccttcaaccccagcgtggaactgtatctgctttcgcccgacggcgagctgctggccgacgccgcgccgcccggtcatatcaaacgtcagcgcatcgatctggcgccggtgcaaacgttcctttccggcggcgcgtggccggtatacggcgacgatccgcgcagccttgataaacaaaaagtatttagcgtggcgccgctgcgccaggacggtcagctgcggggctatctgtatatcattctgcagggcgaaacctttaatgaactggcggcaagcgcctggcagaaaacactgtccagcctgctgctgtggactctgctgctggtggccgctctcggcctgctggcgggactgctcgcctggcggtgggtcacgcgcccggtgcgtcagctcaccgcgctggtggctacgaatgagcaggacagcatccatgcgattaaggcgctggcggcgcaaaccccggaggcgaatccgggaaacgaagtcgccgtactgcataaccgctttattgaactggcccgccagattgccgggcagtgggatcgtctggccgatagcgaccgtcagcggcgggagttcgttgccaatatctcccatgatttacgcacgccgctcacctccttgctgggatatctggaaacgttaagcctgaaggccgatcgcctgacgatggaagagaacaagcagtatttgaatatcgcgctgcgccagggcaataaagtgcgccatctttctcagcagctgtttgagctggcccgcctggagcacggtgggattaagccgcagccggaaacgttcgtgctggccgagctggtgcaggatgtggcgcaaaaattcgatctgcccgtcgcgacgcgcaatatcggtttgcagctggagctggctgccggattaccgccggtcaccgccgatctctcaatgattgaacgggtgttgaccaatttgctcgataacgccattcgtcatacgccggaggggggggttattcgcctggcggctcggcgggcagggccagagattatcgtcgaggtggccgatagcgggccgggcatcgccggcgagctgcgggcaaccttgtttgaacgaccttcggtgctggaacctggcgcgcaaagcgcatcgagaggagggttgggattaatgattgtccggcggatgctgcagctgcacggcggcgatattcgcctgcttgaagcgccggcaggagcctgtttccagtttaccctgccggtttaa

SEQ ID NO: 173851 - DNA, 732 bp, Klebsiella oxytoca
atgaaaaagttagttctggccgcactgcttagttctttcgcctttggcgccgctgccgcagaaaaaatcagctttggcgtttctgcaacttacccaccgtttgaatcgatggacgccaataaccaaatcgccggtttcgacatcgacctggccaacgcgctgtgcaaacagatgcaggccgagtgtacttttaccaaccatgccttcgacagcctgatcccggcgctcaaattcaagaaatatgatgcggtcatctccggcatggacattaccccggagcgcagcaagcaggtggcgtttaccgacccgtactacgctaactccgcgctggttatctcgaagaaagatgctttccactctttcgccgatctgaaaggcaagcgcatcgggatggaaaacggcaccacgcaccagaaatacctccaggataaacatccggaagtgaaaaccgtggcttacgatagctaccagaatgcgttcatcgacctgaaaaatggccgtattgatggggtgtttggcgataccgccgtggtcaacgagtggctgaaaaccaacccgcagctgggtgcggcaacgccgaaagtcaccgacgcgcagtacttcggtaccggcctcggcattgcggtacgcccggataacaaagcgctgctggaaaaactgaacgccgcgctgaaggcgattaaagctgacggtacctacgataaaatcagcaagcagtggttcccggagtaa

SEQ ID NO: 173852 - DNA, 669 bp, Klebsiella oxytoca
atgcttgattacttacccgaactgctaaaagggctgcataccagcctgacgctgaccgcggcctcgatcgtcgtggcgctgattttgtcgctaatcttcaccatcatcctgacgttaaaaaccccggggctggtgtgggtcgtgcgcggctatatcacgctgtttaccggcacgccgctgctggtgcagatcttcctgatttactacggcccgggccagtttccgtcgctgcaggagtatccgctgctctggcatctgatttccgagccctggctctgcgcgctgattgccctttctcttaacagcgccgcttataccacccagctgttctatggcgcaatccgcgccattccggacggccagtggcaatcctgcggcgcgctggggatgagtaagaaggatacgctggcgatcctgctgccgtacgcttttaaacgcgccctctcctcctactccaatgaagtggtgctggtgttcaagagcacgtccctggcctacaccattaccctgatggaagtgatgggccacagccagctgctctatggacgcacctatgatgtaatggtgttcggcgccgccggcatcgtttatctggtggtcaatggcctgctgacgctactgatgcgtctggtggaacataaagcgctggcctttgagcgacgcaattaa

SEQ ID NO: 173853 - DNA, 717 bp, Klebsiella oxytoca
atgaacgaattttttccattagcaagcgccgccgggatgaccgtcggccttgccgtttgcgccctgatcatcggtctggtgctggcgatgctgtttgccgtcctcgagtcggtgaagctgcgcccggtcgcctggctcgcaaccggcattgtcacccttttgcgcggactaccggaaatcctggtagttctgtttatctattttggttcctcgcagctgctgctgaccctttctgacggctttactattaatctcggcattgtgcagatcccggtacagatgcagattgaaaattttgacgtcagcccgttcctctgcggggctatcgcgctttctctgctgtatgccgcttacgcatcgcaaacgctgcgcggggcgcttaaagccgttccgcaggggcaatgggaatccggtcaggcgctgggattatcaaaagccgctattttcttccgcctggtgatgccgcagatgtggcgccacgcgctgccgggcctcggcaaccagtggctggtgctgctgaaggataccgcactggtgagcctcattagcgtcaacgatctgatgctgcaaaccaaaagtatcgctacccgaacccaggagccgtttaactggtatatcatcgcggcagcaatctatctggtcatcaccctgttgagtcagtacattctgaaacgtattgatcagcgagcgacgcgcttcgaacggagaccaggctga

SEQ ID NO: 173854 - DNA, 732 bp, Klebsiella oxytoca
atgaaaaaagtactgattgccgctcttcttgcgggcatgagcctctccgctaccgctgcccagaccattcgtttcgccaccgaggcctcttaccctccgtttgaatcgatcgacgctaataacaaaattgtcggctttgacgtcgatctggcgaacgcgctgtgtaaagagattgatgcgacctgcacctttaccaatcaggctttcgacagcctgatccccagcctgaagttccgccgtttcgacgcggtaatggccgggatggatatcacccctgagcgtgaaaagcaggtgctgttcacgaccccgtactatgaaaactctgcgctgttcgtcggccagcagggtaaattcaccagcatcgatcagctgaaaggcaaaaaagtcggcgtgcagaacggcaccactcaccagaaattcatcaccgacaaacatccggaaatcactaccgttccttacgacagctaccagaatgcgaagctggacctgcagaacggccgtattgacgccgtgtttggcgataccgcagtggtgacagaatggctgaagagcaatccgaagctgggagcagtcggcgacaaagttaccgataaagactacttcggcaccggtctcggcattgcgctgcgccagggcaataccgagctgcagcagaaatttaacgctgcgctggaaaaagtgaagagcgatgggacttaccagtctatctataacaaatggttccagaagtaa

SEQ ID NO: 173855 - DNA, 729 bp, Klebsiella oxytoca
atgagcattaaattaaacggcattaattgcttctacggcgcgcaccaggcgctgttcgacatcacgctggattgcccgcagggggaaacgctggtgctgctcggcccaagcggtgccggaaaaagctcgctgctgcgcgttcttaacctgctggagatgccgcgttccggcacgctgaacatcgccgggaaccatttcgactttaccaaagcgccttctgacaaagctatccgcgagctgcgccagaacgtcggtatggtgttccaacagtacaatctgtggccgcatctgaccgtgcagcaaaacctgattgaagcgccttgccgcgtgctcggtttaagcaaagatcaggctttagcgcgcgcagaaaagctgctcgaacgtctgcgcctgaaaccctatagcgatcgctacccgctgcatctttccggcggccagcagcagcgtgtcgccattgcccgcgccctgatgatggaaccgcaggttctgctgtttgatgaacctacggcggcgctcgatccagaaatcaccgcccagatcgtcagtattatccgcgaactggctgaaaccggcattacgcaggtcatcgtcacccacgaagtggaagtggcgcgtaaaacggcaagccgcgtggtgtatatggaaaacggccatatcgttgaacaaggtgatgccggctgcttcgcgcatccgcagaccgacgcgtttaaaaactatctttcacattga

SEQ ID NO: 173856 - DNA, 516 bp, Klebsiella oxytoca
atgcgctacaaagttcttgcactcgtcctcccctgcgcgctggcgctcagcgcctgtactaccgtcacgcctgcctacaaagataacggcacccgtagcggcccctgcatcgaaggcggcccggatgacgtggcgcagaagttttatgactaccagctgcagaatcgcaatagcgatttaaccgcgctgcgtccgtacctgagcgacggtctggcaaaactgctgaacgacgcgcgtcaggatccgtcgaacaacgccctgctgcagtctaatctgttctccagcagcagtaccccggccgacagcgccgaggtcgccagcgcctccacgatccccaaccgcgatgcgcgcaacattccgctgcgcgtggagctaaaacagggcacccaaagctggaaggatgaagtgctgatgattcaggaaggccagtgctgggcggtagatgacgtccgctacctcggcaataacggccatgcgccggcaggcaccctgcgtcaaagtctggaaaaacgctaa

SEQ ID NO: 173857 - DNA, 324 bp, Klebsiella oxytoca
atgcaattttccactactccgacccttgaaggtcagcccatcattgaatactgcggcgtcgtcaccggggaagcgattctcggcgccaacgtattccgcgattttttcgccagcattcgcgatatcgtcggcggtcgttccggcgcctatgaaaaagagctgcgcaaggcccgcgaaattgcgtttgaagagctgagcgagcaggcgaaggcgctgggcgccaatgcggtggtcgggattgatattgactacgaaaccgtgggaaaagacagcagtatgctgatggtcagcgtcagcggcaccgcggtgaagacccgccgatga

SEQ ID NO: 173858 - DNA, 831 bp, Klebsiella oxytoca
atgaaacgatgccgggcaggcgtactgctggcgctgctgctggcgggctgcgccagcgaaaaaggtattatcgatcgcgatggctatcagctggatacgcgccatccggcgcaggccgcttatccgcgcatcaaagtgctggtgatccactataccgccgatgatttcgacgtttccttagcgacgctgacggataatcaggtgagctctcactatctgatcccggggaaaccgccgctgcacggaggcaaaccgcggatctggcagctggtgccggaagaggatctggcctggcatgcgggggtcagcttctggcgcggcagcacgcgcattaacgatacctcgattggcattgagctggagaatcgcggctggcaaaaaacggcgggggtgaaaagctttacgccgtttaatccggcgcagattgacgccctgatcccgttggcgaaggacatcatcgctcgctatcagatcctgccgcagaacgtagtcgcgcatgccgacattgccccgcagcgcaaagacgatccggggccgctgttcccgtggcgcaggctggcggagcaggggattggcgcatggccggatgcccggcgcgtggcgttttatctgcaggggcgtccgtcatacgagccggtagacactgccgagctgctggacgtcctggcgcgctacggctatcaggtgacgccggaaatgaccccagcgcagcaaaagcgggtgattatggctttccagatgcacttccgccccgcgcgctgggacggcgttgccgatgcgcaaacgctggcgattgctgaagcgctgctggaaaagtacgggcgcggttaa

SEQ ID NO: 173859 - DNA, 1014 bp, Klebsiella oxytoca
atgaaggtactggttaccggtgcgaccagcggattaggccgcaacgcggtggaatatctgcgtaacaggggcattagcgtcagagcgaccgggcgcaacgaagcgatgggcaagcttctgagcaaaatgggcgcagagttcgtccctgcggacttaaccgagctggtctcttcgcaggccaaagtgatgctcgccggtatcgataccctgtggcactgttccagctttacttcaccctggggcactcagcaggctttcgatttagccaacgtccgcgcaacccgtcgcctcggcgaatgggcggttgcctggggcgtacgcaacttcgtacatatctcctcgccgtcgctctattttgattaccaccatcatcgcgatgttcaggaagattttcgtccgcagcgtttcgccaacgaattcgcccgcagcaaggcggcaagcgaagacgtgatccatcttctggcgcaggccaacccgaatacccgcttcacgatcctgcgtccgcaaagcctgtttggcccgcatgataaagtgtttattccgcgtctggcgcagatgatgcagcactatggcagcgttctgttaccgcgcggcggcagcgcgctggtggacatgacctattatgaaaacgcggtgcacgcgatgtggctcgccagccagccacagtgcgaccttctgccctcggcccgggcgtacaacatcactaacggcgaaccgcaaaccttgcacagcatcgtgttgaaactcatcgatgagctggggattaagtgccgcatccgatcggttccctatcctatgctggatattatcgcccgcagcatggagcgctttggcaataagtcagctaaagagcccgcctttacccactacggtgtctccaagctgaacttcgattttacccttgatatctctcgcgctcagcaggagctgggctatcagccggtggtgaacatggatgaagggattatccgcaccgccgcgtggttgaaggaccacggcaagctgcactattaa

SEQ ID NO: 173860 - DNA, 1434 bp, Klebsiella oxytoca
gtgtcgcagcgaattctggtgcttggcgccagcggttatatcggccagcatctggtgacaaggctcagcgagcagggcttcaccgtgctggcggcggcacgccagatcgacagactcaagaagcagcatctccccggcgtcgagtgctattcgctcgatttaaaccagcctgacgcgctacccgccctgctggcgcaggttgacaccgtttattatctggtacacgggatgggcgaaggcggcgactttatccgccacgagcggcaggtcgcccttaacgtccgcgacgcgctgcgcaagacgccggtgaacgaagtcatttttctcagttcgttacaggttgcagaagaggagcaatccgatcatctgcgcgcccgccagatcaccggcgatctgctgcgcgaatcgggcgtaccggtagcggaagttcgcgccggcattatcgtcggcgccggttccgccgcattcgaagtgatgcgtgatatggtttacaacctgccagtactgacgccgccgcgctgggtgcgctcgcgcaccacgccgattgcgctggaaaacttactctattatctgctgcagctgctgaaccatcctgcggcagagcatcgcatttttgaagccgccgggccggaaattttgagctatcagcagcagtttatccgctttatggcagtcagcggcaaacgtcggccgttgatccccattccttttccgacccgttggatttcggtgtggtttctcaacatcattacttcagtgccgtcaaccacggccagggcgctaattcaggggctaaagcacgatctgatcgccgacgaccgcgccctgcgggcgctcatcccgcaacctctcatcgcttttgatgaagcggtgcgccgcacgctaaaggaagaggagcaactggtgaactccagcgactggggctacgatgcgcaggcctttgcccgctggcgcccagagtacggttactacccgaaacaggcgggctgcaccgttaacacttccgccagccttgctgcgctgtggaaggtggtcaaccaaattggcggcaaagagggctatttcttcggcaacgctctgtggaaaactcgcggcgcgatggatctgctggtcggtcaccggctggcaaaaggtcgcccggaaaatgaatatctgcagaccggcgatgcggtggacagctggaaggtgattatcgtcgagccggaaaagcagttgacgctgttattcggcatgaaagcgcccggcctgggccgcctgagctttaccctgtgcgataaaggcgaccatcgcgaactggacgtccgcgcctggtggcacccgcacggtatgccggggctctgctactggttgctgatgatcccggcgcatctctttatttttcgcggtatggcccgacgcatcgcgcacctggcggagcaaatcaccatcaaatag

SEQ ID NO: 173861 - DNA, 1002 bp, Klebsiella oxytoca
atgatagatttacgcagtgataccgtcacccgcccgggccgcgccatgcgggaagcgatgatggccgccccggtcggggatgacgtgtatggcgatgacccgaccgttaacgaactccagcgctttgccgccgacctggcgggcaaagaggccgctatcttcttgccgaccggcactcaggccaacctggtcgcgctgctcagccactgccagcgcggcgaagagtatattgtcggccagggcgcgcataattatctctacgaagccggcggcgcggcggtgctcggcagtatccagccgcagcctatcgacgccgcagctgacggttccctgccgctcgataaagtcgcagccaaaatcaaaccggacgatatccatttcgcccctacccggctactgtcgctggaaaacacccacaacggcaaagtgctgccgcgtgaatatcttaaagatgcctgggagtttacgcgtcagcgcggcctggggctgcacgtggacggggcgcgtatctttaacgccgtcgtggaatacggctgcgcgctgcgtgagatcacccgctactgcgactctttcaccatctgcctgtctaaaggtctcggcgcgccggtaggctcgctgctggtggggagcgaagcgtatattcgccgcgccatccgctggcggaaaatggtcggcggcgggatgcgtcaggccgggattctggcggctgctggcctgtatgccttgcagaacaacgtcgagcgtttaaaagaggatcatgataacgccgcatggatggcagaacagctgcgcgccgccggcgcggaagtgatgcgtcatgacaccaatatgctgtttgttcgcgtcggtgaagcgcgcgccgccgccctgggcgagtatctgcgcgaacgcggagtgctgatcaacgcctcgcccatcgtgcgcctggtgacgcatattgacgtaaaccgtcagcagcttgccgaggtggttagccactggcagacatttttaaatcgctaa

SEQ ID NO: 173862 - DNA, 1719 bp, Klebsiella oxytoca
atgaaacagaccgtggcggcatacattgccaaaactctagaacaggctggcgttaaacgtatttggggcgtgaccggggattctcttaatggcttaagcgacagcctgaaccgcatggggaccatcgactggatgcccacgcgccatgaagaagttgccgccttcgccgccggagcggaagcgcagcttaccggcgaactggcggtgtgcgccggttcctgcgggccgggcaacctgcatctgattaacggtcttttcgactgccaccgcaaccatgttccggtgctggccatcgccgcccatattccttccagcgaaatcggcagcggttactttcaggaaacgcatccgcaggagctgtttcgcgaatgcagccactactgcgaactggtctcctcgccggagcagatcccgcaggtgctggccatcgctatgcgcaaagcggtgattaaccgcggcgtctcggtagtggtgctccccggcgacgttgcgctaaaacccgcgccggaaagcgccagcagccactggtaccacgccccgctgccgcaggtgacgccggcagaagaagaactgaaaaaactggcccagctgctgcgctattcgagcaatatcgcgctgatgtgcggcagcggctgcgccggagcgcataaagagctggttgagttcgccgcgaagctgaaaacgcctatcgttcacgcgctgcgcggcaaagagcacgttgaatacgataacccttatgatgttgggatgaccgggctgataggcttctcctccggtttccataccatgatgaacgctgacaccctggtgctgctcggcacccagttcccctatcgcgccttctacccgacggacgcaaaaattattcagatcgatatcaaccccggcagtatcggcgcgcacagtaaagtggacatggcgctgatcggcgatatcaaatccaccctcagcgcgctgctgccgcatctggaagagaaaaccgaccgcaagttcctcgacaaagccctggaacactatcgcgacgcgcgcaaggggctcgatgacctggcgaagccaagcgataaaacccttcatccgcagtatctggcgcagcggatcagccactttgccgacgacgacgccatttttacctgtgacgtcggaacgccaaccgtgtgggctgcgcgctatttacagatgaacggcaagcgccgcctgatcggatcgttcaaccacggttcgatggctaacgccatgccgcaggccatcggcgcgaaggccaccgcccccgaccggcaggtcgtggcaatgtgcggcgacggcggctttagcatgctgatgggggattttctctcgctggcgcaaatgaagctgccggtgaagatcgttatcttcaataacagcgtcctgggctttgtcgcgatggagatgaaggccggcggctatctgacagacggcaccgagctgcatgcgaccaactttgcccgcatcgccgaggcctgcggcattaagggcatccgtgtcgaaaaagcggctgacgtagaccaggcgttgcaaaccgccttcagtaccgacggcccggtcctggtggatgtggtggtcgccagtgaagaactggcgatgccgccgcagatcaaactggagcaggccaaaggtttcagcctttacatgctgcgcgcgattattagcggccgcggcgatgaggttatcgaactggcgaaaactaactggctaaggtaa

SEQ ID NO: 173863 - DNA, 435 bp, Klebsiella oxytoca
atggttaagcctctgttaaatggtgttaataaactgctgtcgcatgatgattttggcaaacttttgttacgacttgccgttggcggcctgatgctgtttcacggattacacaagctattcgatggcgtggggggcatcagcagcatgctggtggcgaaaggtctgccgggctttatcgcttatggggttttagctggagaagtggttgcgccatgtctgctgattgtggggatcctgacgcgccctgcggcgctggtgctggcattcacgatggttgtggcctggctgatggtcgggacgggtaaaaccttcgcgctggatgcggtaggcgcgtgggcgattgagagtctggtctacttctttgttggcgcgctggcgattgccttcctcggggcaggccgatattccattggcggaaactcggcctggcggtaa

SEQ ID NO: 173864 - DNA, 969 bp, Klebsiella oxytoca
atgaccatgccaacctcacaatgcccgtggcgaatgcaggtgcatcacatccatcaggaaacgccggatgtgtggaccatttcattgctctgccatgactattatccgtaccgtgccgggcagtacgcgctggtgagcgtgcgtaattcggcagagaccctgcgcgcttacactatttcgtccacgccgggcgtcagcgaatatattacgttgaccgttcgccgtattgacgatggcgcgggctcacagtggctcacccgcgacgtaaagcgcggcgactatatctggctgtccgacgcgatgggggatttcacctgcgatgataaagcggacgataagttcctgatgctggccgcaggctgcggcgtcacgccgatcatgtcgatgcgccgctggctggcaaaatatcgcccgcaggctgatgtgcaagtgatttttaacgttcgttcgccgcaggatgtgattttcgctgaggagtggcgtcagtatccggtgacgctggtggcggaaaataacgctacccacggtttcgtggcaggacgtttaacgactgaactactgcaaagcgtgccggatctggcatcgcgcaccgtgatgacctgcggtccggcgccgtatatggatctcgtcgagcaggaagtgaaagcgctgggcgcgacgcgcttctttaaagagcagttctttacgccagtcgccgtcgcggccaccagcggtctgaagttcaccaaactgcagccggcgaaaacgttttatgccccggtcggcaccacgctgctcgaagcgctggaaagcaataaggtgccggttaccgtcgcctgccgcgcgggcgtttgcggctgctgcaaaacgaaagtggtttccggtgaatataccgtcagcagcaccatgacgttaaccgatgcggaaatcgctgaaggctacgtgctggcctgctcctgccagccgcagggagatttggtactggcttaa

SEQ ID NO: 173865 - DNA, 1653 bp, Klebsiella oxytoca
atgttttgtgtgcaatgtgaacaaaccatccgtactccggcaggaaacggctgctcttacgcgcagggtatgtgcgggaaaacggccgaaacgtccgatctgcaggatctgctgattgcctctctgcagggcctctccgcctgggcgcttaaagctcgtgaatatggcatcatcgaccacgacgtcgatagctttgcgccgcgcgcttttttctctacgctgactaacgttaacttcgactccccgcgtatcgttggctatgcgcgtcaggctatcgccatgcgtgaagcgcttaaagcccagtgcctgagcattgatgcccacgcgacggttaacaatccgatggccgctgtgcaactggctagcgacgatctgggcgacctgcagcgtcaggcggcggaatttactccgaacaaagacaaagcggccatcggcgagaacattctcggcctgcgcctgctgtgcctgtacggcctgaaaggcgctgcggcctatatggagcacgcgcacgttttgggccagtacgataacgacatctacgcccagtaccataaaatcatggcatggctgggtacctggcctgccgatatgaacgctctgcttgagtgctcaatggaaatcggccagatgaacttcaaagtcatgagcattctggacgccggtgagaccaccaaatacggtcatccgaccccaacccaggtcaacgttaaagcgaccgagggcaagtgcatcctgatctccggccatgacctgaaagatctctataacctgctggagcagaccgaaggcaccggcgttaacgtctacacccacggggaaatgctgccggcgcacggctatccggagctgcgtaaattcaaacacctgattgggaactacggcagcggctggcagaaccagcaggtggagttcgcccgtttcccggggccgatcgtcatgacctctaactgcatcatcgacccaaccgtcggcgcctatgacgatcgtatctggacccgtagcatcgttggctggccgggcgtgaaccatctggaaggcgaagatttcgccccggttatcgcccaggcgcagcagatggcaggcttcccgtacagcgagatcccgcatctcatcaccgtaggtttcggccgtcagacccttctgggcgctgctgatacccttatcgatctggtgagccgggaaaaactgcgccacatcttcctggttggcggctgcgacggcgcgcggggcgagcgtaattacttcaccgattttgccaccagcgtaccggacgactgcctgatcctgaccctggcctgcggtaaataccgcttcaataaactcgatttcggcgatattgaaggcctgccgcgtctggtcgatgccggtcagtgcaacgacgcttactcggcgattatcctggcggtgaccctggcggaaaaactgggctgcggcgtcaatgatctgccgctatcgctggtgctttcctggttcgagcagaaagcgattgtcattctgctgaccctgctctcactgggcgtgaaaaacatcgtaaccggcccgaccgcgccaggcttcttcaccccggatctgctggccgtgctcaatgagaaattcggtctgcgctctgtgaccaccgtagaagaagacatgaagcaactgctgagcgcgtaa

SEQ ID NO: 173866 - DNA, 900 bp, Klebsiella oxytoca
atgttttcgggactattaatcattctgctgccgttaatcgcaggctaccttattcctctccatcggccgtcagcccttaaacttatcgcacgacttctgagctggatcgtttacgttattctcttttttatgggaattagcctggcgttcctcgataatctggccagcaacctgttgtcgatacttcattacgcagcggtcagcgtcgtcattatcctgctgtgtaatattgcggctctgatgtggcttgagcagaaaatgccctggcaaaatcatcatcgccaggaaaaattaccctcgcgtctggcaatggcgctggaatcccttcagctatgcggcgtagtccttattggttttcttattggcctgagcggcctgccttttttacaacacgccaccgaggccagtgaatatacgctgattttcctgctgttcctgatcggtattcagctgcgtaataatggcatgaccctgcggcaaatcgttctgaatcgccgcggaatgatggttgcggtggtggtgatggtgagctcactgctgggcggaatcattaatgcctttattctcgacctgccgctaaaaaccggcctggccatggcctccggctttggctggtattcgctttccggcatcctgttaacagaatcctatggcccggtgattggtagcgccgccttctttaacgatctggcacgagagctgctggcgattatgctgatcccggggctggtacgccgcagccgttcaacggcgctaggcctgtgcggcgcaacatcgatggattttacgctgccggtgctgcagcgctcaggcggcgtggagatcgtgccggcagctattgttcatggcttcattctcagcctgctggtgcccatcctgatggcctttttctccgcttaa

SEQ ID NO: 173867 - DNA, 696 bp, Klebsiella oxytoca
atgtttagaaaattagcagcagaatgctttggtacattctggctggtgtttggtggttgcggcagcgccgttctggcggcggccttcccggaattaggtattggttttgccggcgtcgcgttagccttcggcttaacggtattaaccatggcgtttgccgtcggtcatatttccggcggccactttaacccggcagtcactttaggcctgtgggccggcggtcgtttcccggctaaagaggtgattggctatattatcgcccaggttgtcggcggtattattgccgccgctattctgtatatcgtcgccagcggtaaagcgggctttgacgccgccgccagcgggttcgcgtcgaacggttacggcgaacactcaccgggcggtttctccatgctctccgcaattgtgattgagattgtcctgacctgcggcttcctgttggtcatccacggcgccaccgataaaaacgctccggcgggcttcgcccctatcgccattggcctggcgctgacccttattcacctgatcagcattccggtcaccaacacttctgtcaacccggctcgtagcaccgcggtagcgattttccagggcggctgggcgctgcagcagctgtggctattctgggtgatgccgattatcggcggtattctcggcggcgtgctctaccgtactctgctggaaaaacgcagttaa

SEQ ID NO: 173868 - DNA, 1659 bp, Klebsiella oxytoca
atgcatcttgagcgcgtcgaaatagtaggctttcgcggcatcaaccggttatcgttgatgctggagcaaaataacgtgctgattggcgaaaatgcatggggtaaatccagcctgctggatgccctgacgctgctcctgtcgcctgagttcgatctctatcattttgttcgggaagatttttggtttccgcccggggatgttcaggggcgcgagcgtcatctgcatattattctgaccttccgtgaaaatgaaccgggccgccatcgggtccgccgctatcggccgctcagcaaatgctgggtaccctgcgacgatggctatcagcgagtgttctaccgcctggagggggagcttgccgatgatgatagcgtgatgactctgcgcagctttattaacggcgaaggggaagcgctggagcttgaagatattgatgagctcgcccgtcacctggtacggctgatgccggtgctgcgcctgcgcgatgcccgttttatgcggcggatccacaacggtaccgtgccgcattcgccgcagatcgaaattaccgcccgccagctcgattttctctcccgcgagctggtgcaccatccgcaaaatttaaccgacgggcaaatcaggcaggggctgtcggccatggtgcagctgttggagcactattttgccgagcagagcagcgcgcaatctcgtcaccgcctgatgcgccgccattcacatgatgaacagcgcagctggcgctatctggacatcatcaaccgtatgatcgacaaacccggcggccgtagccatcgggtgattttattggggctcttttccacgttgttgcaggcgaaagggaccgtcagactcgatcgcgatgcgcggccgctgctgttaattgaggatccggaaacccgactgcaccccattatgctatccgtggcctggcatttgctcaatttgctgccgctgcagcgggtgacgacgacgaactccggcgagctgctgtcgctaacgcccgtcgagcatgtgtgccggctggtgcgtgaatcgtcacgggtgtcggcctggcggctggggcctggtggaatgaatgcagaagacagtcgacgcatcgcatttcatattcgttttaaccgcgcttcatcgctgtttgcccgctgctggctgctggtggaaggcgagacggaaacctgggttatcaacgaactggcccgccagtgcggccatcactttgatgcggaaggggtgaaggtgatcgagtttgcccagtcgggtttaaaaccgctgattaagttcgcccggcgaatgggcattgagtggcacgtgctggtggatggcgatgaagccgggaagaaatacgccgccaccgttcgcagtttgttgaatgacgataaaatgctggagcgagaccatctcaccgcgctaccggcgatggatatggaacattttatgtatcgtcagggattcgatgatgtttatcatcgggtcgcgcagctgccgatgaatattcctatgaatatgcggcgggtgatcaccaaagcgattcatcgctcgtctaagccagacctggcgattgaagtggcgatggaggccggacgtcgcggcgttgacgccattccgacgctgttgaaaaaaatgttttctcgcgtgctatggctggcgcgcgggcgggcggattag

SEQ ID NO: 173869 - DNA, 1116 bp, Klebsiella oxytoca
atgaaattaaatggaaagcgcaggaaaatttggtggctgctggcgattgtcgtgctggccctcgccgtctggggatggcgaatactgaatgcgccgctgccgcaatatcagacgctggtggtgcgtaaaggggacctgcagcagagcgtgctggcgaccggtaagctggatgcgttaaaaaaagtggatgtcggggcgcaggtgagcggacagctcaaaacgctgcgcgtcgagattggcgacaaagtgaaaaaagaccagctgctgggggttattgacccggagcaggcggaaaaccagattaaggaagttgaagcgacgctgatggagctgcgggcgcagctcaaccaggcgcgcgcggagcgtaaactctctgcggcgactttagctcgccagcagcagctggcgcagcgtcagctggtctcccggcaggacctggacaccgccgcgaccgacctggcggtgaaagaggcgcaaatcggcacgattgaagcgcaggtcaaacgcaatcaggccaccctggatacggctaaaaccaacctcgactacaccaaaattctggctccgatgtccggggaagtgacgcaaatcaccaccctgcaggggcagacggtgattgccgcccagcaggcgccgaatattttgaccctggccgatctcagcaccatgctggtgaaggcgcaggtttcggaagcggacgtcatccatctcaagccggggcaaaaggcctggtttacggtgttgggcgatcccctgacgcgctatgaagggacgctgaaggatattctaccgacgcctgaaaaggttaacgacgccatcttctactacgcccgctttgaggtaccgaacccgcagggcatcctgcgcctggagatgaccgcccaggtgcatattcagctttcggaagtcaaaaacgtcatcaccatcccgctgagcgcgctgggagaggccatcggcgataaccgctatcacgtgcgtctgctacgtaccggtgaagttaaagagcgtgaaatcgttatcggtgcgcggaatgacaccgatgtggcggtggtgaaagggctggaagagggggatgaagtcattatcggcgaaggtgcggccggagcagcgaaatga

SEQ ID NO: 173870 - DNA, 1947 bp, Klebsiella oxytoca
atgacggcgttacttgaactgcgtgatattcgccgcagctacccctccggcgatggcaacgttgaggtgctgaaaggtattacgttgagcattgccgccggcgagatggtggctattgtcggggcctccggctcagggaaatccacgctgatgaatattctcggctgtctggataaacccaccagcggcacctatcgggttgccggaaccgacgtggcacgtctcaacggcgatgagctggcgcgcctgcggcgggaacatttcggttttatttttcagcgctatcatctgctatcgcatctcaccgcggcgcagaacgtggaagtgccggcggtctatgccggagcggagcgcaaagcgcggctggcccgcgcccatgagctgctggtacgactggggcttggcgaccgggcagaatatcaaccttcacagctctccggcggccaacagcagcgggtgagtatcgcccgcgccctgatgaacggcggggaagtgattctggcggatgagcctaccggtgcgctggacagccgctccggcgaagaggtcatggggatccttcaccagctgaaagcgcagggacatacggtcattatcgtcacccatgacccgcaggtggcggctcaggctgagcgggtcattgagatacacgacggtgagatcgtgcgtaacccgcccgcgttgagctccgcgcaaggcggcgcgctgcgccagcgcacggcggccgaaccgtcggcatggcgtcagttcagtagcggttttcgcgaggcgctggtcatggcctggcgcgccatggcggcgaataaaatgcgcacgctgctgacgatgctcgggatcattatcggcattgcatcggtggtgtcgattgtggtggtgggcgatgccgcgaagcaaatggtgctggccgatatccgcgccatcggcaccaataccattgatgtttatcccggtaaggatttcggcgatgacgatccccgctatcagcagtcgctgaagtacgacgatctgcttgctattcagaaacagccctgggtcagctcggcgacccctgcggtctccaaaagcctgcgtctgcgggcggataatatcgacgttgccgctagcgctgagggcgtgggggcgcagtactttaacgtttacggtatgacttttagcgaaggcaacaccttcaacgaactccagctaaatagccgcgcgcaggtggtggtgctcgatagcaacgcgcgccgacagctgtttccgcacaaagcgcgggtcgttggcgaagtgattcttgtcggcaacatgcccgcgacggtcatcggcgtcgccgatgaaaaacagtcgatgtttggcagcagcaaaattctgcgcgtctggttaccctataccacgatggccggccgggttatggggcagtcgtggctgaactccatcaccgtccgggtcaatgaaggttacgacagcgcgcttgccgagcagcagctgttacgtctcctggaactgcgccacggtaagaaagatgttttcacctggaatatggacagcatcttgaaaacggcggaacggaccacacatacactacagctgtttctgaccctggtggcggtgattgcgctggtggtcggcgggattggcgtgatgaatattatgctggtctccgttaccgaacgcacgcgagagatcggtatccgtatggctgtcggggcgcgggccagcgacgtactgcagcagtttttgattgaggcggtgctggtttgcctggtcggcggggcgctgggcgtgacgctttcgttgctgattgccttcgtgctgcagctgtttttgcccggctgggaaatcggcttttcgccgctggcgctgctgaccgcatttttatgctcgacgctgaccggagtgttgtttggctggctcccggcgcgcaatgcggctcgtctggacccggtcgacgccctggcacgggagtag

SEQ ID NO: 173871 - DNA, 231 bp, Klebsiella oxytoca
atggaaatgggtactgttaagtggttcaacaatgccaaagggttcggttttatctgccctgagggcggcggcgaagacattttcgcccattactcgaccatccagatggatggttacagaacgctaaaagccggacaagcggttcggtttgatgttcaccaggggccaaaaggtaatcacgccagcgtgatcgtccctgttgaagcggaagaaacagaaacagccgcataa

SEQ ID NO: 173872 - DNA, 318 bp, Klebsiella oxytoca
atgagtaagagagactggttggacttcgatcagctaatcgaggacgaagttaaagatgcgctaaaaccgccatctatgtataaagtgatattagtcaatgatgactacactccaatggagtttgttattgacgtgttacaaaaattcttttcttatgatgttgaacgtgcaacgcaactgatgctgacggttcactatcaaggtaaagcgatttgcggggtgtttaccgctgaagtcgcggaaaccaaagtatcgatggtgaaccaatacgcgagggagaacgaacatccgttgttgtgtacgctagaaaaagcctga

SEQ ID NO: 173873 - DNA, 2283 bp, Klebsiella oxytoca
atgctcaatcaagaactggaactcagtttaaacatggctttcgccagagcgcgcgagcaccgtcatgagttcatgaccgtcgagcacttgttgctggcgctgcttagcaacccttcggcccgcgaagcgcttgaagcgtgttcagtggacctggtcgcgctgcgtcaggaacttgaagccttcatcgaacagaccacacccgtactgcctgcaacggaagaagagcgcgacactcagccgacgctgagcttccagcgcgtgctgcaacgtgctgttttccacgtccagtcatccggtcgcagcgaagtgaccggcgccaacgttctggtcgcgattttcagcgaacaggagtctcaggcggcatacctgctgcgtaaacatgaagtcagccgacttgatgtggtgaacttcatctctcacggtacgcgcaaagacgagccgagccagtcttccgataacagcggaagccagcctggcagcagtgaagagcaagcaggcggggaggatcgtatggaaaacttcaccaccaacctcaaccagcttgcccgcgtaggcggtatcgatccgctgatcggccgcgagaaagagctggaacgtgctattcaggttctgtgccgccgtcgcaagaacaacccgcttctggtgggggaatccggcgtcggtaagaccgcaattgccgaaggtctcgcctggcgtatcgtgcagggcgacgtaccggaagtgatggccgactgcactatctattcactggatattggctcgctgctggcaggcactaaataccgcggcgattttgaaaaacgctttaaagcgctgcttaagcagctggagcaggataccaacagtattctgttcattgatgaaatccacaccatcattggtgcgggcgcggcttccggcgggcaggtcgatgccgctaacctgattaagccgctgctttccagcggtaaaatccgggttatcggttcgacgacctaccaggagttcagcaacatctttgagaaagatcgtgcgctggcgcgtcgtttccagaaaattgatatcaccgaaccttccgtggaagagacagtgcagattattaacggtctgaagccgaagtatgaagcgcaccacgacgtgcgttacaccgcgaaagcggtacgtgcggcggtggaactggcggtgaaatacattaacgatcgtcatctgccggataaggcgattgacgtgattgacgaagccggcgcgcgcgcgcgcttgatgccggtgagcaaacgtaagaaaacggtcaacgtggcggatatcgagtccgtggtggcgcgaattgcgcgtattcctgagaagagcgtttcccgcagcgaccgcgatacgctgaagaaccttggcgatcgcctgaaaatgctggtctttggccaggataaagcgattgaggccttaaccgaagcgatcaagatggcgcgcgccgggcttggccatgagcacaaacctgtcggctctttcctgtttgccgggcctaccggggtgggtaaaaccgaggttactgtacagctggcgaagtcgctgggtattgagctgctgcgttttgatatgtccgaatatatggaacgtcataccgtcagccgcttaattggtgcgcctccgggatacgtcggtttcgatcagggcgggctgctgaccgatgcggttattaagcatccgcacgcggtactgctgctcgatgaaattgaaaaagcgcatccggacgtctttaacctgctgttgcaggtaatggataacggtacgctgaccgataacaacggccgcaaagcggatttccgcaacgtggtgctggtgatgaccaccaacgcaggcgtgcgtgaaaccgagcgtaaatcgattggccttatccatcaggacaacagtccggatgcgatggatgagatcaaaaagatctttacgccggagttccgtaaccgcctcgacaacattatctggttcgatcacctgtccacgacggttatccaccaggtggtggataagtttatcgttgagctgcaggtccagctggatcagaaaggcgtctctttggaagtaagccaggaagcccgcgattggctggccgagaaaggctacgaccgggccatgggcgcgcgtccgatggcgagggtgattcaggacaacctgaaaaaaccgctggctaacgagctgctgtttggctcactggttgacggcggtcaggtgatcgttgagctggacaaagagaaaaacgcgctgacctatgccttccagagtgcgcaaaagcacaaaccggaagcggcacattaa

SEQ ID NO: 173874 - DNA, 984 bp, Klebsiella oxytoca
atgcccgcgaactatattgccccgtcggatttaaaaacgattctccattcgaagcgcgccaatatttattatctggaaaagtgtcgggttcaggtcaacggcggccgcgtggaatatgttacgagcgagggaaaagagtcattttactggaatatcccaatagcaaatacaacggctattatgttgggaatgggaacctccgttagccaggctgcaatgcgtgagtttgcccgagcgggcgtaatggtcggtttttgcggtacggatggcacgcctctttatgccgctaatgaagtcgatattgacgtttcctggctgtccccgcaaagcgaatatcgaccaactgagtacttacagcggtgggtttcattctggtttacggagattaagcggttggaagcggcgaaatgtttccagaatattcgcctcgcgcaactggaaaaacactggctcggcagccgaatgcagcgcgagtcgctatttccagtcaataaagaaaagctgctgggattaacggaacgtgcgcgttcaggtatggcggaggcggatagccataccgcgctgatgcttcaggaagcacagctcaccaaagcgctatacaaacttgccgcgcagacctccggttatggggattttaaacgagcaaagcgtggcggagggctggatctggcaaatcgctttctggatcagggaaactatctggcatacgggcttgccgcggtggcggcgtgggttaccggcattcctcacggcctggcagtaatgcatggtaaaacccggcgcggagggctggtctttgaccttgccgatttaataaaagatgcgctaattatgcctcaggcatttatctccgccatgcagggggatgatgagagagatttcagacacgcctgcattaatcatttccagcagtcagatgccctcgatttaatgattaccgcccttcaggaaaccgctgccgcagtgggcgggagcgcagaatga

SEQ ID NO: 173875 - DNA, 3240 bp, Klebsiella oxytoca
atgaacgtgctgatcgtttcgcaatgcacaaaaaaagccagagaagagagttgtcgcattattgatcggtttgctgagcggattggaaccagcgcctggcaaaccaccataacgatggaagggctggcaacactgcgcaaattgttacgcaagtccgctcgtcgcaatacggcagttgcctgccactggctaaaaaagagcgggcagtccgagctaatgtggatagtcggaaatccacgccgctttaatgcgcaaggcaaagtgccgactcaccgtaccacgcgttcggtatgggtttctgaggaaggtttgcgttggcaatgtggtgaaagtatcgctttgctggccgcgattgccggactttttcatgatttcggtaaagcgggccgcggctttcaggaaagcctgtccgggaaaagtccaaagacttatcagccttaccggcatgaatggatttcggttcgcctgtttcaggcctttgtcggcgatcaagatgacgatgggtggctggctaagctcggagcgctttcgccagttgatgaaactgagctgctgggtagattgcttaaagacaacccgcgattttccaatagtcctttcctcacacttcccccgcttgccagggccgttgcctggctcatcctttcacatcaccgcctgcctgataatttggatggcgataatgaaccgttgctcaaccattgtgagagctggctggaaactcagcttaacgccagctggaattcgctaaatcacagaaatgaaagctggcgggatacggattttcataaggtctggaccttccgccagggaacgccgctgcaaagtatgacctggcgagaaaaggcgcggcagataacccggcgtgcccgaaatagcgcggctttaaaacagtggggccagatggaccagccatttacgctacatatggcgcgtttttgcctgatgctggccgatcatttttattccgccagcaatccgcagcccggatggcaggatccggagtatcgccagtgggccaacagcgatcgcagcagcggggcgctgaaacagcgagtggatgaacatctctgcggcgtagcgcatcatgcgctgcttttgggccgacagctgatgcgcgttcgttcatcgctaccggcgattgcgcgacataaagggtttcgtgagcgggccgcaaacccgatttttcactggcaaaataaagcgtgggacgtaacttccacactacgtgaacggagccgggaaaacggtttttttggcgtcaatatggcttcaaccggctgtggtaaaacctttgccaatgcgcgaatgatgtacgcgcttgcagatcaacaggaaggctgtcgctttaccattgcccttggcttgcggacgttgacattgcagacgggagacgcgttgcgcagccgtctgaagctggatgacgatgacctggcggtgctcgttggttcgagggcggtgaaggaattatggcaatcgacgaagagagaggagcctgaccgcggcagtacctctgagcggagtttatctgaggagctgcactatgttcattatgcgggcagtacccaggcagggattctggaaaaatggttacgcggggatgcaaagctttctgctctggtcagctcgcctgtgctggttgccaccattgaccatctgatcccggccacggagggtgtacgtggtggaaagcagctaccggccatgctgcgtctgcttaccagcgatctggtgctggatgagccggacgactttaatatcaacgatcttcatgcggtatgccgcctggtgaactgggccgggatgctgggaagccgcgttctgctctcatccgcgacgcttccgcccgatcttatccaggcgctatttgccgcttatctggccgggcgaaaaatatggcaggcgtcatgtggggtcagcgacaggcccgtcaatatttgttgcgcctggtttgatgagaaagacgcccgcgcagaacagattgctgacggtctctctttccgtcaggcgcacaatctgtttattgagcggcgagcaaaaatgctggcggagaaacccaggctgcattttggccgtatcgcttccctatcttcggagcctggtacagtagaagatgtgattagccgggttacgcaaaccgttcatacgcaaatgctgtcattgcatcaggcgcataacgaaccgcacagcaacggtaaaaccgtgtcgctggggttggtgagatttgccaatatcgatccgctggtcgccgtagcgaaagcgctattcgcgatatcctctccgcaagacgtctgcattcattactgcgtttatcacagtcgacatccgctgatggttcggtcagccattgaagcgagactggatcaagcatttatgcgtcatcagcccgccaggctctggcagcatccggatattgaaaaagcgttgcgcagtcgtccggaaaagcatcatcttttcgtcgtgctcggtacctccgtcatggaggtcggacgtgactgggatgccagctggggcattattgaacccagctcaatgcgctccatcattcagtttgcagggcgtatccagcgccatcgtcggcagcttcccgagagcgagaacctggcgatcctcagccataatattcgggcgttacgaaaactatccccggtcttttgcaaacccgggtttgaagatcgcgacaatcttttatccgaccacgacttgcttaatctactgccgctgcaggattaccagaccatcaatgcgctaccgcggattttgccagctaagggcgacaataagctggctgcgctggagcatgcgcggcttcataatgaattacttagcagtaagagcaagcggttgattgctgcggactggtggcggcgctcgcttagctggagcggctggatgcagcgtaaaacgccgttccgccagtcgcagcctgagaaatcctatttccttcatatgaatgatgaagatagcgagccctgctttgctttttatgctgaggacggaagcgtcaaaccctcaggcaattttaagttgcagttgctgaagtttgccgacggtgtcacctgctgggggacagtggattaccagcaagagatgctggcgcaggcagaggcgcagggaattgaaatcgactgcgttggcgcattgtttggcgaaattcgggtgccggaaaatagtcaagaggatgcaaccagcgactggagttatcacccgtggctgggtgtttacagggagatttattaa

SEQ ID NO: 173876 - DNA, 1314 bp, Klebsiella oxytoca
atgacaaccgaagcactgactcacttcatcatcgactacatcgcttcacgaaagcagcccaaattagacgcctttgaaaaagaggcggcgaaacggctggctcaaggcgaggatgccggcgctatcgcgcaggagcgtcaggagcttgaagtgaagtatcagccgcgcaactggctgacggatgcggcaagacgagctgggcaaatcagccttgtcactcatgcggcgaagtttacccacggtgactcaaaaagcagcagcatttaccgcgaaacggtgggcgatgagggctatttaagtacagctgtgctggctaacgtggcggcggatgcggtgggcaacgcggctgctctggacgtggcaaaactgctgcaaaccgaagtgggcggcgattcgctgctggcctgcctgaaacgcggcgatcgtagtcctctgatgggctttgctgaaaacgacgcccagctggcactgtggatggaaggattctctcaggcgttaacgcctgctcaacccgcctcgcataagcttgccaaacagatttactttccagtcgatggcggctatcacctgctatctccgctatttgccacctcgctggcgcaggcgatgcatgaaaaaatggtggcagcacgatttggcgaacaagcaaaagccgcgcgtgaagctcgccgggcgggcaaatggcatgcgcagcccgatgtgcgctatccgaatgtttccgaaatgcattttggcggcactaaaccgcagaatatttcggcgttaaacagctcgcgcggtgggcgggtctggctgctgccgtcgcagccgccaaaatggacaatgctcgataaggcgccgcaaaatctgactagtctctttgcactacgcggcgattttaaccgagcggcaaccgacactgtttcccggatggtttctctacttaaagagaagactgataacaataatcgccatatccgcaacgctcgggcgggttatgttgatgaactgattgatttgttatttcttcatgcagcgacgtaccagcaggaagcgtggcagggatggacgcttaacagcccggatttacctctccaccagcagctttggctcgatccctggcgtagcaaaacagacgagacattccgctctgagcgtgaaaaaggcgactggcaacgaagcgtcgcggatgacttcgcgcgctggctgaactatcgcctgaataaagcgcgtctcgatgtggggatcgccgagcgccgtgagtggcaaactcagcgtctgtttagtcaacggatgcgggaaatggaagctattgtgcaggaggcgctgaaatga

SEQ ID NO: 173877 - DNA, 936 bp, Klebsiella oxytoca
atgagctatctgcttttattgccccacattcgcatcgaaaacgcaaatgcggtggcaggattaacctggggattccccgctattacccactttttagggtatgttcatgcgctttcccgcagggtgagcgaatttggcgtctctttcaccggctgtgcggtgattaatcatgaacaccatattcaggcctattcctccgggcgcgactatcaatttgcgctgactcgtaatccgctgaccaaagaaggtaaaaccgctgcctttaacgaagaggggcgaatgcatcttaccgtctctttgcttgttgaatgccagggcgaaatcatcaatggcgaatatggcaaagcggcgctctgttcgtctctgcttacgctctgccagagccacaaactggcgggcggaagtatcgtgatgatgcgcgagccacagatatttaatgcgcctgatgatgaaagaacgctgcgtaagatcctctggcgtctgatgccgggttttgcactctgcgatcgcagcgagtggttgatggagcactatcgccagctgcagcagcggaggccggaaagcagcttactggatgcgtggcttgactttgcggcgatcaaatatcagcccgttcagcaggaaccggaggatagcgtgagctgggagtatcagccgaaaccgaagccggggtatctggtgccgctgatgtgcggatatcaacgtatttcccgactataccagccgggagaagtggccaacgttcgcgataccgcaacgccgttcgcctttaccgaggccgtttatggcgttggagaatggcgcgggttacatcgtatagctgaccttgagccgcttatctggcgctaccgcacgagcgatacaggctactactgttctgcaatgcctgttgctgatgatgattttatatttaacgaagatgacgatttagaataa

SEQ ID NO: 173878 - DNA, 1002 bp, Klebsiella oxytoca
atggcaaaggctcctgtatctgtaaaaacggcttccgtactggcatttgaacgcaagctcgccacctccgatgcgatgatgtatgcggggaactggctgggcgatagctggcaaccgatcgaaattaaggaaaaagcggtacgtggaactatctcgaaccggcttaaaaatgccatcgccagcgatgcaacaaagctggatgccgagatccaaaaagcgaatctgcaacgagtggacacggcggcgttgcccgctgatgccgacaccttaaaagtcgtattcaccctgcgggtgctggggaacttagcgacgccatcggtctgtaatgatatggcctatcagaatgcgattcagcagacgatcgaaggttatatcagcgagcacggttttgccgaactggctcgtcgctatgcggctaacctcgcaaatgggcgttttctatggcgcaaccgcattggcgctgagcagattcaggttagcgtgagcgcgcaggggcaggcgtgggtatttaatggccacgattattcattacgtgaattctctcaggacgatgaggaaatagcctcccttgcggcgctgatcgaacaggggctatgtggccaggcgtgggtgatgctaacggttgaggcgcaagtacgtttgggcgccgggcaggaggtctttccgtcacaggagctggtactggatagcaacagtagtaaaagtcgcgtgctgtatcaggtcgcgggcatcgccgggattcactcgcagaagatcggcaatgcgctgcgcactatcgatacctggcatccaaaagttgatgagctgggggcgattgcggtagagccgtacggctcggtaaccagccgcggtatggcctgtcgtcagccgaaggacaagatggatttttataccctgctggatagctgggtgacgaaaggcattaagccagacgtcgaacagcagcattatgtcatggcggttcttatccggggcggtgtattcggtgagaaaagcgaataa

SEQ ID NO: 173879 - DNA, 555 bp, Klebsiella oxytoca
atggactatttcctggatattcgcgttctgcctgacccggaatttagcgaagagatgcttatggccgcactgtttgccaaactgcaccgcgctttaggagccagaggcaagggggatattggcgtcagttttcctgagttttccgtcaagccggggccattattacgtttacatggtgatgaatctgcactgtgcgcgctggaagaaacgctctggcgtaaagggctgaatgattattgtcagagtgggcagataatgccggtaggggaaatacaaggatggcgttgcgtcagtcgggtacaggtaaaaagcagccccgagcggctgatgcgccgctcggtaagaaaaggctggctgacgcaggatgaagcaaatgagcgattgcttagcatgcggggagagtcaacagcgctcccctggttgaatatgaaaagcctctccaatgggcagaagtttccgctatttatttgtcacggtgagctgctggcgcagcgcgtcgcgggaacattcaatagctatgggctgagccatatcgcgactatcccctggttttag

SEQ ID NO: 173880 - DNA, 219 bp, Klebsiella oxytoca
atggccaaagaagacaatattgaaatgcagggcaccgtacttgatacgctgcctaacactatgttccgcgtagaactggaaaacggtcacgtggtaactgcgcatatttccggtaaaatgcgtaaaaactacatccgcattctgacgggcgacaaagtgactgttgagctgaccccgtacgacctgagcaaaggccgcattgtcttccgtagtcgctga

SEQ ID NO: 173881 - DNA, 705 bp, Klebsiella oxytoca
atgcggctggttcagctctctcatcattccatcgccttcccctccccggaaggcgctttgcgcgaacctaatggtctgttagcgctgggcggcgatcttagcccggcgcggttactgatggcctatcagcgcggtatttttccatggttttcgcccggtgacccaattctctggtggtcccccgacccgcgagcggtgctgtggccggagaaattccatctcagccgcagtatgaagcgttttcatcagcgctctccgtatcgcgtaacgttgaatcacgccttcggtcaggttattgaaggctgcgccgatcatcgtgatgaaggaacatggataacgcagggtattgttcaggcataccatcagctacatgagctggggcacgctcattctgttgaagtgtggcagggagaggaattagtgggtggcatgtacggtgttgcacagggggcgctgttttgcggagaatcaatgttcagccgagccgaaaatgcctccaaaaccgcactgctggtctttagccaagcgtttatgcacgatggtggaaaattaatcgattgccaggtgctaaacaagcatacggcttcgttgggcgcagtggaaattcctcgccgcgattatctcgactatctctccgtactgcggacgtatcgtctgccggagcggttctgggtgccaagggtgctatttgcaggagaagcataa

SEQ ID NO: 173882 - DNA, 1722 bp, Klebsiella oxytoca
atgcgcgcattatggccttacctggcgctgtacaaacgacacaaatggctgctgctgctcggtatcgtgctggcgatcgttacgctgctggccagcattggcttattaacgttatccggctggttcctgtcggcatcggccgttgttggcgtagcgggcatctacagctttaactatatgctgccagccgcgggcgtacgcggcgcggcgatcattcgcaccgctggccgttattttgagcgtctggtcagccatgacgcaacctttcgcgtcctgcagcatctgcgggtatttaccttcagcaaactgctaccgctctcccccgccgggctggcgcgttttcgtcagggcgagctgcttaaccgggtggttgcagatgtcgataccctggatcatctctatctgcgcgtcatatcgccgctggtaggcgcgctggtggtaattctcgtcgtcaccgtggggctgagcgtactggacgttactctggctctgaccctgggcggtattatgctacttaccctgctggtgatgccgccgctgttctatcgcgccggtaagcccgccggtgaaagcatgactcatttccgcgggcagtatcgccagcagttgacctcatggctgcaggggcaggctgagctgatgctgttcaacgccagcgatcgttaccggcagcaaatggaaaaaaccgaagcgcattggctggatgcgcagcgtcgccaggcggaactgacggccctctcccaggcgctgatgctgctgattggcggagtggcggttattactatgctgtggctcgcctccgcaggcgttggcggcgatactcaaccgggcgcgctgatcgcgttgtttgtcttctgcgcgctggcggcgtttgaagcgctggcgccggtaaccggcgcatttcagcatctggggcaggtgatcgcttccgcaaagcgcatcacgcaaattaccgaacaagagccggaagtcgccttcactcagggcgaaagccaaaagctggatcgcgtttcgttaagcttaaatcaggttaccttcagctatccgcagcagccctcccctgcgctggagaaaatttcattgcagatcgaggccggagagcatatcgccatcctgggacgaacaggctgcggtaaatcgacgctgttacagctgctgacccgtgcctgggatccggcggagggagagatattactcaatgatcagccgctgacgcagcttaacgaagcgacgttgcgccaggtgatgagcgtcgtgccacagcgcgtacatctgttcagcgcgaccctgcgcgacaacctactgctggcttccccgggggccagcgatgcccggcttgcagaaacgcttgaacgcgtcggtttagccaggttgctggaagatagcggcctgaatagctggctgggagaaggtggtcgtcagctttccggcggcgagctgcgcaggctggctatcgctcgcgccctgcttcacgatgcgccgctgatgctgctggacgagcccactgaaggccttgatgcgacgaccgaaagccaaatacttgatttacttgctgaagttatgcgtgaaaaaaccgtgctgatggtaactcatcgtctgcgcgggctggcgcggtttaatcagataatagtcatggacaacggaaagattattgagcaaggtagtcacgcagaattgctggctgaacaggggcgttactaccagtttaagcagcgtctgtag

SEQ ID NO: 173883 - DNA, 1767 bp, Klebsiella oxytoca
atgaataaaacccgtcaacaagatttaacccgttggttaaaagatcaaagcattatctcccgtcgctggttgatgatttcccgtctcctgggcgtcgttagcggcctgctcatcgttgctcaggcctggttcctggcgcggatccttcatcgcatgattatggaaaatattcccgccacggcgctgttgctgccttttgtgttactggtgctggtctttgtgctgcgcgcctgggttgtctggttgcgtgaaagagtgggttttcaggcgggccagcatatccgcgttgagattcgccgccaggttctggatcgcttacagcaggcggggcctgcctggatacaggggaaacccgcaggcagctgggccacgctgatccttgagcagatcgacgagatgcatgactactatgctcgctatttaccgcagatgacgctggcggccagcattcccttactgatcgtcatcactattttccccatcaactgggccgcagcgctgattctgttgggcacagcgccgcttattcctctgtttatggcgctggttggcatgggagcggccgatgccaaccgacgtaactttctcgctctggcgcggttaagcggccattttctcgaccgcctgcgcggtatggagacgctgagaatttttcatcgcggtcaagcagagacggaaaacatacgcgaggcttctcaggatttccgtcagcgaacaatggaagtgctgcgtctggcgtttctctcctccggcgtgctggaatttttcacctcgctctcgattgcgctggtagccgtttactttggcttttcctatctgggagagctcaactttggccactacggcgccggtgtgacgttgatggccggtttcctcgcgctgattctggcccccgagtttttccagccgctgcgcgatttaggcaccttttatcatgcaaaagcgcaggctattggcgccgctgatagcctgaagacctttatggaaacgccgctggcgcagccagaacgtggggaaaaagtattaagcgataatgaaatgattagcatcgaagcccgcgacctgctgatcaaatcccctgagggtaaagtgctggccgggccgctgaatttttccctacgcgctggcgagcgcgtggtgctggttgggcaaagcggctccggcaaaagctcgctattgaatacgctaacgggttttcttccctacgagggttcgctcaaggtcaatggcgttgagttaaagagtctggatgctgaccgctggcgccgtctcctgagctgggtagggcaaaatccgcagctgccggcggtaacgctgcgtgacaacgtcctgctgtcctgccctgatgccaccgaagcacagctacagcttgcgctggataaagcgtgggtcagcgagttcctctcccttctgccgcagggtattaacacgcctgtcggcgatcaggccggtcgcctgtcggtcgggcaggctcagcgtgtcgccgtcgcgcgggcgctgttggtaccctgccgcctgctgctgctggacgaacccgcagccagcctggatgcccatagtgagcagcgcgtgatgcaggcgctgaccaatgcatcaacgcagcaaaccacgctaatggttacccaccagctggaaggccttgcgaactgggatgcaatctgggtgatgcaggatggtcaaattgttgaacaaggcagttattcgcaactggcaaccgcaggcggcccttttgcaaccctgcttgctcatcgtcaggaggagatttaa

SEQ ID NO: 173884 - DNA, 969 bp, Klebsiella oxytoca
atgggcacggccaaacacagtaaactgcttattcttggttctggacctgcgggatataccgctgcggtctacgcagcgcgcgcaaatctgcagccggtactgattaccggaatggaaaaaggcggccagctgaccaccaccacggaagtggaaaactggccaggcgatcctaacgatctgaccggaccgctgctgatggagcgcatgcacgaacatgccaccaagtttgagaccgaaattattttcgatcatattaacagcgtcgatctacaaaaccgtccgttccgcctgactggcgacagcggtgaatacacctgtgacgccctgattatcgccaccggcgcatcagcgcgttatctggggcttccatcagaagaggcatttaaaggccgcggcgtttctgcctgcgccacctgcgacggtttcttctatcgtaaccagaaagttgccgtcatcggcggcggcaatacggctgttgaagaggcgctgtatctgtccaacatcgcttccgaagtccatctgatccaccgtcgtgacggcttccgcgcggaaaaaatcctcatcaaacgcctgatggataaagtggaaagcggcaacatcgtgctgcataccaaccgcaccctcgaagaagtaaccggcgatcagatgggcgtgagcggcctgcgcttgcgcgatacgcagaatgctgacaatgttgaatccctggacgttgccgggctgttcgttgctatcgggcatagcccgaacacggcgatttttgccggtcaactggagctggaaaacggctacattaaagttcagtccggcatccacggcaacgccacccagaccagcattcctggcgtcttcgctgcgggtgacgtgatggaccatatctatcgtcaggcgattacctctgccggaacaggctgtatggctgcgctggatgcagagcgttatctggatggtttagccgacgcttgcaaataa

SEQ ID NO: 173885 - DNA, 495 bp, Klebsiella oxytoca
atggtagatagcaagaagcgccctggcaaagatctcgaccgcattgatcgtaatattttgaatgaattgcaaaaagacgggcgtatttccaacgtcgagctttctaaacgggtgggactttctccgacgccttgccttgagcgcgtgcgtcgactggaaagacagggttttattcagggctatacagcgctgctcaacccgcattatctggatgcatcacttctggtatttgttgagattactctgaatcgtggcgcgccggatgtgtttgagcaatttaactccgctgtgcaaaaacttgaagaaattcaagagtgtcatctggtttccggggatttcgattacctgttgaaaacccgcgtgccggatatgtctgcgtatcgtaaactactgggcgagaccttgctgcgcctgccgggcgtaaacgacacccgtacctatgtggtaatggaagaagtcaagcaaagtaatcgtctggtaattaagacgcgctaa

SEQ ID NO: 173886 - DNA, 4149 bp, Klebsiella oxytoca
ttgagccaggaatacaccgaagacaaagaagtcaagttcacaaagctgagtagcgggcgccgtctccttgaggcattactcattctttgctccctttttgccatctggttgatggcggccttactcagctttaatccctcggatcctagctggtcgcaaacggcgtggcacgagcctattcataacataggcggtacgcccggagcatggctagccgatacgctatttttcatttttggcgtaatggcttacaccattccggtcattattatcggcggctgctggtttgcctggcgtcatcaggaaaacgacgagtacatcgattatttcgccgtctcgctgcgtttgatcggtgcgctggcgctgattctcacgtcctgcgggctggcggctatcaacgctgatgatatctggtactttgcctccggcggggtgatcggcagtctgctgagcaccaccctgcaacctctgctgcacagcagcggcggcacaatcgcgctgctctgcatctgggcggccggattgacgttgtttaccggctggtcctgggtcagcatcgccgaaaaaatcggcggtgtgattctttctgttctcacgtttgccagcaaccgtacccgtcgtgacgacacctgggttgatgaaggggaatatgaagatgatgaagaagaatatgacgatgatgaacccgccaggccgcagggttctcgacgcgcgcggattctacgcagcgccttagcccgtcgccagcgcctggccgaaaaattcgctaacccgatggggcgtaaaactgatgccgctctgttctccggtaagcggatggatgatgcggaagatgagattcagtatagcgccagcggtgcgcctgttgccgctgatgatgtgctcttttctggttccagcgccgcgcgtccggccaatgtcgatgacgttctgttctccggagtcagcgcggcacgccctggcgattttgacccatacgatccgctgttgaacggccatagcattgccgatccggtagcagtggccgcgcaggataccgctgctccgcaggcatggtctgaaccgctgccagggtacgacgctcagccagtctatcagcccgaaccagtgacaccgccgcagccgtctccggtgcagcagccagcttatcagccggaaccgatcgcgcagccgcagcacgtgtatcagccggagcaggctccggtgcggcagccagcttatccgccggaaccgttcttgcagccacagcacgcgtaccagccggaacaggctccggtgcagcagccagcttatcatccggaaccgttctcgcagtcacagcacgcgtaccagccggagcaggctccggtgcagcagccagcctatcagccggaaccgttcttgcagccgcagcacgcgtaccagccggaacaggctccggtgcagcagccagcttatcagccggaaccggcatggcagccgcagcatgcgtaccagccggaacaggctccggtgcagcagccagcttatcatccggaaccggcatggcagccgcagcatgcgtaccagccggagcaggctccagtgcagcagcccgatccctatgctgcccccgttgagcctgagcctccgcaagaggaggtgaagcctcagcgtccgccgatgtattactttgaagaagtagaagagaaacgcgcgcgtgaacgcgagcagcttgccgcctggtatcagccgattcctgaacccgtcagtccggtggcgacaaaacccatcacgcctccgtcttcaccggcgggagatgttgccgccgtgagcgcactggcggccgaggtccatcaggcaacgggtgcggctgcagctagcgccgccgcggcctcaaccgcttctgccgcatccggcgctgcgccgttatttagcccggcttcgggcggtcctcgcgcgcaggtaaaagaaggcattggcccgaaattacctcgtccaaatcgcgttcgggttcccacccgccgggaacttgcctcctacgggatcaagctgccttcgcagcggttagccgaagagcgcgcgcgtcaggctgagcatcagcactatgatgattcgctgtctgacgaggaagttgcagagctcgagcagggagagctggcgcgtcagttcgccgctgcgcaaaatcagcgctatggtgatagctacgctgccgaagatgaaactgcagatgacgattccgctgctgaagccgagctggctcgtcagtttgccgcatctcaacaacagcgctacgcaagcgagcagccgccgggatcgcatccgttctctgcggctgactatgaattctcgccaatgaaaacgttagttgacgatgcgccgagcgagcctgtcttcacgccattgccggaagtgcagcagcctgctccgcagtatcagcagccggtccagcattcgcagcccgtgccgcagccgatgccgcatcagcacgcccctcagcaaccgcaaaatgtgcagcaccaggcttatcaatccgcgcatcatcagccggctcaacatccgcagatgccgcagcaggctgctggcagctatccgcagcagcatgcttctcaggggcacgccccgcagcagccggccccacagccgcaggagagtctcattcatccgttgttgatgcgcaatggcgacagtcgcccgttgcagaagccgacgacgctgctgccgtctcttgacctgcttacgccgcccccggctgaagttgagccgattgatacctttgcgcttgagcagatggcgcgtctggttgaagctcgcttggccgatttccgcattaaagccgacgtggtgaactactcaccgggcccggtaatcactcgctttgagcttaacctggcgccgggcgtgaaagcggcgcgtatttccaacctgtcgcgtgatttggcccgttccctgtccacagcggcggtgcgcgtagtcgaagttattccgggtaagccttacgttggcctggagctgcctaataaaaaacggcaaaccgtttacctgcgcgaagtgctggataacgcgaaattccgcgacaatccttcaccgctcaccgtggtcctcggcaaagacatcgcgggcgaacccgtaaccgccgacctggcgaaaatgccgcacctgctggtggctggtactaccggttccggtaagtctgttggggtcaacgccatgatcctgagcatgctttacaaagcgcagccggaagatgtgaaattcatcatgattgacccgaaaatgctcgagctgtcggtttatgaaggcataccgcatctgttgaccgaggtggtgacggatatgaaagacgccgccaacgctttgcgctggagcgttaacgagatggagcgtcggtataagctgatgtctgcgctgggcgtgcgtaatctggcgggttacaacgagaaaattgccgaagccgcgcgtatgggacggccaattccggatccgtactggaagcctggcgacagtatggatgcaacccatccggtactgaaaaaagagccttatatcgtggtgctggtcgatgaatttgccgacctgatgatgaccgttggtaagaaagtggaagagctgatcgcccgtctggcgcagaaagcgcgcgccgcgggtatccacctggtactggcaactcagcgcccttcggttgacgtgattaccggcctcatcaaagccaacatcccgacgcgtatcgcctttaccgtctcgagtaaaattgactcgcgtaccatcctcgatcagggcggtgcggaatctctgctggggatgggcgatatgctctactccgcgcctaactcgacgattccggtgcgcgtgcacggcgcttttgtgcgcgacgaggaagttcacgctgtcgttcaggactggaaagcgcgcggtcgtccgcagtatgtcgatggcatcacctccgacagcgaaagcgaaggcggcggcggtggctacgatggcggggaagagctcgatccgctattcgatcaggccgtgaattttgtgacggaaaaacgcaaagcctccatttctggggtacagcgtcagttccgcattggctataaccgcgccgcgcgtattattgagcaaatggaagcccagggtattgtgagcgagcagggtcataacggtaaccgtgaagtgctggctccgccgcccttcgagtaa

SEQ ID NO: 173887 - DNA, 612 bp, Klebsiella oxytoca
atgaaaaaactcgcaatcacctgtgcattactgtccggtctggttgtcagccaggtatgggcggatgccgccagcgatttaaaaagccgccttgataaagtgagcagcttccactccagttttacgcagaaggtcaccgacggcagcggtaatgccgttcaggacgggcagggtgatctctgggtcaagcggccaaatctgttcaactggcacatgactcagccagatgaaagcgtgctggtttctgatggcaaaacgctatggttttacaatccgtttgttgagcaggccaccgccacctggttaaaagacgcgaccagcaatacgccgtttatgctgatagcccgtaatcaggccagcgactggcaaaactacaacattaagcagaacggtgacgattttgttctgactccgaaaaacggcagcggtaatcttaagcagttcaccatcaatgtgggtcgtgacggtacgattcatcaattcagcgccgtggaacaggacgatcaacgcagcagctatcagctgaaatcgcaacaaaatggtgccgtggatgcatctaagttcacctttacgccgccgcaaggggttacggtggacgatcaacgtaaatag

SEQ ID NO: 173888 - DNA, 1344 bp, Klebsiella oxytoca
gtgagcaacctgtcgctcgatttttccgataacgcgtttcaacctctggccgcccgtatgcggccagaaaatttagcgcagtacattggccagcagcacctgctggcgccgggtaaacccttaccgagggcgattgaagccgggcacctgcactcgatgatcctctgggggccgccggggacgggaaaaaccaccctcgctgaggtcattgcgcgctacgccagcgccgatgttgaacgtatttcagcggttacctccggagtgaaagagatccgcgaggccattgaacgcgcgcgtcaaaaccgcaatgcgggtcgccgcacgatcctgtttgtcgatgaggtccatcggtttaataaaagccagcaggatgcctttttgccgcatatcgaagatggaactatcacctttatcggcgcgacgacggaaaacccttcctttgaactcaattctgcactgctatcccgcgcgcgcgtctatctgctgaagtcgctgaccagcgacgatatcgaacaggttcttaatcaggccatgagcgacaaaacgcgcggctacggtgggcaaaatattgtactaccggacgagacgcgcaaggccatcgctgaccttgtcaacggtgatgcgcgccgggcgctgaatacgctggaaatgatggccgatatggctgaaaccgacgcctccggcaatcgcgtgttgcaggttgaactgctgaccgaaattgccggcgagcgcagcgcgcgtttcgacaacaaaggcgatcgcttttacgatttaatctccgcgctgcataaatcggtccgcggaagcgcgccggatgccgccctctactggtacgcgcggattattaccgccggcggcgatcccctctacgttgcccgccgctgcctggcgattgcctctgaagatgtaggcaatgccgatccgcgcgcgatgcaggttgcgatctccgcctgggactgctttacccgcgtcggaccggcggaaggtgaacgcgccattgctcaggccattgtttatcttgcctgtgcgcccaaaagcaacgctgtttacaccgcctttaaagcggcaatggccgacgcgcgcgaacgtcccgattacgacgtcccggtacatttgcgcaatgcccccacgaagctgatgaaagagatgggctacgggcaggcgtaccgctatgcacatgatgaacctaatgcttatgccgccggagagcagtacttcccggaggaaatggcgcaaacgcgctattatcagccgacaaaccgggggctggagggcaaaataggcgaaaagctcgcctggttaaccgaacaggatcaaaatagcccgataaaacgctaccgataa

SEQ ID NO: 173889 - DNA, 1293 bp, Klebsiella oxytoca
atgctcgatcccaatctgctgcgtaccgagccagacgcagtcgcagaaaaactggcacgccggggctttaagctggatgtagataaacttcgcgctctggaagagcgtcgtaaagttctgcaggttcaaactgaaaacctgcaggcggagcgtaactcccgatcgaaatccattggccaggcgaaagcgcgcggggaagatattgagccattacgcctggaagtgaacaagctcggtgagcagcttgatgccgctaagaccgagctggacgcgctgctggcggaaatccgcgatattgcgctggctattccaaacatcccgcatgatgacgtaccggccggtcgcgatgaaaacgataacgttgaagtcagccgctgggggaccccgcgcgagttcgattttgacattcgcgatcacgtcacgctgggcgaaatgcacggagggctggattttgccgccgccgtgaagctgaccggttctcgttttgtggtcatgaagggccagctggcacgcctgcaccgcgcgctggcgcagtttatgctggatctgcatactgaacagcacggttacagcgaaaactatgttccgtatctggttaaccaggacacgctgtacggcactggtcagctaccaaaatttgccggcgacctgttccatacccgtccgctggaagaagaagccgacagcagcaactatgcgctgatcccgacggcggaagtcccgctgaccaacctggttcgcgatgaaatcattgatgaagacgatctgccgatcaaaatgaccgcccatacgccgtgtttccgctctgaagcgggctcttacggccgtgatacccgtggtctgatccgcatgcaccagttcgacaaagttgagatggtgcagattgtgcgtccggaagattccatggccgcgctggaagagatgaccggccacgccgagaaagtgctgcagctgctgggtctgccgtatcgtaaagtggctctgtgcactggcgacatgggcttcagcgcgtgcaaaacctacgatctggaagtgtgggtaccggcgcagaatacctatcgtgaaatctcttcctgctccaacgtgtgggatttccaggcgcgtcgtatgcaggcgcgctgccgcagcaagtctgacaagaaaactcgcctcgtacacacgctgaacggttctggcctggcggttgggcgtacgctggtcgcggtgatggaaaactatcagcaggcggatggccgcattgaaattccggaagtgctgcgtccgtatatgcgcggccttgaatttatcggctga

SEQ ID NO: 173890 - DNA, 2439 bp, Klebsiella oxytoca
atgaaaaccaaaacccccgatgctttactggctgccgaggtgagccggcgtggtttaatgaaaaccacggcgattggcgggctggcaatggccagcagcgcttttaccttacccttcacgcgcattgcccacgctgcggatagcctgactcccaccagcgaaaccgttacctggagcgcctgtacggttaactgcggtagccgctgtccgctgcggatgcatgtggtcgatggtgagatcaaatatgttgaaacagacaataccggcgatgatagctacgacggcctgcatcaggttcgcgcctgtctgcgcggccgctcgatgcgtcgacgcgtctacaacccggaccgcctgaaatatccgatgaagcgcgtgggcaagcgcggcgagggcaaattcgagcgcatcagctgggaagaagcatttgatactatcgccagcaatatgcagcgcctgataaaagagtacggtaatgagtctatctatctgaactatggaacgggtaccctcggcggaactttgactcgctcatggccaccgggaaaaaccctgattgcccgcctgatgaactgctgcggcggctatctcaaccattatggcgactactccaccgcgcaaatcgccgctggcctgaactacacctacggtggctgggccgatggcaatagcccgtcggatatcgaaaacagcaagctggtcgtattgtttggcaacaaccccggggaaacccgaatgagcggcggcggggtaacctattacctggaacaggcgcgggagaaatccaacgccaggctgattattatcgatccacgctataccgacaccggtgccggacgcgaagacgagtggatcccgattcgcccgggaaccgacgccgcgctggtctccgcgctggcgtgggtgatgattactgaagacctcgttgatcaacctttcctcgataaatactgcgtaggctatgacgagaaaacgctgccggaaggagcgccagccaatggccactataaggcctatattctcggtcagggcaaagacggtatcgcgaagacccctgagtgggcggcgacgattaccggcattccccaggcgcgtatcgtgcagctggcgcgcgaaatcgccagcgctaaacctgcctatatttctcagggctggggcccgcagcgtcatgccaacggtgagctggtatcccgtgcaatttcaatgctggcgatcttaaccggtaacgtcgggattaacggcggcaacaccggcgcgcgtgaaggttcttactccctgccttttgaacgcatgccgacgctggataatccggtggaaaccagtatttccatgtttatgtggaccgatgcgattgagcgcggtacggaaatgaccgcgctgcgcgacggcgtgcgcggcaaagataagcttgacgtccctatcaaaatggtctggaactatgctggtaactgtcttatcaaccagcactcagaaatcaaccgtacccatgacatcctgcaggatgacaagaagtgcgaaatgattgtggtcattgattgccatatgacctcctcagcaaaatatgccgatattctgctgccggactgtacggcctcggagcagatggattttgcgctggatgcttcctgcggcaacatgtcctacgtgatttttgccgaccaggccatcaagccgcgctttgagtgcaaaaccatttatgaaatgaccagcgaactggcgaagcgcatgggcgttgagcaacgcttcactgaaggtcgcacgcaggaagagtggctgcgtcatctctatgagcaatcccgtaaagcgatcccggcactgctgccgtttgatgaattccgtaagcagggaatcttcaagcagcgcgatccggaaggtcaccacgttgcctataaagccttccgtgaagatcccgccgccaatccgttaacgacgccgtcagggaaaattgaaatttactctgcgcagctggcggaaattgcggcgacctgggagcttaaagaacaggatgtcatcgacccgctaccgatctacagccctgggtttgaaaactatgacgatccgctggctgaaaagtatccgctgcagctcaccggttttcactataaagcccgtacgcactccacctacggcaacgttgacgtgctgaaagcggcttgccgtcaggagatgtggatcaacccgctggatgcgcagaagcgcggcatcgctaatggcgatcggatccgcatctttaacgatcgtggtgaagtccatatcgaagccaaagtgaccccgagaatgatacctggcgtggtcgcgctgggtgagggggcctggtataacccggacgcaggccgcgtggatcaggctggcagcatcaacgtgctgaccacccaacgcccgtcgccgctggcgaaaggcaatccatcgcataccaacctcgtccaggttgaaaagctgtaa

SEQ ID NO: 173891 - DNA, 618 bp, Klebsiella oxytoca
atgacaactcaatatggattttttattgattccgcccgttgcaccggttgcaaaacctgcgaactggcttgtaaagactataaaaaccttacgccggaagtcagcttccgtcgtatctacgaatacgccggcggcgactggcaggaggataacggggtatggcagcaaaacgtctttgcctattacctctctatcgcctgcaaccattgtgaggatcctgcctgcactaaagtttgccctagcggagcgatgcacaagcgtgaagatggctttgttgtcgtcgatgaagatgtctgtatcggctgtcgctactgtcatatggcctgcccgtatggcgcaccgcagtacaatgcgacaaaaggccatatgaccaaatgcgatggctgccacgagcgcgtcgccgacggcaaaaaaccgatttgcgtggaatcttgcccgctgcgcgcgttggatttcggcccgattgaagagctgcgtaaaaaacacggtcagctggctgccgttgcgccgctgccttcggcgcatttcactaagccgagcattgtgattaaacctaatgccaacagccgaccgtgtggagataccaccggctacctggctaacccgaaggaggtgtga

SEQ ID NO: 173892 - DNA, 864 bp, Klebsiella oxytoca
atggggagtggatggcatgaatggccgctgattattttcacggtcttgggtcagtgcgtcgtgggcggatttattgtactggctctggcgctaataaagggcgatttaacgcgtgaacagcagcagcgcgtggtgcgaagtatgtttggcctgtgggtgctgatgggcgtaggttttattgcctcgactctgcatcttgggtcgccgatgcgcgcttttaactcgcttaatcgcgtgggggcttcatcgctcagcaacgaaatcgccagcggtgcgctgttctttgccgtcggcggcattggctggctgctggcggtggtgaataagctacccgcgggactgcgtcacctctggctggttattaccatggtgctcgggataatctttgtctggatgatggtccgcgtctataacaccatcgatacggtgcccacctggtacacggtctggacgccactgagcttcttcctgacgatgtttatcggcggtccgctgctgggatatctgctgctgcgctttgcggacgtcaacggttgggcgatgcgcctgctgccggcggtgactctgctggcgctggtggtgagcgtgaccgtggtgctgatgcagggtcaggagctgacaacaatccatagctctatccagcaggcctcggcgctggtgccgaactatggttcgctgatggcgtggcgcgtggtggctctggtgctggcgctggtatgctggattgctccgcagctcaaaggctatcagcccgcattgccgcttctggggctggcatttgcgctggtgctggttggcgaagcgatcggccgcggcgtcttctatggcctgcatatgaccgtcgggatggcaatcgccagctaa

SEQ ID NO: 173893 - DNA, 1149 bp, Klebsiella oxytoca
atgaccatctacacccggccagtgcaaatgctgctctgtggcctgcttctgttgactctggcgatagcggttttaaatacgctcgtcccgctttggctcgcccatgaaaatatgccgacctggcaggttggaatggtggggtcgtcctattttaccggtaatctggtgggaacgttgctcgccggatgggtaattaagcgtctgggatttaaccgcagctattacctggcatcggttatctttgccgttggctgcgtgggtcttggtatcactattggcttctggagctggttcagctggcgttttatcgccggcgtcggctgcgcgatgatttgggtggtggttgagagcgcgctggtctgtagcggcacttcgcggagccggggtcgactgctggcggcctatatgatgatttattatgtcggcacggtactgggccagctaatggtcagcaaactgccgacggatctgatgagcgttctgccgtgggtgacggcgctggctctggcggccatcctgccgctgctgtttgctcgcgtggcgactcaggccgatgaaccgcatgaaccggcgcgtatctggccaatgctacggctgcgtcaggcccgccatggggtcaacggctgcattatttccggcatcgttctcggttcgctgtatggcctgatgccgctatggcttaaccaccagggcgttagcgattccggcattggcttctggatggcggtaatggtgagcgcgggtatcgttgggcagtggccgattggccgtcttgccgatcgctacgggcgtctgctggtcctgcgcgttcaggtatttgtggtgatcctcggctgtctggcaatgttaagccaggccgcaatggcgccggcgctgttcgtgctgggggcatccggctttacgctctatccggtggctatggcctgggcttgtgaaaaagtggagcgtcatcagctggtggcgatgaaccaggcgctcttaatgagctataccgtgggtagcctgcttgggccgacccttaccgcgatgctgatgcagaatttctctgataatctgctgtttatcatgatcgccagcgtgtcattcatctatctgctgacgctgctgcgcaaagcgggccaccatcctacgccggtggcgcacgcctga

SEQ ID NO: 173894 - DNA, 471 bp, Klebsiella oxytoca
atggcggtcggctcgcgcataaaaggaatgtgtatggaagagacgctgttttccgcctgtcagttcaccagccactgcctgaactggcgcagcgctgttcagctcgcctgctgcccgctagagcaacaggggaaaattaccgccgggtatgccggtgcgattatccacgccacagagcaggatggcccctggtatatactgagcccgggatttgcgctaccgcatgcgcgtccggaagcgggcgtgctgagcaaaaatagcgcgctttcgctgctttgctgtagcgaaaccgttgattttccggatcatcccggaattcggctgatagtcatactggcggcggcagatagcgaacagcatattcagacgatccagcggttagtctgctggctggatgagggggatagacttcagcgattcagcacggtgcaaagccagaccgagtttgccgcgcttcttgcttcgcattaa

SEQ ID NO: 173895 - DNA, 912 bp, Klebsiella oxytoca
atgaaagcaccccgtgatgagatcggtaaagccctgattgcgctaaaagaaaaaggctatcccgtcgttgttatcgacagtgatttagccagctctacccgtactgaccagtttcaggccatctatcctgaggcctttttcgaaatgggcattgcggaaggctccgccatgagtttcgcggtcggccaggcgctggaaggctttatgccgttctatgttaactttgccatgttcgtcaccggcaccgcctggacccagctgcggcaggcctgctacgccaaagccaatattaaactcgtcggtagccatcccggtatggatgatggacctgacggcgcttcgcatcatgcgctggaggatttagcgctgacccgcgtccttccggggttaaccgtcctgacgccagcagatgcggaagaaatcgccgaggccttcgagcaggcggcaaaaataaaggggcccgtttatatccgcgttgcccgcgaaccgatgccggttcgcgataaaagcgtcgtgccgcgggtgagcgatatcgccgccatcgccgatagcggcaatgattttgcgattctttttgaagggacggttctggagcaggccaccgagggttatgaaaagttggtcgccagcggcaaaaagggcaagctgattcacgtcgcaacccttaagccctttaatcagcaagaattttatcggctggttaatgattgcccacttatcgctacgcttgaaaatcataccgtcaacggcggcctcggcgggctgatcgcggaaaccctggcgcaaaaggcgcatccggcgcgccttacgcggttgggaacgcaggatacatttaccgaatcgggtaacagcagacagctaaaagcgaaatacggcatttcgggagaagcgctgtttaatgctctacgctaa

SEQ ID NO: 173896 - DNA, 798 bp, Klebsiella oxytoca
atgaacattgatgaactgaaatcccatgcgcttgccgctcgccgcgagatagtcaccatgatttacgaatccgggattggccatccgggtggggcattgtcgataatcgacattcttacctggctctattatcaggaagtcgatctgcaagcctccccgcgctcgcgcgtggtgatgagtaaaggccacgccgtcgccgcgcagtacgccatgctctatcaaaaaggaaagatcgatcgcagcgagttccatacgttccggcagatcaactcgcgcctgcagggacacccaagcattaaatcactaccggaggtcgatgccacaaccggtctgctgggtcaggggctgtcgattgcttttggtatggcggctgccaaaaagcggcgcaacgatccgcaccgggtctttgccatcgttggcgatggcgaaatgcatgaaggccaaatctgggaaaccttacagcaggctggtcacatgaaaatggataatctggtcgccatcttcgattacaacggcttctcctcccacgaccccgttaatgaagtcgttaatctcgagccgctggcggacaaaatccgcagctttggctggcatgtactggagctgcacgatggcaatgatatgcatcaggttgccgataccctgatgctatcccgccatctgaaaggcaagccggtcgccatcgtggcgcacacgacgaaaggttccggcgtcagctatatggaaaacaacggcgactggcactcaaaaaccccgagcaaagaacaatttcagcaggcaatggaggagttacagtga

SEQ ID NO: 173897 - DNA, 1266 bp, Klebsiella oxytoca
atggatttcctcagatttattgtattcgacattctgggcgtaaccccacttttagttggctttattgcattaatcggcctgttaatccaacgcaagccgattgaaaaagtgctttccggcacttttaaaaccatcgtcggctttctggtattcgccggcggcgctggtctggcggtgacttccctgggtaactttcagaccttattcagcgatggttttggcctgaagggcgtaatgccgctggctgaagcgctaaccggactggcgcaaaccaaattcgccatgtgcgtttcgctgattatggtgattggttttgcctggaacctgttctttgcccgcgtgacgccgtttaaatacatctttcttaccgggcaacataacctgtatctctccgcgctgcttaccgtgacgctaaaggcgctgggctacagcgacatgacgaccattattgtcggctcggtgctgctggggctcgccgcctgcctctatccggctattgcgcaaccgtggatgcgaaaaattaccggtaacgatgagatcgccatggggcactacgtcacgctggcctatgccgcctccggctggatcggttctaaagtcggcgatcctaaacaatctaccgaaaagctgaatctccccggttggctggggatcttcaaagattacattgtttcagtatcgatctcggtgagtattttctattacatcgccgcgctcgcggccggaaaagctgcggtcaccgcagcggccggcggcatgcactggctggtttacccgctctttcagtcgctgacctttaccgcttctctgtacatcatcattaccggcgtgcgcctgctgctgtcagaaattgttccggcctttctcggcatctcggagaagtttattcctaatgccaaacccgcgctcgactgcccggtcgtctttccctacgctccaaccgccacggttctcggatttatctcgtcttttgtcggcgggctggtggtgatgggtttgctggcgatcctcggacaaaccgtcattatcccggtagctattccctacttcttcatcggcgccaccgctgcggtatttggtaatgcctccggcggctggaaaggcgcgattgccggaagcttcatcaccgggatcctgatcggtattggccctgcgctgatttacccgattatggagtccgtcggtctttcaggcaccagcttcccggaaactgacttcgttgccctgggtctggtcgtgtactacatcggtaaaatgctgccctaa

SEQ ID NO: 173898 - DNA, 276 bp, Klebsiella oxytoca
atgaaaggtctcatagtctgtcgtaccggtatgggcagctccttaatgctcaaaataaaagcacaaaaaatcatcgacaaacacggctgggatatcgagctggaacacgacgtcctctcaggcttacgcacctggcgagatattgattttgtcatcactatgcgcgatctcaccgatgaagtcgaagccgccggattcagagctgtcggcatcaccgacctgatgaacagtgaagagatggaatctgcgctcaccgacatcgttcaaagcaactaa

SEQ ID NO: 173899 - DNA, 858 bp, Klebsiella oxytoca
atgagccagatagacaataacttgttgataagcataagaaatggagcttcagggctaagcccgatactggagaaagttggccgttttattacggaaaatcctgactttgtgatgcgtcacacgatttcagaactggccgactccattgataccagtgaagggagtatcacccgtttttgtcgggcattcggatttaaaggtttctcggatttcagaaccgcgctggcgatggagcagggcgccgcgcgctcggaagacaacggtatcaacgagaacgaagagattgcgccggtgctggcgagcattcgcgacagtaatgctatcgtggataaccaggagctgaaagccgcagctgactggcttaacgccctgaacagcattgctatctatgccgtgggcacggcagtgccggtcgcgttattcctgcaaatgaatttaatcaatatgggtaaggcggccagctttgtcgatcgctcttatccggcggcgatgccgttgctggctgataaccaaaaaaccggcattatcgtcgtgcatactgaacaggcctcggcggatatgatgcagtccctgtccctggcaaagcagcagggtgtgaaaatattgtcgctgacgcgggggacgttcgcgccgttagcccgcttatctgactggaatcttcaggcggcggtggctttacagggggagggggagtcaggatttgcggaaattgccggcgccatgatggtggccgaccggatcctcagcgcgctggaagagcaggatgaacgctatgcggaataccgtaaagcgcatcagaagcgcattttctctattgaaagcgtggcaaataagctgtcggaatactttatgtcctga

SEQ ID NO: 173900 - DNA, 741 bp, Klebsiella oxytoca
atgtcaacaattggtcgcattcactcctttgaatcctgtggcaccgtcgatggcccggggatccgctttatcactttcttccagggctgcctgatgcgctgcctctattgccacaaccgcgatacctgggatacccacggcggtaaagagattaccgttgaagagctgatgaaagaggtggtgacctatcgccactttatgaacgcttctggcggcggcgtaacggcatccggcggcgaagccattctgcaggccgaatttgttcgcgactggttccgcgcctgtaagaaagaaggtattcatacctgtctcgacactaacggctttgtgcgccgttacgatccggttatcgatgaactgcttgaagtgaccgatctggtgatgctcgatctcaagcaaatgaatgatgaaattcaccagaacctggttggcgtctctaaccatcggacgctggagtttgcccgctatctgtcaaataaaaacatcaaagtctggatccgctacgtggtggtccctggctggtccgacgatgatgattccgcgcatcgcctgggcgagtttacccgcgatatgggcaacgtcgagaaaattgaactgctgccgtatcatgagctgggcaaacataaatgggtggccatgggcgaagagtacaagctggatggcgtccatccgcctaaaaaagagaccatggaacgcgtgaagggaattctggaacagtacggtcataaagtgatgtactaa

SEQ ID NO: 173901 - DNA, 2283 bp, Klebsiella oxytoca
atgtccgagcttaatgaaaagttagccacagcctgggaaggttttgcgaaaggtgactggcagaacgaagtcaacgtccgcgacttcatccagaaaaactataccccgtacgaaggtgacgagtccttcctggctggcgcaactgaagcgaccaccaagctgtgggacaccgtaatggaaggcgttaaacaggaaaaccgcactcacgcgcctgttgattttgatacttcccttgcgtccaccatcacctctcatgacgctggctacatcgagaaaggtctcgagaaaatcgttggtctgcagactgaagcgccgctgaaacgtgcgattatcccgttcggtggtatcaaaatggtagaaggctcctgcaaagcgtacaatcgcgagctggacccaatgctgaagaaaatcttcactgaataccgtaaaacccacaaccagggcgtgtttgacgtttacaccaaagacatcctgaactgccgtaaatctggcgttctgaccggtctgccggatgcctatggtcgtggtcgtatcatcggtgactaccgtcgcgttgcgctgtacggtatcgacttcctgatgaaagacaaatacgctcagttcgtctctctgcaagacaaactggaaagcggtgaagatctggaagcaaccatccgtctgcgtgaagaaatctctgagcagcaccgtgcgctgggtcagatcaaagaaatggcggctaaatatggctgcgatatctctggtcctgctaccaccgctcaggaagctatccagtggacctactttggttacctggctgccgttaaatctcagaacggcgcggcaatgtccttcggtcgtacctccagcttcctggacatcttcatcgaacgtgacctgaaagccggtaaaatcaccgagcaagacgctcaggaaatgattgaccacctggtcatgaaactgcgtatggttcgtttcctgcgtactccagaatatgatgaactgttctccggtgacccgatttgggcaactgaatccatcggcggtatgggcgttgacggccgtactctggtaaccaaaaacagcttccgtttcctgaacaccctgtacaccatggggccgtctccggagccgaacatcaccattctgtggtctgaaaaactgccgctgagcttcaaaaaattcgctgcaaaagtgtccatcgatacctcttctctgcagtatgagaacgatgacctgatgcgcccagacttcaacaacgatgactacgctatcgcttgctgcgtaagcccgatggttgttggtaagcaaatgcagttcttcggtgctcgcgctaacctcgcgaaaaccatgctgtacgcaatcaacggcggcgttgatgaaaaactgaaaatgcaggttggtcctaaatctgaaccgatcaaaggcgacgttctgaacttcgatgaagtgatggaccgcatggatcacttcatggactggctggctaaacagtacgtcactgcgctgaacatcatccactacatgcacgacaagtacagctacgaagcctccctgatggcgctgcacgaccgtgatgttatccgcactatggcatgtggtatcgcaggtctgtccgttgctgctgactccctgtctgcaatcaaatatgcgaaagttaaaccgattcgtgatgaaaacggtctggctgtcgacttcgaaatcgaaggcgaatacccgcagtttggtaacaacgactctcgcgtcgatgatatggccgttgacctggttgaacgtttcatgaagaaaattcagaaactgcacacctaccgtaacgctatcccgactcagtccgttctgaccatcacctctaacgttgtgtatggtaagaaaactggtaacaccccagacggtcgtcgcgctggcgctccgttcggaccaggtgctaacccgatgcacggccgtgaccagaaaggtgcagttgcctctctgacctccgttgctaaactgccgtttgcttacgcgaaagatggtatctcttataccttctctatcgttccgaacgcgctgggtaaagacgacgaagttcgtaaaactaacctcgcaggcctgatggatggttacttccaccacgaagcatccatcgaaggcggtcagcacctgaacgtcaacgtcatgaaccgcgaaatgctgctcgacgcgatggaaaacccggaaaaatatccgcagctgaccatccgcgtatccggttatgcagtacgttttaactccctgactaaagaacagcagcaggacgttattactcgtaccttcactcagaccatgtaa

SEQ ID NO: 173902 - DNA, 858 bp, Klebsiella oxytoca
gtgaaagctgacaacccttttgatcttttactccctgctgccatggcgaaagtcgccgaagaagcaggtgtctataaagcgacaaaacatccgataaagacgttttatctggctatcaccgcaggtgtcttcatctctatcgcttttgttttctatattaccgcgacaaccggcacggccgggatgccattcggggttgccaaactgattggaggcatttgcttctcactgggtttgattctctgcgttatatgcggtgccgacctgtttacttcaaccgttcttatcgttgtggcgaaagccagcggaagaataacatggggtcagctggctaaaaactggctaaacgtctatgttggtaacctggttggttgcttactctttgtattgctgatgtggctttcaggcgaatatatgactgccaacggtcaatggggacttaacgttctgcaaaccgccgaccacaaaatgcaccatacttttattgaagctgtgtgcctgggtatcctggcaaacctgatggtctgccttgcggtatggatgagctactccggccgtagcctgatggataaagccatgattatggttttaccggtggcaatgtttgttgccagcgggtttgagcacagtatcgcgaacatgtttatgatcccgctgggtatcgtcattcgcgactttgcgagcccggaattctggaccgcagttggttcaactccggaaagtttctctcacctgaccgtcatgaacttcatcactgataacctgattccggtaacaatcgggaacatcatcggcggtggtctgctggttgggttgacatactgggtcatttacctgcgtggcgacaaccatcactaa

SEQ ID NO: 173903 - DNA, 1761 bp, Klebsiella oxytoca
atgactcaaacgtttattcccggcaaagatgccgccctggaagattccatcgctcgcttccagcagaagttgcacgacctcggatttgatattgaagaggcctcatggctcaacccggtaccgcacgtctggtcagtgcatatccgcgataaagagtgcgccctgtgcttcaccaacggcaaaggcgccaccaaaaaagccgcgctggcctcggcccttggagagtactttgagcgtctctcgactaactatttttttgccgacttctggctgggcgagaccatcgccaacgcgcctttcgttcactatccgaatgaaaaatggttccctttaaccgacgatgacgaagtaccggaaggcctgctggatgcccgcctgcgcgcgttctacgatcctgacgatcagttaaccgccagcatgctggtcgatctgcagtctggtaatgacgatcgcggcgtctgcggtttgccgttcacccgtcagtcagatggcgaaacggtctatattccgatgaatatcatcggcaacctctacgtttctaacggaatgtccgcgggcaacacccgcaacgaagcccgcgttcagggcctctcggaagtgttcgaacgccatattaaaaaccgcattatcgctgaaagtatcagcctcccggagatcccggcggaggtgatggcgcgctatccgggcgtggttgaatccatcaacaagctggaggccgaaggtttcccgattttcgcttatgacggttcgctcggcggcaaatatccggttatctgcgttgtgctgtttaaccccgcaaacggcacctgtttcgcctcgtttggcgcgcatcctgatttcggcgtggcgctggaacgtaccgttaccgaactgctgcagggccgcagcctgaaagatctcgacgtcttcacgccgccaacctttgatgatgaagaagtcgccgaacatgcgaatcttgaaacgcactttatcgattccagcggcctgatctcctgggatatgtttaagcaggatgccgactacccgttcgtggactggagcttctccggcaccacggaggaagagttcgccaccctgatggctatctttaaacaagaagataaagaagtttacatcgccgattacgaacaccttagcgtctacgcctgccggataattgttccgggcatgtctgatatctatccggcggaagacctctggctggcgaataacagcatgggcgcacctctgcgggaaacgattctttctctgccggaaagcgaatgggaaaaagaagattatctggcgcttatcgagcaaatggatgatgaaggccttgatgatttcacccgtgtgcgcgaactgctcggtctggcgaccggtaaagacaacggctggtatacgctgcgcattggcgagctaaaagcaatgctggcgctggcgggcggcgatctcgagcaggccttgatctggaccgagtggaccatggaatttaatgcctcaatctttagcgccgaacgcgctaattactaccgctgcctgcaaactctgctgctgctgagccaggaagaggaacgtcagccactgcagtatctcaacgctttcgtacgcatgtacggcgccgatgccgttgaagccgccagcgccgcgcttagcggagaagcaccgttctatgggctgcaggcagtagacagcgatctgctcgctttcccggctcaccagtcgctactgaaagcctacgaaaagctacagcgcgcaaaagctgtattctggggtaaataa

SEQ ID NO: 173904 - DNA, 693 bp, Klebsiella oxytoca
atgaagacatttgactggcatcgtatggcactggataaagtgcccgtggagtttctggccgaggtggcactgcgtagcctctataccttcgtcctggtatttatttttcttaagataaccgggcggcgtggcgttcgacagatgtctcttttcgaagtcctcatcattttgaccctcggttcggcggcaggggacgtcgcgttttatgatgatgttcccatgctgccggtactggcggtatttattaccctggctctgctgtatcgattgattatgtggctgatggggcatagcgaaaaactggaggacttgctggaaggtaagccgattattgttgtggagaacggcgaactggcctgggagaaactgcaggcggaaaatatgaccgaattcgagttttttatggaactgagaatcagcggggttgagcaactgggtcaggtacggctggccattctggaaaccaacggccagatcagcctttattactatgaggatgaagatgttaaagccgggctttccattttgccttcccgttttaccgatcgttttatcaccatacctcacgatgatgagtacgcctgcgttcgctgtagcgcaatccttacgctacgagctggggataaacaattatgccctcgctgcgcaaatgcagaatggtcgaaggtcagtcgggcaaaaagagtcacctga

SEQ ID NO: 173905 - DNA, 1089 bp, Klebsiella oxytoca
atggctcaggtctataacttcagttcaggcccggcaatgctgccggcggatgtactcaaactggcgcaaaaggagctttgcgactggaacggtttggggacgtcggtgatggaaatcagccaccgtggtaaagagttcatcaaggtggctgaagaggcggaacaggattttcgctccctgctcaatattccttccaattacaaagtcttattttgtcacggcggcggtcgcggacagtttgctggtatcccgctgaacctgctgggtgataaaaccgttgccgactacgttgatgccggctactgggcagccagcgcggttaaagaagcgcataaatactgcaaaccgaacgtgattgacgccaaaatcaccgttgacggccagcgcgcggttaaaccgatgagcgaatggcagctgactccgggcgcggcctatctgcactactgcccgaacgaaactatcgatggtattgccattgaagaaacgcctgattttggcgacgatgtcatcgtgacggcggatttctcctcgactattttgtctcgtgaaattgatgtaagccgttatggcgtaatctacgcaggcgcgcagaaaaacatcggtcctgcaggtttgacgctgattattgtgcgtgaagatctgctgggtaaagccagcatagcctgcccgtcgattcttgattactccatcctgtcggccaatgactctatgtttaacacgccgccgacgtttgcctggtacctctccggcctggtgtttaagtggctgaaagagcagggcggcgttgccgctatggataaaatcaaccagcagaaagccgacctgttgtatagcaccatcgataacagtggtttctatcgcaacgatgtcgctgcggcgaaccgttcgcgcatgaacgtgccgttccagttggccgatagcgcgcttgataaactgttcctcgaagagtcgtttgccgctggtctgcatgcgctgaagggccaccgcgtagtgggaggcatgcgcgcttccatttataacgccatgccgctggcgggcgtgaaggcgctgaccgactttatgcaggacttcgaacgccgtcacggctaa

SEQ ID NO: 173906 - DNA, 1284 bp, Klebsiella oxytoca
atggaatccctgacgttacaacccatcgcacgcgtagatggcacaattaacctgcccgggtccaagagtgtttctaaccgtgctttgctactggcggcattggcccgcggcacgacggtgctgaccaatttgctggatagcgacgatgtacgccacatgctgaatgccctgagcgcgctgggagttcattacaccctgtcttccgaccgtacccgctgtgaagtcaccggtaacgccggcccactgcacgcggctgaagcattagaactgttcctcggtaatgccggaacggccatgcgtccgctggcggcggcgttatgtctggggagtaacgatattgtgctgaccggcgagccgcgaatgaaagagcggccgattggtcacctggttgacgcgctgcgtcagggcggggcgcagattgattatctggagcaggagaattacccgccgctgcgcctgcgcggtggtttcagcggtggacaggttgaagtggacggcagcgtttccagccagtttctgaccgcgctcctgatgaccgccccgctggcgcctcaggataccgtcattgcgattaaaggcgatctggtatccaaaccttatattgatattacgctgcacctgatgaaaacctttggcgttgaggttgaaaatcagtcttatcagcgatttatcgtgcgcggcaatcaacactaccgctcgccgggcgattatctggttgaaggcgacgcctcctcggcatcctacttcctcgccgccggagcaattaaaggcgggacggtaaaagtcaccggtattggccgcaatagcgtgcagggcgacattcggtttgccgatgtgctggaaaaaatgggcgcaaccattacctggggcgatgattatatcgcctgcacgcgcggcgaactgaacgccatcgatatggatatgaatcatatcccggatgccgcgatgactatcgccacggccgccctgttcgccaaaggcaccacgactctgcgcaatatttataactggcgcgtcaaggagactgaccgcctgtttgctatggccactgagctgcgtaaagtgggagctgaagttgaagaaggggaggatttcatccgcatcactccgcctgctaagctccagttcgctgaaatcggcacctataacgaccatcgtatggcaatgtgtttctcgctggtggcgctttccgatacgccggtcaccatccttgatccgaagtgtacggcaaaaactttcccggactacttcgaacagctggcgcgaatcagtacgctggcctga

SEQ ID NO: 173907 - DNA, 768 bp, Klebsiella oxytoca
atgagaaatacaaaagtaatgctggctttagcggtttccgccacgttgttggcaggttgtaaaaatatgcagggggtggacaccaacgccctcgtaagttcagggatgacggcctacaaagcggcaacgctttctgactctgaagtcaaagcgctttccgacgatgcctgtaagcaaatggatagcgaaaataaaaaggccggcgcttcaagtaagtacaccaagcgtctgaataaaattgccaaagcgttaggtaataatatcaacggcaccccggtaaactataaggtttacatgacatcagacgtcaacgcctgggcaatggccaacggctgcgtccgcgtctatagcggcctgatggacatgatgaccgataatgaagttgaagcggttctgggccatgagttgggccacgtagcgctgggacattcgcgcaaagcgatgcaaaccgcctatgcgaccattgccgcgcgtgatgcaatttcagccaccagcggagcggctgcaagtttgtctaaatctcagttgggcgatatcgcagagggaatgattaactccgctttctcccgctctcaagagtccgatgctgatgatttctcctacgatctgctgaaaaagcgcaacatcagcactcaggggctggtgggcagcttcgacaaactggccagccttgacgccggccacagtaaatctctgttcgattcacacccgccttcagctgaacgcgcgcagcatatccgcgaccgtatcgcggaagataaaaagtaa

SEQ ID NO: 173908 - DNA, 684 bp, Klebsiella oxytoca
atgacggcaacagttccggtaatcaccattgatgggcctggcggtgcgggcaaaggcacgttatgcaaggcaatggcagaaacgctgggctggcatctgctggattctggggcgatttatcgcgttcttgctctcgctgcgctgcatcaccatgttgatgttgaatccgaagaggcgctggtgccgctggccgcgcatcttgatgtccgttttgtctccactgatggtagcctggaagtcattctggagggggaggacgttagcgcggaaatccgcactcaggatgtggccaatacggcctctaaagtcgccgcttttccgcgcgtgcgcgaggcattgctgcgccgtcaacgagccttccgtgagctgcccggtttgatcgctgacggacgcgatatgggaaccgtggtattccccgatgcgccggtgaaaattttccttgacgcttccgcggaagaacgtgcgcatcgccgcatgcttcagttgcaggagaagggctttagtgttaactttgatcgccttttatccgagataaaagagcgcgacgaccgcgatcgcaatcgtacagtggcgccgcttatcccggctgccgatgccttagttcttgattccacagaactaaacattgagcaagtgattgaaaaagcgctacaatatgcgcgcgaaaaactggcttccgcttaa

SEQ ID NO: 173909 - DNA, 1674 bp, Klebsiella oxytoca
atgactgaatcttttgctcaactatttgaagaatccttaaaaacaatcgaaacccgtccgggttccatcgttcgtggtgttgttgttgctatcgacaaagacgtagtactggttgacgccggtctgaaatctgagtctgccattccggcagagcagttcaaaaacgcccagggcgagctggaaatccaggttggtgacgaagttgacgttgctctggatgcagtagaagacggcttcggtgaaaccctgctgtcccgtgagaaagctaaacgtcacgaagcttggatcacgctggaaaaagcttacgaagacgctgaaactgtagtcggtattatcaacggcaaagttaaaggtggcttcactgttgagctgaatggtattcgtgcgttcctgccgggctccctggtagacgttcgtccggtgcgcgacacgctgcacctggaaggcaaagagcttgaattcaaagtcatcaagctggaccagaaacgtaacaacgtcgttgtttctcgtcgtgccgttatcgaatccgaaaacagcgcagagcgcgatcagctgctggaaaacctgcaggaaggcatggaagttaaaggtatcgttaagaacctcactgactacggtgcattcgttgatctgggcggcgttgacggcctgctgcacattaccgatatggcatggaaacgcgttaagcatccgagcgaaatcgtaaacgttggcgacgaaatcactgttaaagtgctgaagttcgaccgcgaacgtactcgtgtatctctgggcctgaaacagctgggcgaagatccgtgggtagctatcgctaaacgttatccggaaggtaccaaactgaccggtcgcgtgaccaacctgaccgactacggctgcttcgttgaaatcgaagaaggcgttgaaggcctggttcacgtttccgaaatggattggaccaacaaaaacatccacccgtccaaagttgttaacgttggcgatgtagtggaagttatggttctggatatcgacgaagaacgtcgtcgtatctccctgggcctgaagcagtgcaaaaacaacccatggcagcagttcgcggaaacccacaacaagggcgaccgtgttgaaggtaaaatcaagtctatcactgacttcggtatcttcatcggcctggacggcggcatcgatggcctggttcacctgtctgacatctcctggaacgttgcaggcgaagaagcagttcgtgaatacaaaaaaggcgacgaaatcgcagcagttgttctgcaggttgacgcagagcgcgagcgtatctctctgggcgttaaacagcttgcagaagatccgttcaacaactgggttgcactgaacaagaaaggcgcaatcgtaaacggtaaagtgactgcagttgacgctaaaggcgcaaccgtagaactggctgacggcgttgaaggttacctgcgcgcttctgaagcttcccgtgaccgcgttgaagatgccaccctggttctgagcgtaggcgacgacgttgaagctaaattcaccggcgttgatcgtaagaaccgtgcaatcagcctgtctgttcgtgcgaaagacgaagctgatgagaaagatgccatcgcaactgttaacaaacaggaagatgcaaacttctccaacaacgcaatggctgaagctttcaaagcagctaaaggcgagtaa

SEQ ID NO: 173910 - DNA, 288 bp, Klebsiella oxytoca
atgaccaagtcagaattgatagaaagacttgccagccagcaatctcacattcctgcgaaagcagtggaagatgctgttaaagaaatgctggagcatatggcctcaacgcttgctcaaggcgagcgcattgaaatccgcggtttcggcagcttctctctgcattatcgagcaccccgcaccgggcgtaacccaaaaactggcgataaagttgaactggaaggtaagtacgttccccactttaagccgggcaaagaattacgcgaccgcgccaatatttacgaagagtaa

SEQ ID NO: 173911 - DNA, 2265 bp, Klebsiella oxytoca
atgcgtttaccacaacttgctggctgtgtgattatcggcattctgccgctgctctggttgcccgatttgcccgagcgttcggttacctggggactgatgctgctggcgctgcttattgcgcaatgtcgccgtagagctgcgcattacgcggcattgataacgctgttttttgtctggggagtactcagcgcccgccaggccctgtggccgacacatacgttaacaaacgggaatcgtcaggttgaggttatgctgaccgcaacagatggtcagacaactcatcagggcagaattgtccgtctggatgggcgacggctatttcccgcgccaggggtaagcctctacggtaattatttgcctgaaccgccctgtgcagggcaggtttgggccatgacgctacgcgcgcgtccggtacatagtcagctcaacgaaggcgggtttgacagccagcgctatgcgctatcacagcatcgtccgttaaccggacgctttatcagcgctgaagttcgcgagcgaaactgtagtgtacgagcgcgttatctggcctcgctcaatcaaaccctggcggaactgccctggcaatcggtgatgctggggttaggcatgggggaacgtctggcgatccctcgcgagataaagatcctgatgcaggaaaccggtacatcgcatctgatggcgatctcagggttacatatcgcgttaggagccactctgggctggttgctgctaaggggtttgcagttctttcttccgtgccgttggctgggctggcgggcgcccctgcttactggcctggcgagtgctattttttacgcctggctaaccggaatgcagccgcccgcgctgcgcacctgtgttgccctgatcgttggctgcgcgctgcggctatccgggaaacgctggtcgccatggcaactatggctctgctgcattggtgcaatactgtttgccgatccgctggcagcgttgtcagaaagcctctggctatcggcgtttgccgttgcggcgcttatcttctggtatcagctggccccgatgcctggcggtaaaaggtgctggctgctgcgccaaagcctcgcgttatgccatctgcagatcggcttgatgtttttacttgcacctttacagattgctctcttccacggcatcagcttaacgtcggtgctggcgaatttgattgccgtgcctctggtgacttttatcgttgttccgctgattctgaccgccatgtttttacacctctgtgctccgctcaccattgagatggtgatatggcaatcagcagaccgtatcctggcggcgctattcgggttcctgcggcagctgccgcccggctggctcgagctggatgctcgctggcttgggataagcctgctgccgtggccggcgttaattctctggcgttttcatgcgtggcgcacgttgccggcgttttgtttagcatgtctcgggctattaagctggccattctggcggagtacggctaccaacgaatggcgagtcaccatgctggatgtcgggcaggggctggctatggtgattgaacgccacggcgcggcccttctctacgataccggactcgcctggcctgagggtgacagcggtgagcagattatcatcccctggctacgctggcatcacttgcatctggaaggcgtcgttctcagccacgagcatctcgatcaccgcgggggactcaactcggtgttaaaagcatggcctcaaatatggatacgaagccctctaggctgggcgggccatttagcatgtcagcgcggagagatctggctgtggcgaggtttaacctttcgtgcgttctggccgctgcccggcgcgacaaagcaggggaataatcgctcatgcgtggtgcgtgttgatgacggcaagcacagtatcctgctcaccggggatatcgaaacgcccgcggagcaagcgatgattagccactactggcaacatcttgcgtctacacttatccaggttccccatcacggcagtaatacgtcgtccggaaccgccctgttgcgcagcgttggcggggaggctgcgctagcttctgcttcccgctataacgcatggcgtatgccctcaaccaaggtgaaacagcgctatcgaaaccagaattatcagtggttcgacacgccgcatcaggggcaaattacggttattttttccgcggatggctggcaaatccatagcttacgggatcaagttttaccgcgatggtatcatcagtggtttggcgggaacgttcagaacgggtag

SEQ ID NO: 173912 - DNA, 1749 bp, Klebsiella oxytoca
atgcagaacgataaagatctttccacgtggcagaccttccgccgactctggccgattatagcgccgtttaaacccgggctaatcgttgcagcggtagcgttagtgcttaacgcggctagtgataccttcatgctatcgcttcttaaaccgttactggatgatggttttggtaaaacggatcgctcggtgctgatatggatgccgctggtggtgatcggattgatggttctgcgcggcatcaccagctacgtttcgagctactgcatctcgtgggtgtccggcaaagtcgtgatgacgatgcgccgtcgtttattcagccacatgatgggaatgccggttgcattctttgacaagcagtccaccgggacgctgctatcacgtattacctatgattcggagcaggtggcctcttcctcctccagtgcgttgattaccgtcgtgcgtgaaggcgcgtcgattattggcctgtttgcgatgatgttttattacagctggcagctgtcattgattctgatcgttctggcgccgatcgtgtctattgctattcgcgtggtctcgaagcgttttcgtaatatcagcaagaatatgcagaacaccatgggccaggtgacgaccagtgcagagcagatgctgaaagggcataaagaagtgctgatgtttggcggtcaggccgtcgaaaccaagcgctttgataaagtcagcaacaagatgcgtctgcaggggatgaaaatggtctccgcgtcctcaatttctgaccctattatccagctaatcgcctccctggctctggctttcgtactttatgcggcaagcttcccgagcgtaatggagacgttaacggctggtacaattaccgttgtcttctcctcaatgatcgcgctgatgcgtccgctaaaatcgctgactaacgtcaacgcacagttccagcgcgggatggccgcttgtcagacgcttttcgctattcttgactccgagcaggagaaagatgaaggcacgcgggttatcgaacgtgcgaagggcaacctcgaatttaaaaacgttaccttcagatatccggggcgtgaagtcgctgcgttgcgcaatattgacctcaatattccggaagggaaaaccgtggcgctggtagggcgctcagggtcaggtaaatctaccatcgccagcctgattacgcgtttttatgatgttgatgaggggcagatcttgctggacggccacgacctgcgtgaatacacgctgagctctctgcgcgatcaggttgcgctggtgtcgcaaaacgtccatctctttaacgacaccgtggcgaataatatcgcctatgcccgaaccgaagagtacagccgcgagcagattgaagaagcggctcgcatggcttatgccatggactttatcaataaaatggacaatggcctggatacgattatcggtgaaaacggcgttatgctttccggcggccagcgccagcgcatcgctatcgctcgcgccctgctgcgcaacagcccgattctgatccttgatgaagcaacttcggcgctggataccgaatcagagcgcgccattcaggcggcgctggacgaactgcagaaaaaccgcacctcgctggttattgctcaccgtctctcgacgattgagcaggctgacgaaattgtggtagtggaagatggccagatcgttgaacgcggcagccatgccgatctgcttgaacataagggcgtttacgctcagctgcataagatgcagttcggcgcatga

SEQ ID NO: 173913 - DNA, 981 bp, Klebsiella oxytoca
atgattgcgcgcatctggtccggcgaatcgcctttatggcggctactgcttccgctctcctggctctatggcctggtgagcggattaatacggctaagctataaactgggatggcgaaaagtgtggcgagcgccggtgccggtagtggtggttggcaatctgaccgccggcggcaatggtaaaacgccggttgttgtctggctggtggaacagcttcagcagcgcggtattcgcgtcggcgtggtgtcacgcggctacggcggaaaagccgcgagctatccgctgctgcttaatgtggatacgcataccggggaagcgggcgatgagccggtgctgatttatcagcgtaccggcgcgccggttgccgtctcgccggtacgcagcgatgcggttcaggcgctgctcgctgccaacgatcttcagcttatcgtcacggatgatggtctgcagcactataagctggcgcgtgacaaagagattgtggtgattgacggcgtacgtcgttttggtaatggctggtggttgcctgcgggtcctatgcgcgagcgcgcttcgcgtttgcgcagcgtggatgcggttatcgttaatggcggtctcgcccgcccgggagagatacctatgcagcttcgtcccgggctggcggtgaatctgctgaccggtgaacgccgggatgcggcggcgttggacaacgtggtggcgatggcaggaatcggccatccgccgcgtttcttcgccaccctcgagagctgcggcgtacgtccggtgaaaaccatctccctggccgatcatcaggctctgtcgcagagcgatgtcgccgcgctggcggcgccgcagcaaactctgctgatgaccgaaaaggatgcggtgaagtgccgcgactttgcgcaggcaaactggtggtatctaccggtcgacgcgataatgactgaccagcgcgcacagcggctgctcacggatttagtgacgctggcgcagcgctaa

SEQ ID NO: 173914 - DNA, 1230 bp, Klebsiella oxytoca
atgccggtattgtccctctcgcttaaagaagctcgccatcttcacctggccgcgcaggggctgctgaaaaagccccgccgtcgcgccaaacccgaggatgttctgcaaaccattaagcagatgtccctgctgcaaatcgataccatcaacgttgttgcccgcagcccttatctggtgcttttcagccgccttggccactatccgcagcgctggctggatgaggcgcttcgcgccggtgaactgatggaatactgggcgcatgaggcctgtttcttaccgcgcagcgacttttcactggtgcgtcaccgtatgctgacgccggataaaatgggctggaaataccatatcgcatggatgaccgagcacgctccggccattcaggaactgctggcccatattgccgaaaatggcccggttcgctcggcagactttgaacatccgcgtaagggcgccagcggatggtgggaatggaaaccgcataagcgccatcttgaaggtttatttaccgctggagagctgatggttatcgagcggcgcaactttcagcgcgtttacgatctcacgcagcgggtcatgccggactgggaggatgagcgggatggcctctctcaggagcaggccgaagccattatgttacgcaatagcgcacgcagcctcgggatcttccgggcgcagtggctggcggattattatcgtctacgtcggccctcgctacccccactgctggcgagctggcaggatgaggggctggtgaaaccggtaaacgttgaaaccctgggggaaatgtggcttcaccgtgatgcgctaaagctgctggagtcctcacccggcggcaggctcgccgccagccacagcgcggtgctctcgcctttcgatccggtggtgtgggatcgcaagcgggctgagcagctatttaacttcacctatcgcctggagtgctatacgcccgcgccgaaacgtcagtatggctatttcgtattaccgctgctgcatcaggggaagctggtgggcagaatggatagcaaaatgcatcgtaaaaccggcgttctggaaattatcgctctgtggctggaggagggggtcaaggtgacctcgggactcgagagcgggctaaaacgcgccattgatgattttgccctctggcagggggcaacacgggtgagctgcgggaagctgccggcggaactttttgccgggcggcaacagggttgggaaattgacgccgcctga

SEQ ID NO: 173915 - DNA, 183 bp, Klebsiella oxytoca
atggatcaccgtttacttgaaattatcgcctgtccggtttgtaacggtaagctctattacagccaggataagcaagaactgatctgcaaactcgatagcctggcttttccgctgcgtgaaggtatccccgtactgctggaaaccgaagcccgcgcgcttgctgtagaagagagccagtcatga

SEQ ID NO: 173916 - DNA, 747 bp, Klebsiella oxytoca
atgagtttcgtggttatcatccccgcgcgcttcgcttctactcgtctgccaggcaaaccgctccaggatatcaacggcaagccgatgattgtccacgtccttgagcgagcccgtgaatccggggccgagcgtattatcgttgccaccgatcatgcagacgtagcccgagcggttgaagccgccggcggtgaagtctgcatgacgcgtgaagatcatcagtctggcaccgagcgcctggccgaggtggttgaaaaatgcgctttcagcgatgacaccatcattgtgaatatccagggcgatgagccgatgatcccgcccgccatcgtgcgccaggtagccgagaatctggctgccagcacgagcggtatggcaaccttagcggtgccaatccacgatgcggaagaggcgtttaatccgaatgcggtcaaggttgtcatggacgcagctggctatgccctctatttttctcgcgccaccatcccgtgggatcgcgatcgtttcgctaaatcccgcgaggctatcggcgattcgctgctgcgtcatatcgggatctatggctatcgcgccggttttattcgtcgctatgttagctgggcgccaagcccgcttgaacagatcgagatgctcgagcagctacgcgtgctgtggtacggcgagaaaatccatgtcgcggtggcggaagtggttcccggtacaggcgtcgatacgccggaagatctggaacgcgtccgcgcggagctacgttaa

SEQ ID NO: 173917 - DNA, 894 bp, Klebsiella oxytoca
atggaacagttgcgtaccgagctgagccacctgctgggtgaaaaactaagccgcgtggagtgcgtcagcgagaaaccctcgtcggcgctgtggtcgctatatgatgcgcagggaaacccaatgccgctgctggcgcgcagctttacgacgccgggcgtggcgcgtcagctggcgtggaagatatcaaccctcgcgcgaagcggtactgtccgtatgccggtggtctacggcgtaatgacgcacgaagagcatccgggcccagatgtactgctgatcgaacgactgcgcggcgtttcggtagaagcccccgcccgtacgccggagcgttgggaacagctacaggagcagattgttgaagcgctgctggcctggcaccgtcaggatagcggcggctgcgtcgggatggtcgacagcactcaggaaaatctctggccatactggtaccgccagcgtgtagaggtgctatggagcacgctgaacctttatcaggataccggcctgacgatgcaggacaaacgcattctgttccgcactcgcgaatgccttatggatttgtttaaggatttcaatgataactgcgtgctggtccacggtagcttcacgctgcgcagcatgcttaaagatccgcgcagcgatcagctgctggcgatggtaggtccgggcatgatgctctgggcgccgcgtgaatatgagctattccgtctggttgatagcggccaggaagagcagctgctgtggcactatctccgccgggcgccggtagcggaagcgtttctctggcggcgctggctgtatctgctgtgggatgaagtggataatctggtcaataccggacgctttgaccgcgtccggtttgatctggcggctaaatcaatcctgccctggctcgcctga

SEQ ID NO: 173918 - DNA, 780 bp, Klebsiella oxytoca
atgctttttacgctgaaaaaggttttaggcggcatgatgctgccgcttcccctgctgctgttgcttatggtggtcggcatcgccttgctgtggtttagccgtttccagcgcaccggcaagctctgcgtcagcttcggctggctgctgttgctgctattaagcctgcaaccggtggccgatagtttgctcaaaccgattgaagataaatacccgacgtggcggggagaagagcgcgtacagtacgtcgtcgtactgggcggaggatacacctggaatccagcctgggcgcccagctcaaatctcattaataacagcctgccgcggctgacggagggcatccgcctgtggcaggaaaatccgggagccaaaatgatctttaccggcggaagagcgaagaccaacccggtaagttctgcggaaaccagtgcccgggtagccgagaccctgggcgtaccgcgcagcgaaattatcgttctcgataaacccaaagataccgaagaggaagccgccgcggtgaaagaggcgattggcgatgcgcctttcctgctggtcacttccgcttcacatctgccgcgggcgatgattttctttcgccgcgccgggctggcgcccttgcccgccccggccaaccagctggcgattgagtcaccgctcaacccatgggagcgggcaatcccctcgccggtctggctaatgcatagcgatcgggttggttacgaaacgttaggtcgcatctggcagcgactgaaaggatcttcaggcgagccagggcaggattga

SEQ ID NO: 173919 - DNA, 780 bp, Klebsiella oxytoca
gtgcaggatcgtaatttcgatgatattgctgaaaagttttcgcgcaatatatacggcaccaccaaaggccagctgcggcaggcgatcctctggcaggatctacaaccgctgctgaaccagatggggcctgggccattgcgagttcttgacgcgggcggcggcgaagggcaaacggcgatcaaagtggcggaaatgggccatcacgtcacgttatgcgatctctctggtgaaatggtggctcgcgccaggcaggcggctgccgataaaggtgtgatcgacaacatgcattttgtacaatgcgcggctcaggatattgagcagcatttggaaagtccggtcgatctgatactgtttcatgcggtgctggaatgggtagccgaaccacaggcgatgttgcgtacgctgtggtcgatgctgcgccccggcggcgcgttatcgctgatgttctacaatgctaacggcctgttgatgcacaatatggtcgccggcaatctggactatgtgcaaatcggcatgccgaaaaagaaaaaacgcacgctgtcgccggactatccgcgcgatccgcagcaggtttacggctggctggaagagattggctggcagattaccggcaagaccggggtgcgggtgtttcatgattatctgcgtgaaaaacaccaacagcacgacaaatttgcggcgctgctggagctggaaacgcgctactgtcgccaggagccgtatattagcttaggccgttatattcacgtcaccgcgcttaagccgcagatgcaaggataa

SEQ ID NO: 173920 - DNA, 1323 bp, Klebsiella oxytoca
atgagtgaattttcccagacagtccccgaactggttgcctgggccagaaaaaatgatttttctatttcgctgccggtcgacagactctcttttttgctggcgattgccacgctgaacggcgagcggatggaaggggaaatgaccgagggagaactggtggacgcgttccgccacgtcagtgatgcgtttgagcagaccagcgaaaccatcagccagcgcgccaataatgccattaacgatatggtgcgccagcgtctgctgaaccgctttaccagcgaaatcaccgagggtaacgctatttatcgcctgacgccgctgggcatcgggatcaccgattactatattcgtcagcgcgagttctccaccctgcgcctgtcgatgcagctctccatcgttgccggcgaactcaagcgcgccgccgactcggcagaagagggcggcgatgagttccactggcatcgtaacgttttcgctcccctgaagtactcggttgcggaaattttcgacagtatcgatctgacccagcggatcatggatgagcagcagcagctggtgaaagatgatattgcccagctgctgaataaagactggcgggcggcgatctccagctgcgagctgctgctgtcggaaacgtccggcaccctgcgcgagctgcaggatactctggatgcggcgggcgataagctgcaggcaaacctactgcgtattcaggactcgaccatggcgcgcgacgatctgaattttatcgatcgtctggtgttcgacctgcaaagcaagctggaccgcatcgtcagctggggtcagcaggcgatagacctgtggatcggttacgatcgccacgtgcataaatttatccgtaccgctatcgatatggataaaaaccgcgtcttcgcgcagcgtttacgccagtcggtccagacttacttcgacgctccctgggcgctcacccatgcgaatgccgatcgtctgcttgatatgcgcgatgaagagatggcgctgcatgatgaagaggttaccggagaacttccggcggatctggagtacgaagagtttaacgaaattcgcgaacagctggcagcgctgattgaaggtcagctggcggtctataaagagaagggactgccgctggatcttggtctggtggtacgcgaatatctttcgcagtatccgcgcgctcgccactttgatgtcgcgcgcattgttgtcgaccaggcggtacgtttgggcgtagcgcaagcagatttcaccggactgccggcaaaatggcagccgattaatgattacggagccaaggtacaggcgcatgtcatcgacaaatattga

SEQ ID NO: 173921 - DNA, 705 bp, Klebsiella oxytoca
atgtcatcgacaaatattgaacaagtgatgccggttaaactggcgcaagcgttggctaatccgttatttccggcgctggatagcgccctgcgcgcgggccgtcatatcggccttgacgagctggataatcacgcatttttaatggattttcaggattacctggaagagttttatgctcgctacaacgtcgagctgattcgcgcgccggaggggtttttctatctacgcccgcgctcgaccacgctgatcccgcgctcggtgctctccgagctggatatgatggtgggcaaaattctttgctatctctacctcagtccggagcgcctggcgaatgaaggcatcttcacccagcaggagctttacgacgagctgctgaccctggcggacgaagccaagctgctgaagctggtcaataaccgttcgaccggctccgaccttgaccgccagaagctgcaggaaaaaatgcgcgcttcgctcaaccgcctgcgccgcctcggcatggtgtggtttatgggccacgacagcagcaaattccgcatcaccgaatcggtgtttcgcttcggcgccgacgtgcgcgccggtgacgacccgcgcgaagcgcagctgcgtatgatccgtgacggtgaagccatggcgctggaaaatcgtctgcagcttaatgatgagaatgaagagaatcagccggatagcggggaggaagagtaa

SEQ ID NO: 173922 - DNA, 4449 bp, Klebsiella oxytoca
atgattgaacgcggtaaatttcgctcgctgacgctggttaactggaacggcttttttgcccgcacctttgatcttgatgaattagtgaccacgctttccggcggtaacggcgccggtaaatccacgaccatggcggccttcgtcaccgcgctgatccccgacctgacgctgctgcatttccgtaatactacggaagccggggccaccagcggctcgcgagataaagggcttcacggtaagctgcgcgcaggcgtctgttactcggtgctggacgtcattaactctcgccaccagcgcgtggtggttggcgttcgcctacagcaggtcgccggtcgcgatcgtaaagttgatatcaagccttttgcgattcaggggttgcctacctccatccagccgactcagctgctgaccgaaacccttaacgagcgccaggcgcgcgtggtgacgctcaacgagctgaaagataagctcgaagcgatggaaggggtacagttcaagcagtttaactctattaccgagtatcactcgctgatgttcgatctgggcgtggtggctcgccgcctgcgttcagcttccgaccgtagcaagtactatcgcctgatcgaagcgtcgctgtacggcggcatttcaagcaccattacccgctcgctgcgcgactacctgctgccggaaaacagcggcgtgcgtaaagcattccaggatatggaagcggcgctgcgtgaaaaccgcatgaccctggaagcgatccgcgtaacgcagtcggatcgcgacctgttcaaacatctgatcagcgaagccaccaactacgttgccgccgactatatgcgccacgcaaacgagcgacgcattcatctcgacaaagcgctggagtatcgccgcgatctgttcagctcccgcgctcagctcgcggctgaacagtataagcacgtcgatatggcccgcgagctgcaggaacataacggcgcggaaggcgatctggaagccgattatcaggccgccagcgaccatctgaacctggtgcagaccgctctgcgccagcaggaaaaaatcgagcgctatgaggcggatcttgatgaactgcagattcgcctcgaagagcaaaatgaagtcgttgcggaagcggttgaccagcaggaagagaacgaagcccgcgccgaagccgccgagctggaagtggatgagctgaaaaaccagcttgccgactaccagcaggcgctggacgtgcagcagacccgtgcgattcagtacaaccaggcgctgcaggcgctggaaagagcaaaagcgctttgccatctgccggatttaaccccggagagcgccgacgagtggctggaaactttccaggcgaaagagcaggaagcgacggagaaaatgctgtcgctggaacagaaaatgagcgtggcgcaaactgcgcatagccagtttgaacaggcataccagctggtggtggagatcaacggtccgctggcgcgtaatgaagcctgggacgtggcgcgcgagctgctgcgcgaaggcgttaatcaacgccaccaggcagagcaggcgcacgggttgcgcagtcgcctgacggaacttgaacagcgtctgcgtgaacagcaggatgctgaacgccagctgaacgaattctgtaagcgtcagggcaaacgttacgatatcgacgaactggaagccctgcatcaggagctggaagctcgcatagcctcgctttccgacagcgtttcctccgccagcgaacggcggatgaccctgcgtcaggagctggaacagctgcagacgcggacgcaaacgctgatgcgccgcgcgcccatctggctggcggcgcagaacagcctcaatcagctgtgcgaacagagcggcgagcagtttgagtcgagccaggaagtcaccgaatatctccagcaactgctggagcgtgaacgcgaagctatcgtagagcgcgacgaagttggcgcccgcaagcgcgcaatcgatgatgaaatcgagcgccttagccagccgggtggttcagaagatcagcgcctgaacgcgctggcggaacgctttggcggcgtactgctgtcggaaatctatgatgacgttagcctcgatgatgcgccgtattactcggcgctgtacggcccttcccgccacgctattgtggtaccggatctgtcgctgattgccgagcagctggaaggccttgaagattgccccgaagatctctacctgatcgagggcgatccgcagtcgtttgatgacagcgtatttagcgtcgatgagctggaaaaagccgttgtcgttaagattgccgatcgtcagtggcgctattcacgcttcccgacgctgccgctgtttggccgcgccgcacgtgaaagccgcgttgaaacgctgcacgccgagcgtgaaagcctctccgagcgttttgcgaccctgtcgtttgatgtgcagaaaacccagcgcctccaccaggcgttcagccgctttatcggtaaccatctggcggtggcctttgaggacgacccggaagaagaaatccgtaaactgaatactcgtcgcggcgagctggagcgggcgctgaccgcccatgagagcgataaccagcagaaccgggtgcagtatgagcaggcgaaagagggtgtatccgcgctcaaccgcttgttgccacgtctgaatctgctggccgacgactcgctggccgatcgcgtcgatgaaatccaggagcggctcgacgaagcgcaggaggccgcgcgctttgtgcagcagtatggtaaccagctggctaagctggaaccgatcgtttccgttctgcagagcgacccggagcagtttgaacagctaaaagaagattacgcgtactcgcagcagactcagcgcgatgcgcgtcagcaggcgtttgcgctgaccgaagtcgtgcagcgccgcgcccactttagctactctgattccgcagagatgctcagcggtaatagcgatctgaacgagaagctgcgccagcgcctggagcaggcggaagcggagcgcgcccgcacccgcgaagcgctgcgtacccacgccgcgcagctcaatcagtacaaccaggtgctggcatcgctgaaaagctcctacgacaccaaaaaagagctgctcaacgatctgcataaagagctacaggatattggcgtacgcgccgacgccggcgccgaagagcgcgcccgtttgcgtcgcgatgagcttcatgctcagctcagcaacaaccgcgcgcggcgtaaccagcttgaaaaagccttgaccttctgcgaagcggaaatggataacctgacccgcaggctgcgcaagctggagcgtgattactgcgaaatgcgcgaacaggtggtcagcgccaaagccggctggtgcgcggtcatgcgcctggtgaaagacaacggcgtggagcgtcgtctgcatcgccgcgagctggcctacctttcggctgatgagctgcgctcaatgtcggataaagcgctcggggcgctgcgtctggcggtctctgataacgaacacctgcgcgatgtgctgcgtatttcggaagatccgaaacgcccggaacgcaaaatccagttctttgtcgccgtttatcagcatctgcgcgagcgtatccgccaggatattatccgtaccgacgatccggtggaagcgattgagcagatggagattgaactcagtcgactgacggaagagctgaccaaccgcgagcagaagctggccatcagctctcgcagcgtggccaacatcatccgcaagacaatccagcgcgagcagaaccgtattcgcatgctcaaccaggggctgcagagcgtctccttcggccaggtcaacagcgtgcggctgaacgtcaacgtgcgggaaacccactcgatgctgctggacgtgctgtccgagcagcatgaacagcatcaggatttgttcaacagcaatcgtctgaccttctcggaagcgctggcgaagctgtatcagcgcctgaatccgcaaattgatatggggcagcgtacgccgcagaccattggtgaagagctgctggactaccgcaactatctggagatggaagtggaagttaaccgcggttccgacggctggctgcgcgctgaatccggtgcgctatcgaccggtgaggctatcggtaccgggatgtcgattctggttatggtggtgcagagctgggaagatgaatccatgcgcctgcgcggcaaggatatttcgccgtgccgcctgctgttcctcgatgaagccgcgcgtctggatgcccgttctatcgccacgctgttcgaactgtgcgatcgactggagatgcagctaattatcgcagcgccggaaaatatcagcccggaaaaaggcaccacctacaaactggtgcgtaaagtggtgaacaatcacgagcatgtgcatgtagtaggtctgcgtggcttcgcgccgcagctgcctgaaacgctgccgggaacggctaatgcttcataa

SEQ ID NO: 173923 - DNA, 1794 bp, Klebsiella oxytoca
atgttgcttaagaaacggtatggtcgtcaattgtctgcgctcagtctgggcctggcttttgcattcgctccactgttcaatgtccaggccgaagagcctgaaattgtaccatcggatagctcagccaccatcagcgagctctcttccgcgctcagccaaagcgcaaaccagtctgcggcggttgccaaaatggctggcgagcaggcgcttcctgccgatgcggcggcgaaaagccgtaccgatattcaggcggtgctgccgtccggttatcaacccgtctttatgaatccgctggtctcgctgtatgcggccagggatatgaagccgatgtgggataaccgtgaggcggtgcaggcgtttcagcagcagctggctgaagtcgctattgccggttttcagccgcagttcaccacctgggttgagctgttaaccgacccggcggtgaacggtctggcgcgggatgttgttttgtctgacgccatgatgggctatctgcattttattagtggtattcccactcagggcaaccgctggctgtatggcaccaaaccgtatgccatgtcgacgccgccgctatcggtggttaatcagtggcaggtggcgctggatagcggttcgctgccgcagttcattgcgggcctggcgccgcagcatccgcagtatgccgcaatgcatcaggcgctactggcgcaggttgccgattcacgtccgtggccgcagctcaccggtaagacctcgctacgtcccggggagtggagcaatgatgccggtgcgctcagggagattttacagcgcaccggtatgctcgatgactcggcgaaaattgccctgccgggcgatgacgtggtgagcccatccgccgggaaaaaggctaaaaacagcggccgcggcgtttacgatcgccagttggttgaaggcgttaagcgctttcaggcgtggcaggggctgggcgctgatggcgtgatcggtcaggcgacccgcgactggctcaacgtctctcccgcgcagcgcgccggcgtgctggccttaaatatccagcgtttgcgtctgctgccgggtaatcttgcgaccggtattatggtgaatattccagccttttcgctggtttattaccaggatggcagcgaggtgctggcatcacgagttatcgttggccgcccggaccgcaaaacgccgatgatgagcagtgccctaaacaatgtggtggtcaacccgccgtggaacgtaccgccgacgctggcgcgcaaagatatcctgccgaaggtgcgcaataaccccggctatcttgaacaacacggctatacgatgatgcgcggctggaacagcaaagaggccatcgatccttatcaggtggactgggagacgataaccgcatcgaatctgccgttccgcttccagcaggctcccggcgcgcgtaattcgctggggcgctataaatttaatatgccaagctcagatgccatatatttgcacgacacgccaaatcacactctgttccaacgggatgggcgagcgctgagctctggatgtgtgcgggtgaataaagcttcagagctggcgaatatgctgttgcaggacgcgggctggaacgacgcgcgtatttcggatgccctcaagcagggaaatacccgctatgtgaatattcgtcagaatatcccggttaatctctattatttgaccgcctttgtcggggctgatggacgtacacaatatcgaacagatatttacaattacgatctcaccgcgcgatccagcgcacaaatcctgcctaaagctgaacaattaatcagataa

SEQ ID NO: 173924 - DNA, 552 bp, Klebsiella oxytoca
atggacaaatttgacgctaatcgccgcaaactgctggcgttaggtggagccgcgctcggtgctgctgccattctgcctgcgccggcatttgccaccctctcgaccccacgaccgcgtattttgacgctgaacaacctgcatactggtgaatcactcaaggcggagtttttcgatggcagaggctatattcaggatgaattagcaagacttaatcattttttccgcgactatcgcgcgaataagattaagtccatcgatcccggtttgttcgatcaactctatcgtctgcagggattacttggtacgaacaagcctgtccagcttatttccggttatcgctctgttgataccaataatgagcttcgcgcgcgcagccggggagtagcgaaacacagctaccacaccaaaggccaggccatggatttccatattgaaggcatttcgttaagcaatgttcgcaaagccgcgttatctatgcgttcaggtggtgtaggatactacccacgtagcaactttgtgcatattgataccgggccggtacggcactggtaa

SEQ ID NO: 173925 - DNA, 648 bp, Klebsiella oxytoca
atgaactatcgtattattccggttaccgcgttcgcgcagaactgttctttaatctggtgcgaacaaaccaggctggcggcgctggtggatcccggcggtgatgctgagcgaatcaaacaggaagtcaccgcggcaggcgtcagcctgatgcaaattctgctgacgcatggccatctcgatcacgttggtgcggcggcggagctggcgcaacattatggcgtgccgattatcgggccggaaaaagaagatgagttctggctggaaggattaccggcgcagagccggatgtttggtctggaagattgccagccgctgcagccggatcgctggttgaacgaaggcgatgtagtcagcgtggggaacgtctctctgcaggtgttgcactgtcccggtcatactccagggcacgtggtcttcttcgatgccgcttcccgattgctgatttctggcgatgtcatattcaaaggtggggtggggcgtagcgatttccctcgtggcgaccatagccagctgatcgatgcgattaaacgcaaactcttgccgttgggcgatgacgtatcgtttattcctggccatggccctatgtcgacgcttgggtatgagcgtctgcataacccattcctgcaggatgagatgcctgtctggtaa

SEQ ID NO: 173926 - DNA, 1191 bp, Klebsiella oxytoca
atgtttgagaacattaccgccgcccctgccgacccaattctgggcctggccgatctgtttcgtgccgatgaccgcccaacaaaaattaatcttggaattggtgtttataaagatgaaacgggtaaaacaccggtcctgactagcgtgaagaaagcagaacagtatctgctggaaaatgaaaccaccaaaaattacctgggtattgatggtattccagagtttggtcgctgcactcaggagctgctgtttgggaaaggcagcgcgattatcaatgataaacgcgctcgtaccgcccagactcccggtggtacaggcggcctgcgcgttgccgctgattttctggcgaagaataccgacgttaaacgtatttgggtgagcaacccaagctggccgaaccataaaagcgtattcaattcagccggactcgacgttcgcgaatatacctactacgatgccgcaaaccacaaactcgacttcgatggactgctggccagcctgaacgaagcgcaggccggtgacgtggttctgttccacggctgctgccacaacccaaccggtatcgatccaacgctggaacagtggcaacagctggcgcagctctccgtagagaaaggctggctgccgctgtttgactttgcctaccagggctttgcccggggcctggaagaggacgctgaaggcctgcgcgctttcgccgcgctgcataaagagctgctggtagccagttcctactcgaaaaacttcggcctgtataacgaacgcgtaggcgcctgcacgctggttgccgctgaccaggaaacggtagaccgcgccttcagccagatgaagtccgttatccgcgcaaactactctaacccgccggctcacggcgcctcggtagtggcgaccattctcagcaatgacgcgctgcgcgccatctgggaacaagagttaaccgacatgcgccaacgcatccagcgcatgcgtctgctgttcgttaataccctgcaggaaaaaggcgccagccgcgatttctctttcatcattcagcaaaacgggatgttctcgtttagcggcctgaccaaagagcaggtcctgcggttacgcgaagagtttgcgatttacgccgtggcatccgggcgtattaacgtcgcgggcatgacgccagacaatatggcgccgctgtgcgaagcgattgttgccgtactgtaa

SEQ ID NO: 173927 - DNA, 1080 bp, Klebsiella oxytoca
atgatgaagcgcaaaattctggcagcggtaattcctgccctgctggtagccggtgcagctaacgctgcagaaatctataacaaaaacggcaacaaactcgacttttacggaaaaatggttggcgagcacgtctggaccactaacggtgacaccagcagcgacgacaccacctacgcccgtatcggcctgaaaggcgaaacccagatcaacgatcagctgaccggttacggccagtgggaatacaacatggatgcgtccaacgttgaaggctcccagaccacgaaaacccgtctggctttcgctggcttaaaagccggtgaatacggttcattcgactacggtcgtaactacggcgccatctacgacgttgaagcggcgaccgatatgctggttgaatggggcggcgacggctggaccaacaccgacaacttcatgaccgcgcgtaccaacggcgttgcgacctaccgtaactctgatttcttcggtctggttgatggcctgagctttgcgctgcagtaccagggtaaaaacaaagaacgcgctgtgaagaaacaaaacggcgacggcttcagcaccgcggctacctacgcgtttgacaacggtgtagcgctgtccgctggttatgctaactccagccgcagcggcgaccagaaagcagaccgtcagggcgaaaaagctgaagcatgggcaacctccgctaagtatgatgcgaacaacatctacgctgcagtcatgtactctcagacctacaacatgactccggaaaacgaaggcaactatttcgctaacaaaactcagaactttgaagccgttgttcagtatcagttcgacttcggcctgcgtccgtccatcggctacgtacagactaaaggtaaagacctgcgctcccgcgctggcttctccggcggcgatgctgacctggttaaatacgtcgaagtgggtacctggtactacttcaacaaaaacatgaacgtctacgctgcgtataaattcaaccagctggacgacaacgactacacccgtgctgcgaaagtcgcgaccgacgatcaggcagcggttggtatcgtttaccagttctaa

SEQ ID NO: 173928 - DNA, 1401 bp, Klebsiella oxytoca
atgagcgttgtgcctgtagccgacgtactccagggccgcgttgccgttgacagcgaagtcaccgtgcgcggatgggtgcgtacccgccgagattctaaagctggcttttctttcctcgccgtctatgacggttcctgctttgatcctgtacaggccgttattagtaattctcttcccaattacaatcaggaagtgctgcgcctgaccaccggctgttcagtcatcgtgaccggtaaagtcgtggaatcccagggtcagggccagagctttgagattcaggccagtcatgttgaagtaagcggctgggtagacgatccggaaacttatccgatggcggctaaacgccatagcattgaatacctgcgtgaagttgcccacctgcgcccgcgcaccaacctgattggcgccgtggcgcgcgttcgccataccctggcgcaggcgctgcaccgcttctttgacgaacagggtttcttctgggtttctaccccgctgattaccgcttccgataccgaaggcgcgggcgagatgttccgcgtttccacgttggatctggaaaacctgccgcgcaacgatcagggcaaagtcgatttcgaaaaggacttctttggtaaagagtcattcctgaccgtttctggccagctgaacggcgaaacctacgcctgcgcgctatccaaaatctacaccttcggcccaaccttccgtgcggaaaactccaacactacccgccacctggcagagttctggatgctggagccggaagtcgcctttgctaatctgaacgatgtggcaggcctggcggaagcgatgctgaagtacgttttcaaagccgttctggaagagcgggcagatgacatgcagttctttgccgaacgcgttgataaagatgcgatcgatcgtctgcaacgtttcgtttccgcggatttcgctcaggtggattacactgacgcggtcaccattctggaaaattgcggtaagcagttcgaaaacccggtgtactggggcgtggatctctcctccgaacacgaacgctatctggcggaagagcattttaaagcgccggtagtcgtaaaaaactacccgaaagagatcaaggcgttctatatgcgccttaacgaagacgggaagaccgtcgccgcaatggacgttctggcgccgggtatcggtgaaattatcggcggctcccagcgtgaagaacgcctggacgtacttgacgcgcgcatggcggaaatgggtcttaataaagaagactactggtggtaccgcgacctgcgccgttacggcaccgtgccgcactccggttttggtctgggcttcgagcgtctgattgcctacgtgaccggcgtacagaacgttcgtgacgtcattccgttcccgcgcactccacgtaacgccacattctga

SEQ ID NO: 173929 - DNA, 1203 bp, Klebsiella oxytoca
atgacccaattcacttctcctgtactgcattcgctgcttgatacggatgcctacaagctgcatatgcagcaggctgtcttccaccgctacaatgatgtgcaggttgcggcggagttccgctgccgcggggacgatctgctcggcatctacgccgatgcgattcgcgagcaggttgagacgatgcgcgacctgaggctgcaggacgatgaatatcactggttgtcgagcctgcccttctttgcgccagattatctcgactggctacgcggcttccgctacgatccgcgccaggttaccgtcactaatgacaacggtaagctgaatattcgcctgtccgggccatggcttgaagtcatcatgtgggaggttccgctgctggcggtgataagcgagctggtgcaccactaccgctcgccggaaatcaccgtgacgacagcgctgaatacccttgaacataagctgtccgactttaaccgtctcaccgctgatgtcgatatgtccggcttccgcctgatggatttcggtactcgccgccgcttctcacgcgaggtgcagcaggccattgttcagcgtctgcagcaggagccgtggttcaccgggaccagcaactacgatctggcgcgtcggcttaacctgacgccaatgggaacccaggcgcacgaatggttccaggcgcaccagcagatcagcccgaacctggccagcagccagcgcgcggccctcgcggcctggctggaagagtatcccgatcggttaggtatcgcactgactgactgcatcacgatggacgctttcctgcgcgatttcgggccggaatttgcaacccgctatcaggggctgcgccacgactccggcgacccggtagaatggggcgagaaggctattgcccattacaagaagctgggcatcgatccgctgagcaaagtgctggtattttctgataatctcgacctggcgaaagcggtcgatctttatcgccacttctcctcacgggtcaatctgagcttcggtatcggcacacgtttaacctgcgatattccccaggttaagccgctgaatattgttattaagctggtggagtgcaacggcaagccggtagcgaaactttccgatagcccgggtaaaacgatttgccacgataaagccttcgtgcgtgccctgcgtaaagccttcgatctgccgccggtcaaaaaagccagctaa

SEQ ID NO: 173930 - DNA, 2616 bp, Klebsiella oxytoca
atgacacaacagccccaagccaaataccgccacgactatcgtgcgccggagtatctgattagcgatatcgatttgacctttgacctggatgccgcgaaaaccgttgttacggctgagagtaaggtctcccgccacgcggctgcgtctgatgtgccattgcgtctggatggcgaagacctgacgttggtttctctgctggttaatggtcagccgtggagcgactataaggaagaaaataaccagctggcgatcggcggattgccggaacatttcaccctcactatcgtcaacgaaatcagcccggcggccaataccgcgctggaagggctgtatcagtccggcgaagcgctgtgtacccaatgcgaagcggaaggttttcgccatattacctggtaccttgaccgtccggacgtgctggcgcgcttcaccaccaaaattatcgccgacaaagccaaatacccgttcctgctttccaacggtaaccgcgtagcccagggggagctggagaatggccgccactgggttcagtggcaggatccgttccccaaaccgtgctacctgtttgcgctggtggccggtgatttcgacgtcctgcgcgatactttcaaaactcgttcgggacgtgaggttgcgctggagctgtatgtagaccgcggcaacctcgatcgcgctccatgggcgatgacttcgctgcaaaactcaatgaagtgggacgaaacccgctttggcctcgagtacgatcttgatatctatatgattgtcgccgttgacttcttcaacatgggcgccatggagaacaaagggcttaacgtctttaactctaaatacgtgctggcgcgcaccgataccgcgaccgacaaagactatctggatatcgagcgcgtcattggccacgaatatttccataactggaccggtaaccgcgtaacctgtcgcgactggttccagctcagcctgaaagaaggcctgaccgttttccgcgatcaggagttcagttccgatctcggctcacgtgcggtcaaccgcatcaataacgtgcgtactatgcgcggtctgcagttcgccgaagatgccagcccgatggcgcatccgattcggccggataaggttatcgagatgaacaacttctacaccctgacggtgtatgagaagggcgctgaggtgatccgcatgctgcatacgctgctgggcgaagagaatttccagaaaggaatgcagctgtactttgaacgccatgacggcagcgccgcgacctgcgatgattttgtccaggcgatggaagacgcttcgaacgttgatctatcccacttccgccgctggtatagtcagtccgggacgccgatcgttaccgtccatgatgactacaatccagaaacggagcagtacacgctgaccatcagtcagcgcacgccgccgaccgctgagcaggctgagaagctgccgttgcatattccgttcgatatcgaactctacgacaacgaaggcaaagtcatcccgctgcagaagggcggtcacccggtgcatcatgtgctgaacgtgacccaggcggagcagacttttgttttcgataatgtctacttccagccggtaccggcgctgctatgcgagttctctgccccggtgaagctggagtacaaatggagcgatcagcagctgactttcctgatgcgccacgcgcgtaatgatttttcccgctgggacgcggcgcagagcctgctggcaacctatatcaaactcaacgttaaccgccaccagcaggggcaaccgctgtcgctgccgatccacgtagccgatgctttccgcgccatcctgctggatgagaagatcgatccggcgctggcggcggagatcctgacgctgccttcggcgaatgaaattgctgagctgtttgctattatcgatccgctagctatcgccgcggtgcgtgaagcgctgacccgtacgctggcgaaagagctggcagacgagttcctggtgatttacaacgccaacaagcttgacagctaccgcgttgagcatgccgatatcggcaagcgttctctgcgtaacacctgcctgcgctatctggcgtttggcgacgcggagctggcggataaactggttagcgcgcagtatcaccatgcggacaacatgaccgacgcgctggcggcgctggcggcggcagtcgctgcccagctgccgtgccgtgatgcattgatgcaggagtatgatgataaatggcatcaggacggcctggtgatggataaatggtttatcctgcagtcaactagcccggccgataacgtcctgcagacggttcgcggcctgctgaatcatcgttcgttcagcatgagtaacccgaaccgcgtccgttctctaatcggcgcttttgccggcagcaacccggcggcgttccatgccgaagacggcagcggctatcagttcctggtggaaatgctcactgaactgaacagccgtaatccacaggttgcgtcgcgtctgattgaaccgctgattcgtctgaaacgctatgataacaagcgtcaggcgctgatgcgcggggcgcttgagcagctgaaaggtctggagaatctttccggggatctgttcgagaaaatcagtaaagcgctggcataa

SEQ ID NO: 173931 - DNA, 774 bp, Klebsiella oxytoca
atgacaaccgcgcgtcttaatcccggaattccgctgctgttaaacggcgtaagcaagcgttacggcagcaagacgattctgaatgaactcgatctgcatatccccaccgggcaattcgtcgcggtggtcggtcgcagcggcggcggtaaaagtacgctgctgcggctgctggctgggctggaaaagcccaacggcggccagctgctggcgggctcgacgccgctggcacaaatccaggacgatacccggatgatgttccaggatgcccgcctgctgccgtggaaaacggtgatcgacaacgtcggactggggctgaaaggccagtggcgtgaggcggcgcttaaggccctggcgagcgttggccttgaagaccgcgccggtgaatggcctgcagcgctttccggcgggcaaaagcagcgcgtagcgctggcacgtgcgttaattcatcgtcctggattattgctgcttgatgagccgctcggcgcactcgacgcgctgactcgtctggaaatgcaggatctgatcgtttctctgtggcaggatcatggctttaccgtcctgctggtcacccacgacgtcagcgaggcggtggcgatggccgatcgcgtattgctgatagaagagggaaaaataggtctggatctgctggtggacatccctcgtccgcggcgcaccggctcggcgaagctggccgaactggaagcggaagtgctgcatcgggtgatgcagcgcggcaagaacgaatcctcgccacgcttagtgagtcacggttaa

SEQ ID NO: 173932 - DNA, 792 bp, Klebsiella oxytoca
atggcgacgctttcgcaaaaatttctcatccgcatagctccctggcttttaccggtgggcagcgtgattatttggcaattcgcctcctccatcggctggctttccacccggattttaccgtcgccggaaggcattctcaaagccttctggacgctctccgccagcggcgaactatggcagcatctggccattagctcgtggcgggcacttattggtttcagtattggtggctccattggtctggttctcgggcttatcagcggcctctcgcgctggggagaacgcctgctggatacctctattcagatgctacgtaacgtgccgcacctcgccctgattccactggtcattttatggtttggcattgatgaaagcgccaaaattttcctcgtggcgctggggacgatgttcccgatttatatcaacacctggcacggcatccgcaacattgaccgaggactggtagagatggctcgcagctatggcttatcgggctttgcgctgttccgtcacgtgatcctgcccggcgccctgccctcaattatggtcggtatccgctttgcgctcggcctgatgtggttaacgctgattgttgcggaaaccatttctgctaacgccggtattggctatctggcaatgaacgctcgcgaatttctgcagaccgatgtcgtagtcgtcgccattattctttacgctattctcggcaaactggccgacttcagcgcacagctccttgaacgcgtctggctgcgctggaatccggcttatcaccttcaggaggccagcgcatga

SEQ ID NO: 173933 - DNA, 576 bp, Klebsiella oxytoca
atgcgagtcataacacttgcgggtagcccgcgttacccttcccgctccagcgcactcctggaatacgccagagagaccctctccgcggcggatatcgaggtttgccactggcacctgcagaattttgccccggaagacctgctctatgctcgcttcgataaccccgctcttcacgcgcttaatgaacagcttgccggcgcggacgggctgattattgccacgccggtctataaggcttctttttcaggcgcactcaagacgctgcttgatctgctgccggaacgcgcgctggaaggcaaaatcgttctgccgctggctaccggcgggaccatcgcgcatatgctggcggtggattacgccttaaaaccggtactcaatgcgctgaaagctcaggagatcctccacggcgtttttgctgacgatagccaggtcacggattatcagcataaaccgcagtttacgccgaatctgcagggtcgcctcgacctggcgctggaaactttctggcaggcgctgcatcgccccagcagccgcgcgccggcgctgaaaaccttacagcgggttgagcatgtttaa

SEQ ID NO: 173934 - DNA, 1011 bp, Klebsiella oxytoca
atgtactaccccttcgttcgtaaagccctttttcagctcgatcctgagcgcgctcatgaagtcacttttcaacaattacgccgtgtttcgggtaccccgctggaaatgttggttcgccagaaggtgccggctaagccggtgacctgcatgggactcacattcaagaacccgctgggcctggccgccgggctggacaaaaacggcgaatgcatcgatgcccttggcgcaatgggctttggttccattgaaattggtaccgtaacgcctcgtccgcagccgggcaacgataagccaaggatcttccgcctggttgatgccgaaggtttgatcaaccgcatgggctttaataaccatggcgtggataacctggtagagaacgtaaaaaaagcgcattttgacggcattctggggattaatatcggtaagaataaagataccccggtagagcaaggcaaagatgattacctgatttgtatggaaaaaatctacgcttacgccggatatatcgccattaatatctcctcgccgaataccccgggcttgcgtacgttacaatacggagaagctctcgacgatctgctctctggtattaaaaataagcagcgcgaactccaggaaaaacatcaaaaatatgttccgctggcagtaaagatcgctccggatctttccgtcgaggaattgatccaggttgcggacagtttagtccgacataatattgatggggtcattgccaccaataccactttggatcgttcactggtgcagggaatgaaacattgcgatgaaaccggtgggcttagcgggcgtccgctgcagctgaaaagtaccgaaatcatccgtatgctatctgaggaattaaatggtcgtctgccaattatcggagtcggcggtattgactcagtgattgccgctcgtgaaaagatagccgccggtgcgactctggtgcagatttattccggatttatttttaaaggtccgccgctgattaaagaaattgttacccatatctaa

SEQ ID NO: 173935 - DNA, 543 bp, Klebsiella oxytoca
atgcggattaaacctgacgataactggcgctggtattacgatgaagagcatgaccgcatgatgctcgatctggctaatggtatgttattccgatcccgttttccccgccggatgctgacgccagatgccttcgccccttccggattttgcgttgatgacgccgcactctatttttcatttgaagaaaaatgccgcgaccttgaattatccaaagaacagcgcgctgaattagtgctcaatgcgctggtcgccattcgtttccttaagccgcagatgccgaaaagctggcatttcactactcatcaacagagctggcagcccggtaccggtgatgccgctagcgcatggctgagcgataccggtcagcaggttaatctgctggtggttgagcccggcgaaaacgctgcgctgtgcctgctagcgcagccgggactgacgcttgcggggcgagtgatgcagttgggggacgtgattaaaattatgaacgaccgactgcagccagcgaccgccgtcgccagctacagcctgggccaggcggtttaa

SEQ ID NO: 173936 - DNA, 1110 bp, Klebsiella oxytoca
atggtaaccctttcgcgactttttattcatcccgtcaaatcgatgcggggaattggcctgagccacgcttatgcagacatcagcgggctggccttcgatcgtatatttatggtgacggaaactgatggcacctttatcaccgctcgtcagttcccgcaaatggtcaagtttactcccgcgccgctccatgatggtctgcatctgaccgctccggacggcagtagcgcgatcgtgcgcttcagcgatttctccgtgcagcaggagccgaccgaagtctggggcaaccattttaccgccctgattgccccggccggggtgaaccagtggctaagcggttttttcaaccgcagcgttcagctgcgctggctggggccagagcttagccgtcgggtaaaacgtcacgatgccgtccccctctcctttgccgacggctttccctatctgctggccaatgaggcctcgctgcgggacctgcaaaatcgctgtccggccagcgtaagcatagaacaatttcgcccgaatctgctggtgaccggcgcggccgcctgggaggaagatacctggaaagtggtgagtattggcgaggtcgtttttgatgtcgcgaaaccctgcagccgctgcgtgttgacaaccgtcagcgcggaacgtgggcaaaagcaccctggcggtgagccattaaccaccctacagggattccgcacggcgctggataatggcgatgttgattttggccagaatttgatcgcgcgaaatagcggcacgatccgcgtcggcgatgagttagaagtgctggcccgcggcccggcgaaggcctacggcgccggggaaagcgacaattcgctggcgcctgagactcagcagaacgcaacggtggaaattgagtggcagggactgagctttaccggtaataatcagcagatcttgctggagcagctggaacagcagggaattcgcattccttactcctgccgggcagggatttgcggcagctgtcgcatccgtctggaagaaggggaagtcagcgcgctgaagaaaaatgcggtcgccgccgatggcaccattttgtgctgcagctgcgtaccgaaaaccgcggtaaggctggggccttaa

SEQ ID NO: 173937 - DNA, 2106 bp, Klebsiella oxytoca
atgaattctctgtttgccagtacggctcgtgggctggaagagctgttaaaaactgaactggaagggctgggcgcggtggactgccagttggtccagggcggggtccattttcagggagatacgcgactgttgtatcaaagcctgatgtggagccgactggcttcgcggattatgctgccgctggggcagtgcagcgtatacagcgacctggatctgtatcttggcgtgcaggccattccatggacggagattttcagccaggatgccacttttgccgtgcattttagcgggctgaacgaagagatccgcaacagccagtatggggcgctgaaggttaaagatgccatcgtcgacagctttacgcgtaagaatttgccgcgtcccaacgtcgatcgcgaaaaccccgatctgcgcattaacgtctggttgaataaagagaccgcgcatatatctctggatctcagcggcgagggcctgcacctgcgcggctaccgcgacggtaccggtatggcgccaatcaaagaaaacctggccgcggcgatagtgatgcgttccggctgggctaccggtacgccgctgctcgatcccatgtgcggttccggtacgctgttgattgaagcggcgatgctggcgaccgatcgggcgccgggtttacaccgcggccattggggtttcggcggctgggcgcagcatgatgatgctatctggaaagaggtgaagtccgaagcgcaaacccgcgcccgtcaggggctggcggcgtatgagtcgcgcttttacggttccgacgttgacgcccgggttatcgaacgcgcgcagcgtaacgcccgccgtgccggtattggcgagctggttaccttcgaagtgaaagatgtcgcccagctgagcaacccgttgccgaagggcccttacgggacagtgattagcaaccctccatacggcgagcgtctggagagcgagccggcgctgattgccctgcatagcctgctggggcggattatgaaaaaccagtttggcggctggaatctgtcgctgtttagcgcctcgccggatctgctgagctgcctgcagctgcgcgccgataagcagttcaaagcgaaaaacggcccgctcgactgtgtacagaagaattaccaccttgcggaaaacgaaggcggcaaaaccgcgatgctggcggaggatttcgccaaccgcctgcgtaaaaacctgaaaaaatatgagaagtgggcgcgccaggaaggtattgaatgctatcgcctgtatgatgccgacctcccggaatacaacgtcgctattgaccgttacgccgattgggttgtggtgcaggagtatgcgccgccgaaaaccgttgacgcgcataaagcccgtcagcgtctgttcgatattattgctgccaccattgccgtgcttgggattgcgccgaataagctggtgttgaaaacccgcgagcggcagaaaggtaaaaatcagtaccagaaaatgggcgaaaaaggtgaattcattgaggtgcaggagtataacgcgcgtctgtgggttaatctgaccgactatctggataccgggctgttcctcgaccaccgtatcgctcgccgcatgctggggcagatgagtaaaggtaaagacttcctcaatctgttctcctataccggcagcgccagcgttcacgccggccttggcggcgcgcgatccacgaccacggttgatatgtcgcgtacctacctcgaatgggctgagcgtaacctgcgcctcaatggtttaaccggtcgcgcgcatcgcctgatgcaggccgatgtgctgggctggctgcgggagacgaccgaacagttcgacctgatctttatcgatccgcccaccttctccaactcgaagcgtatggatgacgcctttgacgttcagcgcgaccatttgcgcctgatgaccgatttaaaacgtctgctgcgtaaaggcggcacgattatgttctcaaacaacaaacgcggtttccgtatggatcatgacgggctggcgcagctgggcctgaaggcgcaggagattacgcaaaaaacgctgtctcaggactttgcccgcaaccgtcagattcacaactgctggctgattaccgcagcctga

SEQ ID NO: 173938 - DNA, 1908 bp, Klebsiella oxytoca
atgtctttaattagtatgcacggcgcctggctctctttcagcgatgcgccgctgctggataatgctgaactgcatatcgaagataacgaacgcgtctgcctggtggggcgcaacggcgcgggtaaatcgaccctgatgaagatcctcaaccgcgaacagggtcttgatgatgggcgcattatctatgagctggatctggttgtggcgcgtttgcagcaggatccgccgcgtgacgtcaccggaaccgtgtatgactttgtggcggaagggattgctgagcaagcagcataccttaagggttatcacgatgtttcgcagctggtgatgaccgatccgagcgacaagaatctcaatgagctggcgcgtctgcaggaacagctggacaatttagggctgtggcagctcgacagtcgtattaatgaagtgctggaacagctgaatctggatcctaacgccgagctatcatcgctctccggcggctggctgcgtaaagcggccctcggtcgcgcgctggtcagcgggccgcgggtgctgctgctcgatgaaccgaccaaccacctcgatattgaaaccatcgactggctggaaggtttcctgaagatgtttaaaggcaccatcatctttatttcgcatgaccgttcttttattcgcaatatggcgacgcgcattgtcgatctcgatcgcggcaagctggtgacctatccgggtaactacgatcagtatctgctggataaagaagaagcgctgcgcgtggaagagctacagaacgcggagttcgatcgcaagctggcgcaggaagaagtgtggatccgtcaggggatcaaagcgcgccgaacccgtaacgaaggacgcgtgcgggcgttaaaggccatgcgtcgcgaacgcggcgagcgtcgtgaagtgatgggcagcgcgaagatgcaggttgaagaggccgcgcgttcgggcaagattgtgttcgaaatggagaatgttaactaccaggttgatggcaaggtgctggttaaagacttcaccgcccaaatccagcgcggcgacaaaattgcgctgattggcccgaacggctgcggcaaaactacgctgctgaagctaatgctcggtcagctgcaggcggatagcgggcgtattcatgtaggcaccaagctggaagtggcttacttcgaccagcatcgcgcggaacttgatccggataaaacggtgatggacaacctcgcggaaggtaaacaggaagtgatggtgaacggcaagccgcgccacgtcctgggctatctgcaggattttatgttccatccgaaacgcgcgatgacgccggtgcgtgcgctatcgggcggcgagcgcaaccgtctgctattggcgcgtctgttccttaagcccagtaacctgttgattctcgacgaaccgacaaacgatctggatgtcgaaaccctggagctgctggaagagcttgtcgacggctatcagggaaccgtaatgctggttagccacgaccgtcagtttgtcgataatacggtaacagagtgttggatctttgaaggcgcagggcaaattggccaatacgttggcggctatcatgacgcccgcggtcagcaagcgcagtacctcgcgcgtaagcagccggtttccaaaaagagtgttgaagttgctcaaccgaaagcagaaagtgtcaaacgtgctgccagcaaactaagctataacctgcagcgcgagctggaacagctgccgcagaagctggaagaactggaagcccagctgcagaatttgcaggagcaggttgccgacccttctttctttggtcagtcgcatgaccatacgcagcaggtactggcgcagctgagtgaagcggagcaggcgctggaagccgccttcgaacgctgggaatatcttgaagggctaaaaaacggcgcataa

SEQ ID NO: 173939 - DNA, 1269 bp, Klebsiella oxytoca
atgtgcgatcatcatcatgctgcgcggcatattctgtgccgacaatgtgatctgctggtggctttgccgcagctggagcatcgccagaaagctgcatgtccgcgctgcggaacgacattgacaacgtcatgggacgcgccacggcagcgtcctaccgcgtatgcgctggtcgcgttgttcatgttgctgctggccaatttgtttcccttcatctatatgaaggtcggggggattagcagcgaaattgaattgctggaaatcccgaacgtcctcttcaccgaggactatgccagcctcggcacgttctttttgcttttcgtccagctggtgccggctttctgtctggtcactatactcctgttggtcaaccgggtgcgcatgccatccgggctgaaagcgtttctggcgcgtattctgtttcatcttaaaacctggggaatggcggaaatctttctcgccggggtactggtcagcttcgttaagctgatggcctatggcgatattggcgttggcctgagctttgtcccgtggtgtatgttctgcgtattacagctgcggacgttccagtgcgtggatcgccgctggctgtgggatgatattgcgccaatgccggctatcaagcagccgctgaaagttggcgtgtccggactgcgtcaggggctgcgttcatgctcatgctgtacagcggtgttgccgattgatgaggccgtctgtccgcgctgtcatacaaaggggactgcccggcgtaaaaacagcctgcagtggacgctggcgctgttaatgacttcgctaatcctttatatgcccgccaatattctgccgatcatgattaccgatctgcttggcgataaaatgccttccaccattatggcgggggtgatcctgctgtggagcgaaggatcctatccagtggcgatggtgatattcatcgccagtattatggtgccaaccttaaaaatgatcgccattggctggctctgctggaacgccagcggcaggggagatcgcgactcagagcgcatgcatctgatttatgaagtcgtcgagtttgttggccgctggtcaatgattgatgtgtttgtcatcgcagtcctctccgctctggtgcgcataggtgggttaatgaatatctacccggcgataggggcggtgatgtttgcgctggtggtagtgatgacaatgttttcggccatgacctttgacccgcgtttgttgtgggatcgtgagccagattcaagccatgaggaaagactgcagcatggaaaataa

SEQ ID NO: 173940 - DNA, 1638 bp, Klebsiella oxytoca
atggaaaataagagcggagaagcgaaggtgcaaaaggtgaagaactggtcaccggtgtggatcttcccgatagtgacggcgctaattggcgcctggattcttttttatcactatagccaccaggggccggaagtgaccctgatcacaaccaacgccgaaggcattgaagggggaaagacccgcattaaaagccgcagcgttgacgtcggcgtgattgaaagcgcaacgctgacggacgacctgactcacgtggaggttaaagcccgactgaattctggcatggaaaaactgcttcatcaggattcggttttttgggtggttaagccgcaggttggtcgtgaaggtatcagcggcctcggcacgctattgtccggcgcctatatcgaactgcagccggggaccaaaggctctgtccctgcgcagtatccgctgctggattcaccgccgctggcctcacccgatgcgaaaggcattcgtattctactggaaagtagcaaagcgggtcagctgtcacccggcgacccggtgcttttccgcggctatcgtgtaggttcggtggaaaccagcaccttcgatgcgcaaaaacgcaatatcacctatcagctgtttattagcgcgcctaacgatcggctggtcactaacaacgtgcgtttctggaaggatagcggtattgcggtggatctgaccgcggcaggcatgcgcgttgagatgggatcgctgtcgacgctgtttggcggcggcgtcagctttgatatccctgaaggactcccgctaggggaaccggtggcgaataaaaccgaatatcatctgtttgacgatcaacgcagcattcaggactctgtgttcactcaacacattgactacgtgatgttctttaaagattctattcgcggtctgcagcccggcgcgccggttgaattccgcggtatccgtcttgggaccgtaggcaaggtaccgttctttattcctggcctgaagcagaacataaacgacgattaccgtatcccggtagaagtgcgaattgagccggaacgcctgatcaatcagttaggcgccgatcctgatattcgtaagcatatcgatgatctaatgaatcgcgggctgcgcggttcgcttaaaaccggcaatctggtgaccggcgcgctgtatatcgatctcgacttctatccgaaagcccctgcgcgcggcaagatgcaggaatttggtggttatccgattattccgaccgtaagcggtggtctggcgcagatccagcagcgcctgatggatgcgctggataagattaataatctgccaattaacccactgctggagcaggcaaccagtacgctggcgcaaagtgaaaaaaccatgcagcacgtacaggcgacgctcgacagtctgaacaagatcacctcaagtcagtctatgcagcagctgccgggtgatatgcagagtacgctacgtgaacttaatcgtagtatgcagggcttccagcctggctccgcggcttacaataagatggttgcggatatgcagcgtctcgaccaggtgctgcgcgaactgcagccggtactgaaaacgcttaatgataagagcaatgcgctggtatttgaggcgaaggataaaaaagatccgcagccgaagggagcgaaataa

SEQ ID NO: 173941 - DNA, 564 bp, Klebsiella oxytoca
atgaagaaatggctaatagcggcggcggtatgcgcgttgacggcatgcagcagcggcggtgagagtaaaacttactaccagcttccagtggctcagggcggcgcgcaaagcgccgcacaccagagcaaaaatttgctttgggtcgagcaggtcagtattccggattatcttgccggtaacggagtggtctatcagaccaccgatgttcagtatgtgattgcaaataacaatctgtgggcgagcccgctcgatcagcagctaaaaacgacgctggtggcgaaccttagcaatcagcttcccggctgggtcgtggcttctcaaccgctgggtagcgagcaggataccctaaacgtatccgtcagcggttttcacggtcgttacgatggtcgggttatcgttaacggtgagtggttactgaagcatcagggacagctgattaagcgaccattccatatcgagctcaagcaacaagaagatggctacgatgcgatggtgaaaacgctcgctcaggcctggactcaggaagcggcggcgattgccagcgagattaaccgcttgccataa

SEQ ID NO: 173942 - DNA, 168 bp, Klebsiella oxytoca
atgaagagacaaaaacgagatcgcctggaacgggcacatcagcgtgggtaccaggccggtattaccggaaggtcgaaggaaatgtgtccttaccagaccttaaaccagaggtcttattggctgggaggctggcgagaggccatggaggacagggtacaaattgcctga

SEQ ID NO: 173943 - DNA, 519 bp, Klebsiella oxytoca
atggtagataaacgcgaatcctatacaaaagaagaccttcttgcctccggtcgtggtgaactatttggcgcgaaaggccctcaactgccggcgccaaatatgctgatgatggaccgcgtcatcaaaatgaccgaaaccggtggtaactatgacaaaggttatgtcgaggcagaactcgatattaacccggatctgtggttcttcggttgccacttcattggtgacccggtaatgccgggctgtctgggtctggatgccatgtggcagctggtgggcttctacctgggctggttaggtggcgagggtaaaggtcgtgcgttaggcgtaggtgaagtcaagctcaccggccaggtactgccaacggcgaagaaagtaacctaccgcattcatttcaaacgcgtgataaatcgtcgtttgattatgggcctggcggatggtgaagtgctggttgacgatcgtctgatctacaccgcaaccgatctgaaagtgggcctgttccaggacacttcctcattctga

SEQ ID NO: 173944 - DNA, 1758 bp, Klebsiella oxytoca
ttgaccattacgaaacttacccgaaacgacctcgctcctgatacggaaagttatcaggcgctgtttgcacaagccgacttagctcacgcagaggcatccctctcaggcgaactgcaaccccgtttattctatgccctggagcagcttctggtcactccagccatttcgccatttatgctggttaaaattccggaagagccggagtacctgcaatggctcgctaacgaaactcgtactttacatcaaccgccggaatccctctgcggagtacgctatcagattgatggcggaaaaatctcgctctcgccggcgcaaaccgctgaagataatttcgcaagcgtcgcgccggtcgaagcggcagattgggtcgaagcggagcagctatttggctgcgtgcgccagtttaacggcgagatcgctttacaaccgggtcttgtccatcgggctaatggcggcgtactgatcctctccttgcgggccttactggctcagcctctgctatggatgcggctaaaaaatatggtggctcgccagcgttttgactggctgtcatttgatgagtctcgccctcttccggtgagcattccctctatgcctttgagcctgaaagtgatcctggtcggcgagcgggaatctcttgctgattttcaggagatggagcccgagctttctgctcaggctatctacagcgaatatgaagataacctgcaaatcgctgatgcagagacgcttaagcagtggtgtcaatgggtctggcaaaatgcccagcggctcgaacttccggggctgtccgctaccgcctggccgctgttgattcaggaaggcgctcgctataccggtgaccaggaaaccttgcccctgtgcatactgtggatcgcccgccagcttcgcgaagccaccgccttctgtgaaggtgacgagattagcgccgaagagatgcaaaccatgcttgagcgtcgtctgtggcgcgaaggctatcttgccgaacgcatccaggatgaaatcctgcaggagcaaatcctgatcgagacggaaggcgaatgcgtagggcagatcaacgccctctcagtcatcgagtttccgggccatccgcgcgcgtttggcgagccttctcgtatcagctgcgtcgtgcatattggcgacggtgaatttattgatgttgagcgcaaggcggaactgggtggcaatattcatgcgaaaggcatgatgattatgcaggcattcctgatgtccgagctggagcttgaacaacagctccccttcaccgcatctttgaccttcgagcagtcatacagtgaagtggatggcgacagtgcatccatggccgaactgtgcgccttaatcagctctctggccaatgtgccgattaatcaaagtatcgccattaccggctcagtcgatcagtttggtcgcgtacagccggtaggtgggctcaatgagaaaattgaaggcttctttgctatttgtcagcagcgtgggctgaccggtaaacaaggcgtcattattccttccgccaacgttcgtcatctgagcctggcgcaggagctgcaacaggcggttgcggatgaacagttctttatctgggcggtcgatgacgtaaccgaagcgctgcccattctgacccagttactctgggacggcgaaggacaaactttacggcaaaccatacaggagcggattgcgcaggcgacacagcaagagagtcgtcatcgctttccgtggccgctacgctggttaggcggttcaggttcgaactga

SEQ ID NO: 173945 - DNA, 453 bp, Klebsiella oxytoca
atgaaatatcaacaactggaaaatctcgaaagcggctggaaatggacatatctggtaaaaaagcatcgggaaggtgagcttattacccgctacattgaagccagcgctgcgcaagcggcggtcgatctattactgacgcttgaaaatgaacccgtgctggtgaatacctggattgagcatcatatcaacccagagctggttaaccgcatgaagcagacgatccgcgcgcgacgcaaacgtcattttaacgcggagcatcagcatacgcgtaaaaagtctatcgatctggagtttatggtctggcaacgcctcgccggtctggctcaaagacggggtaaaacgctgtcggaaaccattgtgcagttgattgaggatgctgagcataaagagaagtatgccagcaagatgtcgagcctgaagcatgatttgcaggttctgctaggtaaagaatag

SEQ ID NO: 173946 - DNA, 1071 bp, Klebsiella oxytoca
atgaaaaagacagctatcgcgattgcagtggcactggctggcttcgctaccgtagcgcaggccgctccgaaagataacacctggtatgcaggtggtaagctgggctggtcccagtatcacgataccggtttctacggtaacggtttcaaaggtaacaatggtccagttcgtaacgatcagctgggtgctggtgcgttcggtggttaccaggttaacccgtacctcggtttcgaaatgggttacgactggctgggccgcatggcttataaaggcagcgtagacaacggcgctttcaaagctcagggcgttcagctgactgctaaactgggttacccaatcactgacgatctggacatctatacccgtctgggcggcatggtttggcgcgctgactccaaaggtaactacgcttctaccggtgtttcccgtagcgaacacgacactggcgtatccccggtattcgcgggtggcttagagtgggctgttactcgtgacatcgcaacccgtctggaataccagtgggttaacaacatcggcgacgcaggcaccgttggtacccgtcctgataacggcatgctgagcctgggtgtttcctaccgtttcggtcaggaagatgttgctccggttgtagctccggctccggctccggctccggaagtgactaccaagcacttcaccctgaagtctgacgttctgttcaacttcaacaaatctactctgaaaccagaaggtcagcaggctctggatcagctgtacacccagctgagcaacatggatccgaaagacggttccgcagttgttctgggctacaccgaccgtatcggttccgatgcctacaaccagcagctgtctgagaaacgtgctcagtccgttgttgattacctggtatctaaaggtatcccggccagcaaaatctccgctcgcggtatgggtgaatccaacccggttactggcaacacctgtgacaacgtgaaagcacgcgcagctctgatcgactgcctggcgccggaccgtcgcgtagaaatcgaagttaaaggctacaaagacgttgtaactcagccgcaggcttaa

SEQ ID NO: 173947 - DNA, 381 bp, Klebsiella oxytoca
atgatgacgcaactgctactgcttcctttattacaacagcttggtcagcagtcgcgctggcagctctggctgacaccacagcagaagctgagccgcgaatgggtacagtcatccggtttgccgctatccaaggtgatgcaaatcagtcagctctcccctgctaatacgctcgaatcaatggttcgctcactgcgcacgggaaactatagcgtggtcattggctggctgtcggaagaactcaccgttgaggaacatgaacgactggttgccgctgcagaagaaggtcacgcgatgggctttatcatgcgtccggtaagaaataccgctctgcctggcagacaacattccgggctaaaaattcactcaaacctgtatcattaa

SEQ ID NO: 173948 - DNA, 717 bp, Klebsiella oxytoca
atgttgctgcataaagggaactcccttattttcttattagcggatccgttagcaaatttatgtcttatttacatgattaacaaaggaataatcatgaagaaactcgtatgtcttaggatccatcagtttcgggcatgtttgtctccattaggaaaaataagctgtcggcccttatttggtggctatagcctggcgatagataataccgtgtttgccatgatggctgagggggagatctatcttcgggtttgtgagcagagtgcgcagtatcgcgtggcgcataaaaacccgctgttgaagatgcagaagaatggtcgtctggttgcgcttaagtactatcatatagatgaagggctttggcgtgacagcaaaatgctttttcatttatcagcgctatcattacagaccgctcgtaatgaaaaacatcggcagcgacattccggaagattaaagaatcttccaaatattagttttcacatggagctccagttgattaattcaggtatcaaagatgaattaacgctgcgaaaaattggcgctaaagaagcctggctcagactacgaaaaatgaataaagcgctaacggtaaacgtcctttattcattagagggagctattgcgggcgtgcatgcggccacgctcccgacgcaacagcgtcaggagcttgaggagtgggcggcggtacaggtacaggagatggagggctactcaggttga

SEQ ID NO: 173949 - DNA, 2136 bp, Klebsiella oxytoca
atgctcagccccctgctacgccgctatacctggaacagtgcctggttatattacatcaggatattcatcgcactctgcggtacgaccgcatttccctggtggctcggcgaagtaaaactcaccatccccttaacgcttggcgtcgtggccgcggcgctgactgacctggacgatcgtctggcaggacgtctgcgtaatctggccattacccttgtatgcttctttatcgcttcggcctcggtggagcttctcttcccctggccctggttattcgcggcaggattaaccgtttccactatcggctttattttgcttggtggtctgggacaacgctacgccaccatcgcctttggcgcgctattaattgccatttacactatgctgggggtaacgctttacagccaatggtatctccagccgctgtttttgctggctggcgcggtgtggtacaacctgctcaccctcgccgggcatctgattttccctatccgtccccttcaggacaatctggcacgtagctatgagcagctcgcccgctatctggagcttaaatcccggctattcgatccggatatagaagatgaaagccaggccccgctctatgacctggcaatagccaacggccagctggtgactacgctgaaccagaccaaagtttccctgctgactcgtctgcgcggagatcgcggccagcgcggtactcgccgcacgttacagtactatttcgtggcgcaggatatccatgaacgtgcgagttcatcgcatattcagtaccaaacgctacgcgaacattttcgttatagcgatgtgatgttccgctttcagcgtatgctatcaatgcaggcgcaggcctgccagaaactgtcgcgtgccattctgctgcgcgagccctacctgcacgacactcattttgagcgcgcttttatgcatcttgacgcagcgctcgatcgcgttaaggccagcggcgcgccagcggaacagattaaagcgctgggttttttgctgaataacttacgggctattgacgcccagctggcgacaattgaatcggtccagaccaccgaacagtccattcacagtacggaaaacctgttagccgacgaccagcctaacggatttagcgatatctggctgcgcttgcgcagtaatatgtctcctgagtcagccctgtttcgtcatgcagttcgaatgtcgatagtcctgtgcgcaggttatgcctttatccaattgaccggactgaaccatggctactggatattactgaccagcctgtttgtttgtcagccaaactataacgccactcgccatcggctggcgttaaggataatcgggaccttgatcggtgtggccatcggcctgccggtactgctcctcgtcccgtccgttgaaggccagctgcttttgattgtcctgaccggcgtgctgttcttcgctttccgtaatgtgcagtacgcccacgcgacaatgttcattacgctccttgtcttgctctgttttaacctcctgggagaaggttttgaagttgccctaccgcgcatattcgacactctgattggctgcgctatcgcctgggccgcagtgagttttatttggccggactggaaattccgcaatctccctcgagtgctcgagcaagcaatcaatgccaactgccgatatttagatgccattcttgagcaatatcaccaggggcgcgacaaccgcctggcctatcgtgttgcacgcagagccgcgcataaccgggatagcgaactggcctctgtcgtatcgaacttatcaacagaacccaaagcgggctcacaaatgcgggaaactgcttttcgtttgctctgcctgaaccatacctttaccagctatatctctgctctgggagcccacagggaaaagctgacaacgccagatattctggcgctgctggacgatgccgtgtgttatgtggatgacgcactgcaccattcgccagccgatgaactacgggtacagcaggctttagcaagcctgcagacccggatccaacatcttgaccctcgcgccgacagcaaagagcctttagttctgcagcaaattggactgctgctggcgctactgccagaaatttgtcggctacagcgacaggttgagattcaacctgagtag

SEQ ID NO: 173950 - DNA, 447 bp, Klebsiella oxytoca
atgcgtaccgttctgaatattttaaactttatccttggaggattcgccaccacgctcggctggcttctggcgacgctggtcagcatagtactgatttttacgctgcctctcacccgctcctgctgggagataacaaaactctctcttcttccctatggtaatgaagccattcatgttgatgaactcgaccctcagggaaagaatagcctgcttaacgcgggcggaacgttgttgaatattttatggtttattttcttcggctggtggttgtgcctgatgcatatcttttgtgggatcgcccagtgtctgaccatcatcggcattccggtaggcatcgccaattttaaaatcgccgcgattgctttgtggccggtaggccggcgagtcgtttccgttgagaccgctcgtgctgcgcgtgaagccaacgcgcgtcgccgctttcagtaa

SEQ ID NO: 173951 - DNA, 2034 bp, Klebsiella oxytoca
ttgggcaaacgcatggctcaacacccttatgacagggtgcaacttcttaatgccggagtaaaggtttccggtgatagccatgaatatcttatacctttcaatcagttattatctattcattgcaagcgtgggctggtgtggggagagctggaatttatcctcccgggcgagaaagttgtgcgattgcatggtaccgaatggaccgaaactcagcgtttttaccatcatctgaatgctctctggcagcagtggagcgcggaaatgagcgagatttccgccgatctgctgcgccagcagttggctgatgtggcgcgttcaagcgccgagggtaaatggttgacgcgtcagcaggtgtccgatattcagcagaaaattcgccatgcccttagcgggctccccgtgccgacaagccgccttgagggatttgaaaactgccgtgaattatggcggcagtgtcagagttggttgggggatacggaaaaggccaggcttgagcataaccaaaaatttactgaatcaatgctggaacaatatcggggattttttgctgcagttgaatcatcgccgctgaatccggctcaggcgcgcgccgtggtgaatggcgagcgttcattgctggtattggcaggggccggaagcggtaaaacctctgttttagtggcgcgagcaggttggctattgacccggggcgaagcggcagctgagcaaattttgctgctggcttttggtcgacaggccgcgcaggagatggatgagcgcattcgcgaacgcctcggaaccgacgagatctccgcgcgcacttttcatgctctggctttgcatattattcagcagggcagtaaaaaagcgccgatgattagcaagctggaaaacgacagcgctgcgcggcaaaaacttctgctcgaaagctggcagcagcagtgtcaggagaaaaaagcgcaggcgaaaggctggcgactgtggctggaggaagaaatgggctggccgatccctgaaggggatttctggcaggataaaaagctgcagcgccgcatcgccagccgcctcgatcgctgggttagcctgatgcgcatgcatggcggctcgcaggctgagatgatcgccggggcgcctgaggaggtacgcgatctttttagtaagcgcgtcaagctgatggcccctttactaaaagcctggaaaacggcgttaaaagatgaaaatgccgtcgacttctccggtctgattcatcaggcgataaatattctcgataaaggccgctttgtcagtccgtggaagcatattctggtggatgaatttcaggatatctctccgcagcgggcgtcactactcgcggcgttacgtcgacaaaatacgcagaccacgctgtttgccgttggcgatgactggcaggctatctatcgttttagcggtgctcaactctctttgacgacggcttttaatcactattttggcgaaggggattgttgcgcgctggatacgacctaccgatttaatagccggataggcgaggtcgcaaacggatttatccagcaaaacccgcatcagttgacgaaaccactcaacagtctgattgcaggcgacaaaaaagcggtgacgttgttagcggaggataaactcgacgatctgctcgataaaatgagcggttacgtcaagcgagaacagcggatcttgctgttagcgcgttaccatcatttgaagccagcggcgctggaaaaggctgcaacacgctggcctcatcttcagctcgatttcatgactattcatgccagcaaagggcagcaagcagattacgtcattatccttggtcttcaggacggtgatgatgcgtttccggcttcggcgcgtgagtcgattatggagcaggcactgctaccacaaccggaggattttgccgatgcagaagagagacgtttgctgtatgtcgcacttacgcgcgcgcgtctgcgggtctggttgttgtttaataaagagcagccgtcaccgtttgttgatatgttgaaggcgctggacgtgccggttgcgagaaagccgtaa

SEQ ID NO: 173952 - DNA, 474 bp, Klebsiella oxytoca
atgtggaatgaaatgatggaactaacaacacgtacactgccagcacgtaaacatattgcgctggttgctcacgatcactgtaaagatatgctgatgaaatgggtagagcgccaccagcaacttctggcacaacatacgctatcggcaacaggtacaaccggtaatctggtatcacgcgcaaccgggctggaggtgcacgctatgctgagcggcccaatgggcggcgaccagcaggtaggagccctgatatcagaaggtaaaattgatgttttgatttttttctgggacccgctgaatgcggtgccgcatgaccctgatgttaaagcgttactccgtctggcaaccgtgtggaatattcccgttgcaacgaatgtctcgaccgccgactttatcatccagtctccccactttagcgatccggtcgatattttgattcctgattaccagcgttatctcgctgagcgtctgaaataa

SEQ ID NO: 173953 - DNA, 414 bp, Klebsiella oxytoca
atgaaagagaacgatatcgcaggtattctgacctcgacccggactatcgccctggtgggggcaagcgacaaacccgatcgcccaagctatcgggtgatgaagtaccttctggagcagggatatcatgtcattccggtttctcctaaggttgcgggtactacgctgctggggcaaaaaggatatgccacgctggccgaggtgccggaaaaagtggacatggttgatgtcttccgcaactcagaagcagcctggggcgttgcccaggaagcggtggctatcggtgctaaaactttgtggctacagctaggggtcatcaatgaacaagcggcagtgctcgcccgagatgccggtctaaacgtggtgatggatcgctgtccggcgatagaaattccgcgattaggattagcccgctaa

SEQ ID NO: 173954 - DNA, 702 bp, Klebsiella oxytoca
atgtctttaagcgcacagcagttggcggcacaaaagaacatctcctgggtattagcggagaaactagctcaaaaaatcctgaccggggaatacccgccagaaagtatccttcccggagagatggaactgggtgagcagtttggcgtgagccgtacggccgtgcgtgaagcggttaaaacgcttgcggcgaaagggatgcttttacctcgtccacggatcggaacgcgggtgatgccccgcagcagctggaactttctcgataaagaactactcgcctggtggttaacggaagataatttcgctgaagttgtcggccatttcctcgttatgcgcgaaagcctggagccccaagcctgttttctggcgtcaacctcaggcacgccggagcagaaggctcaactcaatgctttgatggaggagatggttgagctaaagaggaactttcagcgcgagcgctggattgaggtcgatatggcctggcatgaacatatatatgaaatgagcggcaatcctttcctgacctctttcgcttctttatttcattcggtttaccacacctacttcacttcgattacccaaaatgaagtggtgaagctggatctccatcaggcaatcgttgatgccattctggatagcgacggcttgcgagcgctgagcgcctgccaggcgttgttgagtgcccccaaccattccgacaaatag

SEQ ID NO: 173955 - DNA, 1398 bp, Klebsiella oxytoca
atgaccaaaaagaaagcccgcagtatggccgggctgccatggatcgcagcgatggctttttttatgcaggcgcttgacgctaccattctgaatacggcccttcccgctatcgcccatagccttaaccgttcaccgcttgcgatgcaatcggccattatcagctacacattgacggtagccatgctaatcccggtcagcggttggctggccgaccgcttcggcacgcggaaagtatttatcatcgccgtcagcctgtttaccctcggttccctggcctgcgcgctttccaactccctgatggaactggttatcttccgcgtcattcagggcatcggcggagcgatgatgatgccggttgcgaggctggcgttactgcgcgcctatccgcgcagcgaactgctgccggtactcaacttcgtcaccatgcctggcctggtcggccctatcctcggccccgtgctcggcggcgtactggtgacctgggcaagctggcactggatattcctgattaatattcccatcggcattatcggaatcgtctacgctcgcaagtacatgccggatttcaccacgccacgacgtcgcttcgacacgctcggttttatcctctttggcctgagcctggtgctgttttccagtggaatcgagctgtttggcgagaagattgttgccacctggatggctctggccgttatcgccctgagcatcgttttaatgtgggcctatattcgccacgctcgccgtcatcccacaccgctcatttcgctatccttatttaagacgcataccttctctgttgggatcgcgggaaacctggccacgcgcctgggcaccggctgcgttccgttcctgatgccgctgatgctccaggttggcttcggctatccggcgattattgctggctgcatgattgcgcctacggctatcggttccattattgcgaaatcaaccgtcacccagatacttcgctggttcggctaccgtaaaacgctggttggggtcacggtattcatcggcctgatgatcgctcagttttcgctgcaatctccggatctgtcgatctggatgctgctgctgctgctattcgttctggggatggcgatgtccactcagttcacttcaatgaataccatcacgcttgccgatttaaccgatgaaaacgccagcagcggcaacagcatgctggccgttactcagcaactctctatcagtctcggggtcgccgttagcgcggcggtgctgaggttttatgaaggatttgatagcgcaaataccattgagcaatttcattacacctttattaccatgggggctatcaccgtggtatcggcgctggtatttactttattaagagcaaaagatggccgcaacctgattaaggagcggcataagcgttag

SEQ ID NO: 173956 - DNA, 984 bp, Klebsiella oxytoca
atgaaggatgtagcccgcatagcgggcgtttccacttcgacggtttctcatgtcatcaacaaagatcgtttcgttagcgaagcaattaccgctaaagtcgatgccgcgattaaaagcctgaactacgcgccgtctgcgctggcgcgcagccttaaattaaaccaaacccgcaccataggcatgcttattaccgccagtaccaacccgttttattcggagctggtgcgcggcgtggaacgtagctgctttgagcgaggctatagcctggtgctgtgtaataccgaaggcgatgagcagcggatgaaccgtaatcttgagacgctgatgcaaaagcgcgtcgatggtttactcctgttgtgcactgaaactcatcagccttcgccggaaattatgcagcgctatccttctgtaccgacggtgatgatggactgggcgccgttcgacggcgatagcgatctgattcaggataactctctgctcggcggcgatatggcgacccagtatctgattgaccagggctatagtcggattgcctgtatcgcgggtccgctggataaaacgccagcccgattgcgcctggagggatatcaggctgcgatgactcgagccggacttgcggtaccggaaggatatgtgattagcagcgattttgaatttggcggcggattcagcgccatgcagacgctgctgacgctgtcagagctaccgcaggcagtatttgtcggtaacgatgcgatggcggtgggcgcctatcaggccctttaccagagcggcctgcgtattccgcaggacatggcgctggtgggttatgacgacatcgaactggcgcgctatatgacgccgccgctaaccacaattcatcaaccgaaagatgagctgggcgaactggccatcgatgtgctgattcaccgcatggccgatccgggacaaaaacagcagcgcgtgcagttaacgcctgagctggtggttcgtggctcagcctaa

SEQ ID NO: 173957 - DNA, 1032 bp, Klebsiella oxytoca
atgtgcgattcggatcggcgacggtccgagggacaacataataaagaaaagcagggcatgcgccaccggatcccggtggcgcgctttccgggaatattgattatgaaaaccgcaggcaaacttgtcgtccttggcagtatcaacgccgatcacatcctgaatctcgacgccttcccaacgcctggtgaaaccgttaccggtcatcactatcaggtcgcttttggcggtaagggcgcaaaccaggccgttgctgccggacgcagcggggctaatatttcctttatcgcctgtaccggcgatgacgacattggcgagcgcgttcgtcaccagctggaaagcgacaatattgacgtttcgccggtcagagccgtcaccggagaatcaaccggcgtggcgctgatttttgttaacgctgaaggtgagaatactatcggtattcatgccggtgctaatgccgcgctctccgttgcgcaggttgatgcggaaaaagagcgtattgctggcgcgcaggcgctgctgatgcagctggaatcaccgctggaaagcgtactggccgcggcgaaaatcgctcaccagaatcaaacctcagtcatcctcaatccggcgccggcacgtgaattgcccgatgagctgctcacgctggtagatatcattacccctaacgagaccgaagcggaaaagctcaccggcgtgcgcgtggaaagcgacgatgatgcggcaaaagccgccaaagtgctccatgataaaggtatcggtacggtgatcattacccttggcagccgtggcgtatgggccagctgcgaaggtgaaggtcgtcgggtgcccggctttaaagtgcaggcggtagataccatagccgctggcgatacctttaatggtgcgctggtcaccgcgctgcttgaaggtagtgaactggcgcaggcgattcgttttgcccatgccgccgccgctatcgccgtcacccgcaaaggggcccagccctccgtgccctggcgaaaagaaatagacgaatttttacgtcaacaggggtaa

SEQ ID NO: 173958 - DNA, 891 bp, Klebsiella oxytoca
atgaatatgaaaaaactggcgaccctggtctctgctgtagcgttaagtgcgaccgtaagcgcaaacgcgatggcaaaagatactatcgctctggttatctctacccttaacaacccgttctttgtctcgctgaaggatggcgcgcaaaaagaagcggacaaacttggctataacctggtggtactggactcccagaataacccggccaaagagttggctaacgttcaggatttaaccgttcgtggcaccaaactgctgctgatcaaccctacggattccgatgcggtgggtaacgccgtgaagctggctaatcaggcgaaaattccggttatcaccctcgaccgtcaggcgtcaaaaggcgacgtggtaagccatattgcatctgacaacgtgctgggcggtaagatggccggcgactatatcgcgaagaaagtcggcgaaagcgcgaagatcattgaactacaaggcattgccgggacctccgcggcgcgcgaacgtggtgaaggtttccagcaggccgttgctgcgcacaagtttaacgtactggccagccagccggcagattttgaccgtaccaagggtctgaacgtcatgcagaacctgctgacggcgcatcctgatgtgcaggcggtatttgcccagaacgatgaaatggcgctgggcgcgctgcgtgcgctacaaacggcaggcaaatctgatgtgatggttgttggatttgacggcacgccggatggcgaaaaagcggttaatagtggcaaactggctgcgaccatcgcccagctaccggagcagatcggcgttaaaggcgttgagaccgccgataaagtgctgaagggcgaaaaagtggataccagctacccggttgagttgaaactggtcattaagcaataa

SEQ ID NO: 173959 - DNA, 966 bp, Klebsiella oxytoca
atgaataacccggctgtttctggtcgtcgctacttcacaaaagcgtggctgatggagcaaaaatcgctgattgccctgctggtgctgattgcgattgtctcgaccatgagccccaacttttttaccgtgaataacctgttcaatattctgcagcagacttcagttaacgccattatggcggtagggatgacgctggttatcctgacgtcgggtatcgacctgtccgtcggttctctgctggctctgaccggcgcggttgctgcttcaattgtcgggattgaggtcaacgcgctggtggccgtggccgctgcgctggcattaggcgcggctatcggcgccgtgaccggcgtgattgtggcgaaagggcgcgtgcaggcatttatcgctacgctggtcatgatgctgctgctgcgcggcgtgacgatggtgtataccaatggaagcccggtaaataccggctttaccgacaacgccgatctgttcggctggttcgggattggtcgtccgctggggatcccaacgccggtgtggattatggcgatcgttttcctggccgcctggtacatgctgcaccatactcgcctgggccgttatatttatgcgctcggcggtaacgaggcggcaacgcgcctttccggcatcagcgtgaataaagttaaaatcatcgtctattctttgtgcggcatgctggcctcgctggccgggattattgaggtcgcgcgtctctcttccgcgcagccgacggcgggcacaggatatgaactggatgcgattgcggcggtggtgctcggtggtaccagcctcgcgggcggtaaaggccgtattgtcggcacgctgattggtgcgttgatccttggctttctgaacaacggcctgaatttattaggcgtttcatcctattaccagatgatcgtgaaagcggtggtcattttgctggcggtactggtagataacaagaagcagtaa

SEQ ID NO: 173960 - DNA, 1506 bp, Klebsiella oxytoca
atggaagccttattgcaattaaaagggatcgataaatcgttccctggcgtcaaggcgctctccggcgcctcgctaaacgtatatccgggccgcgtgatggcgctggtcggggaaaacggcgccggtaaatccacgatgatgaaagtgttgaccggcatttactcccgcgatgccggttcgctgctgtggttgggtaaagagaccaccttcaacggtcccaaatcttctcaggaagccggaattggcatcatccaccaggagctaaacctgatcccccaattgacgatcgccgagaacattttcctcggccgtgaatttgtgaatcgctttggcaaaatagactggaaaacgatgtacgccgaagccgataagctgctggcaaagctgaatctgcgttttaacagccagaagctggtgggggatttatcgataggcgatcagcaaatggttgagatcgctaaggtgctgagctttgagtcgaaggtcatcattatggatgagcccaccgatgcgttgactgacaccgagaccgaatccctgttccgcgtaatccgcgaactgaaatcgcaggggcgcggtattgtctatatctcccaccgtatgaaagagatcttcgagatttgcgatgacgtcacggtatttcgcgatgggcagtttatcgccgagcgtgaagtggccagtctggatgaagatctgctgattgagatgatggtcggccgtaagctggaagatcagtacccgcatctggacaaagccccgggcgctgttcgtcttaaggtcgacaacctgtgcggttcgggcgtggaaaatatctcctttattctgcgtcagggcgagattctcggcgtcgccgggctgatgggcgccgggcgcaccgagctgatgaaggtgctgtacggtgcgctgccgcgcagcagcggttcggtcacgctggatggacgcgaagttgttacgcgttccccgcaggatggtctggccaacggaatcgtctacatctcagaagaccgtaagcgcgacggtttagtgctcggcatgtcggttaaagagaacatgtcgctgaccgcgctgcgttacttcagccgcggcggcggtagtctcaagcacaaagatgaacaacaggcggtgagtgattttatccgcctgtttaacgtgaaaacgccttcgatggagcaggccattgggctactttccggcggtaatcagcagaaggtcgcgatagcccgcgggttgatgacccgcccgaaggtattgatccttgatgagccgacccgcggcgtcgacgtcggggcgaagaaagagatctaccagctgattaatcagttcaaagccgaaggtctgagcatcattctggtctcttcggagatgccggaagtgctgggcatgagcgatcgcatcatggtgatgcatgaagggcatctcggcggtgaattcacacgcgagcaggccacccaggaagtattgatggctgccgctgtgggcaagcttaatcgtgtgaatcaggagtaa

SEQ ID NO: 173961 - DNA, 420 bp, Klebsiella oxytoca
atgaaaaaaggtaccgtcctcaatgctgaaatttcgtcggtcatctcccgcctgggtcataccgatacgctggtagtttgcgatgccgggttacctgttccccgcagcagcgcccgtatcgatatggcgttaacccacggggtgccctcctttatgcaggttctggaggtggtgactagcgaaatgcaggttgaagcggctatcctcgcggaagagattaaaacgcttaatccgcagctccacgcgacgttgctcaatcatcttgagcagctgcagcaacaccagggaaacaccattgaaattcgttacaccagccatgagcagttcaaaaaagaaaccgcagatagtcaggcggtgattcgcagcggggaatgttccccgtatgcgaacgttattctctgtgccggcgtgacgttctga

SEQ ID NO: 173962 - DNA, 1869 bp, Klebsiella oxytoca
atgagcactgataataagcaatcgctgccggcaataacgctggcggcaatcggcgtggtatacggcgatatcggtaccagtccactgtatacacttcgtgaatgtctgtccggccagtttggctttggcgttgagcgtgatgctgtttttggcttcctgtcgctcattttctggctattaattctcaccgtatcactcaaatacatcaccttcgtgatgcgggcagacaatgccggcgaaggcgggatcctgacgttaatgtcgctggcggggcgaaacacctccgcgcgcgcaacctccatcctggtgatccttgggcttatcggcggcagcttcttttatggcgaggtggtgattacgcctgccatctcggtgatgtcggcgatagaggggctggaaattatcgccccggacctggatacctgggtggttcccatatccatcatcgttctgacgctgctatttgccattcaaaagcacggtaccagcatggtcggtaagctgttcgcgccgattatgctgatctggttcctgctgctggcggtactgggcgcgcgcagtatctttgctaacccggaagtgctgcaggcgctgaatccttactgggcggtacactttttcctcgaatataaaaccgtctcgtttgtggcgctgggcgcggtagtgctgtcgattaccggcgtggaggcgctgtacgcggatatggggcattttggtaaactgccgattcgcctggcctggttttcggtagtactgccttcactggtgcttaactactttggtcagggcgcgctgctgctcaaacacccggaagcgattaaaaacccgttctttctgctggcgcccgagtgggcgctcattcccatgctgattattgccgccctggcgacggttatcgcttcacaggcggttatctctggcgtcttctcgctaacccggcaggcggtgcgcctggggtacctgtcgccgatgcggattattcatacttcggaaatggagtccgggcagatttatattccgtttatcaactggctgctctatatctcggtggtcatcgtcattgttaactttgagcactcctcgaatctggcggcggcctacggtattgcggtgacggggacgatggtgctgaccaccattctgttcacgacggtagcgcgtcaaaactggcactggaataagttcgttgtggcgctgctgctggttgcctttatgtgcattgatatcccgctcttctccgcgaacctcgataaaatcgtctccggcggctggctgcctctgaccctcggcctggtgatgtttaccatcatgaccacctggaaaagcgagcgtttccgccttctgcgtcggatgcatgagcacggtaattctctggaagcgatgatctcttctctggagaaatcgccgccggtccgcgttccgggtaccgccgtctatatgtcgcgggcgctgaacgtcattcctttcgcgctgttgcataaccttaagcataataaggtgctgcacgagcgggtgattttgctcacgctgcgtactgaagatgcgccgtacgtgcataacgttcgtcgcgtacagattgagcagatttcgccgtcgttctggcgcgtcgtagccagctacggctggcgggaaacgccgaatgtcgaagaagttttccaccgctgtgggctggaaggcctgagctgccggatgatggagacctccttctttatgtctcatgagtcgctgatcatcggcaagcggccatggtacctgcgcctgcgcggcaagctttatcttctgctgcagcgcaacgctctgcgagcgcctgaccagttcgaaatcccgccgaatcgggttattgagctcggcacccaggttgaaatctga

SEQ ID NO: 173963 - DNA, 1500 bp, Klebsiella oxytoca
atggctcaatcacatttactggcagaaagaatttcccggctcagcgccgctctggaaaaaggactcttcgaacgcagccacgccattcgcctttgcctgcttgccgcactcagcggcgagagcgtttttctgctgggtccaccgggcattgccaaaagtctgatcgcccgacgcctaaaattcgccttccagcaggctcgcgcatttgagtacctgatgacgcgtttttccacgccggaagaagtttttggcccgctctccattcaggcgctaaaagatgaaggacgctacgagcgtttgaccgcgggttatcttccggaagccgaaattgttttcctcgatgagatctggaaagctggcccggcgatcctcaatacgctgctgacggcaataaacgaacgtcatttccgcaacggggcaaccgaagaaaaaatccctatgcgcctgctggtggcggcgtcgaacgaactccccgaagcagacaacagcctggaggcgctatacgatcggatgcttatccgtttatggctggataaggttcaggataaaaccaacttccgctcaatgctgataagccagcaggacgagaacagtaaccccgtcccggcgaatctacaggtcagcgacgaggagtttcagcaatggcagcaggatatcggcagcgttaagctgccggacagcgtttttgaacttattttccagctgcgccagcagttagatacgctgccgaacgcgccgtacgtctcagatcgtcggtggaaaaaagccattcgtctgctgcaggccagcgcctttttcagcggccgcgacactatcgcgccaatagacctgatcctgctgaaagattgcctgtggcacaatattgagacgatgaacctgatgtccgcgcagctggagaccttaatgaccagccacgcctggcagcagcaggcgatgctcactcgcctggggtcgattatccaacgacgtattcagcttcaacagcagcaaagcgataaaaccgcgctaaaagtaaaccgtcttggcggtatgttcagccgtaaacctcattatgaactgcccgctgaagttcaggagcccacgttgacgctgctcctccagcagccgcttaagctgcacgacctggaagtgattcatattacgtttgttcgtgaagagcttgctcactggctggagaaagggggtgagattcgcggcaagctcaacggtattggttttgcccagccgctgaatatggatgtcgataccagccagcatctggtcgtgcgcgatgtcagcttacaggggtcgcgactttccctgcccggtagcgaatcgcgggaaaatatgccggccgaaatccggcagcagctggaagcgctggacgacgaatggcatcagcaacataaccgcttcagcgaacagcagaaatgtctgtttattcccggtgagtggctgggacgcattgaggccagcctgcaggacgtcggagcgcagattaaacaggcgcgtcagtcatga

SEQ ID NO: 173964 - DNA, 1449 bp, Klebsiella oxytoca
atgacgctggacatgctgaatgtcatgctggcagtcggcgaagagggtatgatcgatgagatgctgctggcgctgctggcggcacctcaactggcggtattctttgaaaaattcccgcgcctaaaaaatattatcgccgccgacattccgcgctggcgggaagcggtcagatcgcgacttaaagagaccaatatcccccccgagctggatgcggaggttcagtgttatcagcaatcacagcggctttctacctcgcagtttatcgtccagcttccgcaaattttgagccagctgcataagctgcactccccttttgccagccaggcccagcagctggtggataacaacagcacctttacgccagcgctgcacacgttattcctccagcgctggcgcttgagtctggtggtgcaggcaacctcacttaatcagcaactgctggatgaagagcgcgatcagctactgagcgaagttcaggaacgcatgaccctcagcggccagctggagccggtgctggtggaaaatgacaatgcggcgggacacctgtgggacatgagcgctggcgagctgaagcgaggcgactatcagctgatcgtgcgctacggcgactttctaagccaacaacccgagctcatgcagctcgctgaacagctgggacgctcacgtgaagcgaaagcggtgccgaaaaaagatgcgccgatggaaacctttcgcagcctggtgcgcgaaccggccaccgtaccggaacaggtggacgggcttcagcagagcgacgatattctgcgtttgttgccgccagagctggctaccctcggtatcaccgagctggagttcgagttctatcgtaagctggttgaaaagcagctgctgacctatcggcttcacggcgatgcgtggaaagaaaagatcaccgaacggccggtcactcgccaggattttgatgaacagccgcgcggaccctttatcgtctgcgtcgatacttccggctcaatgggcggttttaatgaacagtgcgccaaggcgttttgtctggcgctaatgcgggtcgctctggcggataaccgccgctgctttattatgctgttttccagcgaggtggtgcattacgaacttaccggtccgcaggggctggaacaggcgatccgctttctgagccagcgcttccgtggcggcaccgatctggccagctgtttccgggcagtgattgagcgtatgcagaatccgcagtggatcgatgccgatgcggtagtcatttcagattttatcgcacagcgcttgccggatgaggtgatcaataaggtgggagagctacagcataaacatcagcatcgctttcatgcggtggcgatgtcggtacacggcaagcccggtattatgcgcattttcgatcatatctggcgctttgataccgggctgcgtagccgcctgctgcgacgctggcggcgttaa

SEQ ID NO: 173965 - DNA, 993 bp, Klebsiella oxytoca
atgaaaaccgcatacatcgcaaaacaacgccagattagtttcgttaagtcacacttttcccgtcagcttgaagagaagctcggcctgatcgaagttcaggcgccgatcttaagccgcgtgggcgatggaactcaggataacctttctggttgcgaaaaagcggttcaggttaaagtgaaaacactgccagacgcccagttcgaagtggttcattcactggcgaagtggaagcgtcaaaccctgggacaacacgacttcagcgcgggcgaagggctgtacacgcacatgaaggcccttcgccccgatgaagaccgattaacgcccatccattccgtttacgttgaccagtgggactgggagcgcgtaatgggtgacggagaacgccactgcggaacgctgaaatcgaccgttgaagcgatctatgccgggatcaaagctaccgaagacgccgtcagtaaagaatttggcctcaagccgtttctgccggagacgatccagtttgttcatagcgaggagcttttaagccgctatccggatcttgatgccaaaggtcgtgaacgggcgattgctaaagagctgggggcggtattcctgatcggtatcggcggcaagctttccgatggtcagcgccacgatgttcgcgcgccggattatgatgactggagcacgccggctactgaaggctatgccggtctgaacggcgatattctggtatggaaccctgttctggaagatgccttcgagctctcttcaatggggatccgcgtggatgccgaagcgctgaagcgccagcttgcgattaccggtgatgaagatcgcctgaagctggaatggcaccaggcgctgctgcgcggagagatgccgcagactatcggcggcggcattggtcagtctcgtctgacgatgctgctcctgcagcttgaccatatcggccaggtacagtgcggcgtatggccgacacaggttcgtcaaagcgttgccgctcttctttaa

SEQ ID NO: 173966 - DNA, 459 bp, Klebsiella oxytoca
atggaaaattatcagatcgacaatctggaccgcggcatccttgaggccttaatggccaacgcgcgcaccgcttatgctgaactggcaaaacagtttggcgtcagtccgggaaccattcacgttcgcgtggagaagatgaagcaggccggaattatcactggcgcacgcattgacgtgagcccaaagcagctgggctacgatgtgggatgttttatcggcatcattctgaaaagcgccaaagactatccctcggcgctggcgaggttaaacagtctggatgaggttaccgaagcgtattacaccaccgggcactacagtatctttataaaagtcatgtgccgatcgatcgatgcgctccagcatgtacttatcaacaagatccaaacaattgatgaaattcagtccaccgaaacgctgatcgtgctgcaaaacccgatcatgcgtaccatccgcccgtga

SEQ ID NO: 173967 - DNA, 441 bp, Klebsiella oxytoca
atggcagagataactcttatcagcggcagtacgctgggtagcgcagaatatgtgtcagaacatctggcggaaaagctggaagaggctggtcacagtacgactattcagcacggcccgctgattgacgatctacaggcggaagggatctggctggttatctcttctactcatggcgccggcgacattcccgataacctgctgcctttttatgaagtgcttcaggaaaagcagatcgacctttctgcggtccattttggcgcagtcggtatcggtagtcgtgaatatgacaccttctgcggagcgattgataagctggagtcggcgctgaaggcctgcggggcaaaacagattggcgaaacgctaaaaattaacgtcctcgaacatgaaattccggaagatccggctgaggtctggctgggatcctggcaaaaattgctctga

SEQ ID NO: 173968 - DNA, 1890 bp, Klebsiella oxytoca
atgttttatcaggatccttttgacgtcatcatcattggcgggggtcatgcaggcactgaggccgcaatggctgcagcgcgaatgggtcaacagactctgcttttgacacacaatatcgacacgctggggcaaatgagctgcaacccggcaattggcggcattgggaaaggacacctggtaaaagaagtggatgcgcttggcggcctgatggggaaggccattgaccatgccggtatccagtttaggatactaaacgccagcaaaggcccagccgtacgggcgactcgcgctcaggccgatcgcgtgctttatcggcaagccgtacgcacggccctggagaatcagcctaatttgatgatcttccagcaggccgttgaagatctgattgttgagaacgatcgcgtggtgggtgctgttacccagatggggcttaaattccgcgccaaagcggtagtgctgaccgtagggacattcctcgacggtaagatccatatcggactcgataactacagcggcggtcgcgcaggcgatcctccgtcgatcccgctgtcccgccgtttacgtgaactgccgctacgcgtcagccgcctgaaaaccggtaccccaccgcgtattgatgcgcggaccattgatttcagcgttctggctcagcagcacggcgacgatccaatgccggttttctcgtttatggggaatgcttcccagcacccgcgtcaggtaccgtgctatgtcacgcataccaacgagaaaacccacgacgtgatccgcaataacctcgatcgtagcccgatgtatgccggcgtgattgaagggatcggccctcgctactgtccttcgatcgaagacaaggtgatgcgttttgccgatcgtaatcagcatcagatcttcctcgagccggaaggactgacgtcgaacgaaatttatccaaatggcatctccaccagcctgccgtttgatgtccagatgcaaatcgtccgctcaatgcaggggatggaaaatgcaaaaatcgttcgccccggctacgctatcgagtacgatttcttcgatccgcgtgacctgaaaccaacgctggaaagtaaatttatccatggcctgttctttgcaggccagattaacggcactaccggttatgaagaagcggccgctcagggcctgctggcaggcctgaacgcagcccgcttctctgccgaaaaagagggatgggcgccgggtcgctcccaggcctaccttggcgttctggtggacgatctgtgtacgctcggtaccaaagagccgtaccgcatgtttacttcacgtgcggaataccgcctgatgctgcgtgaagacaatgccgatctgcgcctgactgagcaaggccgtgaactgggtctggtagatgatgaacgctgggcgcgtttcaacgagaagcttgagagtattgaacgtgaacgtcagcgcctgaaatccagctgggtaaatccgctggcggaaagtgccgctgaagttaacgcacagctgacggcgcctttgtctcgcgaagctaacggtgaagatttgctccgtcgtccggaaatgacctacgaacagctggtgaaaatgtcgccattctcgccgggtcttgaagacaagcaggccgcggaacaggttgagattcaggtaaaatacgaaggctacatcgcgcgccagcaggatgagattgagaaacagcagcgcaatgaaaacacgttgctgcctgccacgcttgattatcgccaggtgaatgggctgtcgaacgaagtcattgctaagttgaacgaccacaagccgtcttcaatagggcaggcatcgcgtatttccggcattacgcctgcggcaatctcgattttgctggtgtggttgaaaaagcagggaatgctgcgccgtagcgcctga

SEQ ID NO: 173969 - DNA, 624 bp, Klebsiella oxytoca
gtgatcaacaaactttctcgtctgcttgatgaagcgggtatttcacttaccgatcaccagaaaaatcagctggtcgcctatgtaggcatgctggataagtggaataaggcctataacctgacctcggttcgcgatccggatgagatgctggtacgccacattctcgatagcattgttgttgcgccataccttaaaggaacgcgttttatcgatgtgggtaccgggccgggtctgccggggatcccgctggctatcgtacgccctgaatctcatttcaccctgctggatagcctcggtaaacgagtacgtttcctgcgacaggtccagcatgagttaaaactggataacatcacgccggtacaaagccgcgtggaagcgtttccggctgaaccgccgtttgatggcgtgatcagccgcgcttttgcgtcgctgaatgatatggtgagctggtgccatcatttaccggcgcaggacggtcacttctatgcgctcaaagggttagcgcaagaagatgaaatggccaatcttccggaagggtttgccattagtgatgttttcgaactgcatgttcctcagctggatggtgagcgtcaccttgtggtggtccagccaaaaatgatttaa

SEQ ID NO: 173970 - DNA, 381 bp, Klebsiella oxytoca
atgtcagtgtcgctcttgagtcgaaacgttgctcgtaagcttctgtttattcagttactggcggtaatagcaagtggactgctgttcagcctcaaagaccctttctggggcatctccgccgttagcggaggtttggcggttcttttgccaaatatgatttttatgatttttgcctggcgtcatcaggcgcatacacctgctaaaggccgagtggcctggaccttcgctctcggcgaagctttcaaggtgttgttgaccttcgccctactggcggtggcgctggcggttttcaaagtggtgtttttgccgctgatagtgacgtgggttttggtgctggtggtacaagttctggcgccagctgtaattaacaacaaagggtaa

SEQ ID NO: 173971 - DNA, 816 bp, Klebsiella oxytoca
atggcttcagaaaatatgacgccgcaggaatacataggacaccatctgaataaccttcagctggacctgcgtactttctcgctggtggatccgcataaccccccggccaccttctggacgctcaacattgactccatgttcttctcggtggtgcttggtctgttgttcctgcttatgttccgtagcgtagccaaaaaggcgaccagcggcgtaccgggaaaattccagacctttatcgagatgatcatcggcttcgtccatggcagcgttaaagacatgtaccacggcaagagcaaggttatcgctccgctggccctcaccgtgttcgtttgggtattcctgatgaacctgatggacctgctgcctatcgacctgttgccatacatcggtgaacacattttcggcctgccagcactgcgcgtggttccgtctgcggacgtcaacatcaccctgtcgatggcgcttggcgtgtttatcctgattcttttctacagcatcaaaatgaaaggcgtgggcgggttcgttaaagaactgaccctgcagccgttcaatcactgggcgttcattcctgtcaacttaatccttgaaggggtaagcctgctgtctaaacctgtatctctgggtctgcgactgttcggcaacatgtatgccggtgagctgattttcattctgattgctggtctgttgccgtggtggtcacagtgggttctgaatgtgccgtgggccattttccacatcctgattattacgctgcaagccttcatcttcatggttctgacgatcgtctatctgtcgatggcatctgaagagcattga

SEQ ID NO: 173972 - DNA, 240 bp, Klebsiella oxytoca
atggaaaacctgaatatggatctgctgtacatggctgccgctgtgatgatgggtctggcggcaatcggtgctgcgatcggtatcggcatcctcgggggtaaattcctggaaggcgcagcgcgtcaaccggatctgattcctctgctgcgtactcagttctttatcgttatgggtctggtggatgctatcccgatgatcgctgtaggtctgggtctgtacgtgatgttcgccgtcgcgtag

SEQ ID NO: 173973 - DNA, 471 bp, Klebsiella oxytoca
gtgaacatgaacgcaacaatcctcggccaggccatcgcgtttgttatcttcgtatggttctgcatgaagtatgtatggccgccgttaatggctgccatcgaaaagcgccagaaagaaatttctgacggtttagcttctgcagaacgcgctaagaaagatttggaccttgcacaggccaacgcgaccgaccagctgaaaaaagcgaaagcggaagcccaggtaatcatcgagcaggcgaacaagcgtcgctctcagattctggacgaagccaaagctgaagcagaacaggaacgcactaaaatcgtcgcacaggcgcaggctgaaatcgatgccgaacgtaaacgtgctcgcgaggagctgcgtaagcaggtcgctatcctggctgttgctggcgccgagaagatcatcgaacgttccgtggatgaagctgctaacagcgacatcgtggataaacttgtcgctgaactgtaa

SEQ ID NO: 173974 - DNA, 534 bp, Klebsiella oxytoca
atgtctgaatttgtaacggtagctcgcccctacgccaaagcagcttttgactttgccgtcgaacaccaaagcgtagagcgctggcaggatatgctggcgtttgccgctgaagtgactaaaaacgaacaaatggcagagctactctctggcgcgctggcgccggaaacgctctctgatgcgtttatcgcggtttgtggtgagcaactggacgaaaacggtcaaaacctgattcgggtaatggctgaaaatggtcgtctgaatgcgctccctgatgttcttgagcagttcattcacctgcgcgctgccagtgaggcaaccgcagaggtagaagttatttctgccgctcagatgagcgaagaacagcttgcgaaaatcaccagcgcgatggaaaaacgtctgtcacgcaaagttaagctgaattgcaaaatcgataagtctgtaatggcaggcgttatcatccgtgcgggtgatatggtcattgatggcagcgtacgcggccgtcttgaacgccttgcagacgtcttgcagtcttaa

SEQ ID NO: 173975 - DNA, 1542 bp, Klebsiella oxytoca
atgcaactgaattccaccgaaatcagcgaactgatcaagcagcgcattgctcagttcaatgttgtgagcgaggctcataacgaaggtactatcgtttctgtaagtgacggtgttatccgcattcacggcctggccgattgtatgcagggtgagatgatcgctctgccgggtaaccgttacgctatcgcactgaacctggagcgcgactccgttggtgcggttgtgatgggtccgtacgctgacctcgccgaaggcatgaaggttaaatgtactggccgtatccttgaagttccggttggccgcggcctgctgggacgtgtggttaacactctgggtgcaccgattgatggtaaaggtccgctggagcacgacggcttctctgccgttgaagctatcgctccgggcgtaatcgaacgtcagtccgtcgatcagccggtgcagaccggttataaatccgttgatgccatgatcccaatcggtcgtggtcagcgtgaactgatcatcggcgaccgtcagaccggtaaaaccgctctggcaatcgacgccatcatcaaccagcgtgattccggcatcaagtgcgtctacgtggcaatcggccagaaagcgtccaccatttctaacgtggtgcgtaaactggaagaacacggcgcgctgtctaacaccatcgttgtggttgcaaccgcatctgaatccgccgcgctgcaatacctggctccgtatgccggttgcgcaatgggtgaatacttccgtgaccgcggtgaagatgcgctgatcatttatgatgacctgtctaaacaggccgttgcttaccgtcagatttccctgctgctccgccgtccgcctggacgtgaagcattcccgggcgacgtattctacctccactctcgtctgctggagcgtgctgcacgtgttaacgtcgaatacgttgaagctttcaccaaaggtgaagtgaaaggtaaaaccggttctctgaccgctctgccgattatcgaaacccaggcgggtgacgtttctgcgttcgttccgaccaacgtaatttctattaccgatggtcagatcttcctggaaaccaacctgttcaactccggtattcgtcctgcggttaacccgggtatctccgtatcccgtgttggtggtgcagctcagaccaagatcatgaagaaactgtccggtggtattcgtaccgcgctggcacagtatcgcgaactggcggcgttctcgcagtttgcttctgaccttgacgatgcaacccgtaagcagctggaccacggtcagaaagtaactgaactgctgaaacagaaacagtatgcgccgatgtccgttgcgcagcagtctctggttctgttcgcggcagaacgtggttatctggcggatgtagagctggcgaaaatcggtagctttgaagccgctctgctggcttacgtcgaccgtgatcacgctccgttgatgcaagagatcaaccagtccggtggctataacgacgaaatcgaaggcaagctgaaaggcatcctcgattccttcaaagcaacccaatcctggtaa

SEQ ID NO: 173976 - DNA, 864 bp, Klebsiella oxytoca
atggccggcgcaaaagagatacgtagtaagatcgcaagcgtccagaacacgcaaaagatcactaaagcgatggaaatggtcgccgcttccaaaatgcgtaaatcgcaggagcgcatggcagccagccgtccttatgcagatacgatgcgcaaagtgatcggtcaccttgcgaacggtaatctggaatataagcacccttacctggaagaacgcgacgttaaacgcgtgggctacctggtggtgtctaccgaccgtggtctgtgtggtggcttgaacattaacctgttcaaaaagctgctggcggaaatgaaagcatggtccgataaaggcgttcagtgcgaactcgcaatgatcggctcgaagggcgtgtctttctttaattccgttagcggtaatgttgtcgcccaggtgacgggtatgggggataacccatccctgtccgaactgatcggtccggtaaaagtgatgttgcaggcctacgatgaaggccgtctggacaagctgtatattgtcagcaacaaatttattaacaccatgtctcaggttccaaccattactcagctgctgccgttaccggcttcagaagatggtgagttgaagcgtaaatcctgggattacctgtatgaacccgatccgaaagcgctgctggataccctgctgcgtcgttatgtggaatctcaggtttatcagggcgtggtagaaaacctggccagcgagcaggccgcacgtatggtggcgatgaaagccgcgaccgacaatggcggcagcctgattaaagagctgcagttggtatacaacaaagctcgtcaggccagcattactcaggaactcaccgagatcgtcggtggagcatccgcggtataa

SEQ ID NO: 173977 - DNA, 1383 bp, Klebsiella oxytoca
atggctactggaaaaattgtccaggtaatcggcgccgtggtcgacgtcgaattccctcaggatgccgtaccgcgcgtgtacgaggctcttgaggtacaaaatggtagtgagaatctggtgctggaagttcagcagcagctcggcggcggtattgttcgtaccatcgccatgggttcttccgacggtctgcgtcgcggtctggaagtcaaagacctcgagcatccgatcgaagtcccggtaggtaaagcaacgctgggtcgtatcatgaacgtactgggccaaccggtagacatgaaaggcgacatcggcgaagaagagcgttgggcgattcaccgcgcagcgccttcctacgaagagttgtcaaactctcaggaactgctggaaaccggcatcaaagttatcgacctgatgtgtccgtttgcgaagggcggtaaagttggtctgttcggtggtgcgggtgtaggtaaaaccgtaaacatgatggagctgatccgtaacatcgcgatcgagcactccggttactccgtgtttgcgggcgtaggtgaacgtactcgtgagggtaacgacttctaccacgaaatgaccgactccaacgttatcgataaagtatccctggtgtatggccagatgaacgagccgccgggaaaccgtctgcgcgttgcgctgaccggcctgaccatggctgagaagttccgtgacgaaggtcgtgacgttctgctgttcgtcgataacatctatcgttacaccctggccggtactgaagtatccgcactgctgggtcgtatgccttcagcggtaggttaccagccgactctggcggaagagatgggcgttctgcaggaacgtatcacctccaccaaaacgggttctatcacttccgtacaggcggtatacgtacctgcggatgacttgactgacccgtctccagccaccacctttgcgcaccttgacgcaaccgtggtactgagccgtcagatcgcttctctggggatttacccggcagttgacccgctggactccaccagccgtcagctggatccgctggttgttggccaggagcactacgacaccgctcgtggcgttcagtccatcctgcagcgttatcaggaactgaaagacattatcgccatcctgggtatggatgaactgtctgaagaagataaactggtggtagctcgcgcacgtaagattcagcgcttcctgtcccagccgttcttcgtggcagaagtatttaccggttctccgggcaaatacgtctccctgaaagacaccatccgtggctttaaaggcatcatggaaggcgaatacgatcacctgccggagcaggcgttctacatggtcggttctatcgacgaagccgtggaaaaagccaaaaaactttaa

SEQ ID NO: 173978 - DNA, 420 bp, Klebsiella oxytoca
atggcaatgacttaccacctggacgtcgtcagcgcagagaaacaaatgttctctggtctggtcgagaaaatccaggtaacgggtagcgaaggtgaactgggtatttacccggggcacgcgccgctgctcaccgccattaagcctggtatgattcgcatcgttaagcagcacggtcacgaagaatttatctacctgtcaggcggcattcttgaagtgcagccgggtagcacgaccgttctggctgatacggcaattcgtggccaggatctcgacgaagcgcgagccctggaagcgaaacgtaaggctgaagagcacattaagagctctcatggtgacgtggattacgctcaggcgtccgcggaactggccaaagcgatcgctaaactgcgcgttatcgagttgaccaaaaaagcgatgtaa

SEQ ID NO: 173979 - DNA, 2172 bp, Klebsiella oxytoca
atgaataacaaaatacctttggcattaaccctttgcagtacgatgatcgcgctaccgctgcaggccaacgaaggccctcagtggcgcgctatcgccttcgggcaatccacggacagcaatttttcctcgaatgttctgcctgaaaagattggcgtcaatgatgtcactatcgccggtaaaaaactgacgccgcaggacgtcgccgatctcagccaacccattactattgaaagccggggaggtaaaattgccaactcccacgacggactgaccttcttttatacccaacttccgaccagtcagaattttatcctgcaggcaacggtgaccgtcaatcagtttggcccggaaaatggcgctcgcccggcagcacaggaaggggcaggactgctggtgcgcgatgtaataggagttccgcgtcaacagccgctgaaggtcggttatgaagagttcccggcggcgtccaatatggtgatgaacgccattatgacgcaggataaaaaagatcactcgcatattaagctgcaggctatcagccgggaagggataacccaaccgtggggcaatgcgggggcatcaataaagcgtcagagttataaagaaaaaatcgatatacagcaaacgccgacgttccagctcaggctggaacgcaccaacgacgggtttattacttcctgggcagcgacgggcagtgaaaaatgggtaagccagcaggttcctcacgccgatctgattgctcaacaggataaagaacattactacgtcggtttttttgcttctcgtaacgctaaaatcaccgtcagcaacgcctcgctcaccacgtcagcggcaaatactgttccctctgcgccgtacatcgctaaaagctggccgccggtcatgcaaattgcctcgggaacaaaaagccaggacaaaaagtacatcctacaggcgcgtaccaatagtgacgggcgcatcaccgttcgccaggatgaagtggtgatcgggcaggataaagccgtgaaagccggtgagatgtttacccagcctgccgttctgaaagataaaagcacgttcgaagttacctttacgccgaccaccagcgcaaaaacgctgacccagacgctgacggtggaacagagtgccaatatcacaggcaatacgctctatgctgcacctgaggggcaagcgcaggccaaaggcacggcagagtcgccgttggatttagcctccgccgtcgagctcgtacccgctggcggggaaattatattagccgccggagactacccgcaaaccgtcatccctctgagcgccagcggcctgaaagacaaaaccaagaccctgaaagccaccggtaaagcggtaatacacgggctactactggatgccagctactggtatatcaatggagtagagattacggataagagcctgcgcatacagggtagccataacctgattgagaacgtcaccgcttatcgtaacgatgataccggcattcaaatttcctcaccggcggatgtaggacgcccgctgtgggccagctataaccgggtggtgaattcagaatcctttagcaacgaagatccaggaaaaataaacgccgatggcttcgctgtaaaaatgcgcgtaggagaggggaaccggctggaaggctgttactcgcacgataacatcgacgacggtttcgatctgtttaataagattgaggacggtgcaaacggcgttgtggtgatcgagaactctattgcccgcaataataccagcaacggttttaagctcggcggggaagggcagccggttgctcatgaggtacgtaacagcatcgccatcgggaaccatctcgacggtttcaccgacaacttcaatcccggcaagctggtagtggtcaacaacgtcgcggtggataaccagcgctttaactacctgttccgcccaagcccatacggcgcgccggaaacccagggcacgttcagcgagaacctttccttacgtagccagccggggaaatatgacgatgccgttgtcgggaatatcgacgatagcaactactttatccacggtggtaaaagcatcaacgctcaaggaaaaagcattaacagcgccgattaccagactctggcgctgcctgacccgctaatacgtgaggctgacggcagcttcaataccggtaacttcctcagccgtaattaa

SEQ ID NO: 173980 - DNA, 1371 bp, Klebsiella oxytoca
atgtcaaacagtccgatgagcgtggtgattcttgccgcaggcaagggtacccgcatgtattccgatcttcccaaggtgctgcattcgctggccggcaagccaatggttcagcatgtcattgatacggctaaagaattaggtgcttccgctgtccatctggtctacgggcacggcggcgatctccttcgccagacgctgcacgaagataagctaaattggatcttacaggctgaacagctgggtaccggccacgccatgcagcaggcggcgccgttcttcaaagatgatgaagatatcctcatgctgtacggcgatgtaccgttgatttccgtcgaaacattaaagcgcctgcgagaagcgaaaccgcagggcggcatcggtttgctgacggtgaagctggacgatccgaccggctatggtcgcattacgcgccataacggcgcggtaaccggcattgttgagcataaagacgccagcgaagagcagcgtcggattcaggaaattaataccggaattctggtcgccaacggggcggatctcaaacgctggctggctaagctgaccaataataacgtgcagggcgaatattacattaccgatattatcgccatggcctatgccgaaggtcgcgaaatcgcggcagtccatcctcagcgcctaagcgaagtggaaggcgtgaataaccggctgcagctatcccgcctggaacgcgtctggcagtctgaaaaggcggaggaacttctgctcgcaggcgtaatgcttcgcgatccggcgcgttttgacctgcgcggcgtgctgaaacacgggcgcgatgtcgaaatagatactaacgttattctcgaggggcatgttgtactgggcaatcgggtgaagatcggctccggctgcgtgatcaagaacagtaccattggcgatgactgcgagatcagtccttataccgtagtggaagatgctcatcttgaggcagcctgtactatcgggccgttcgcacggctgcgccctggcgcggagctcctggaaggcgcgcacgtcggcaactttgtcgaaattaaaaaggcgcgtctggggagaggcacgaaagccgggcatctttcctacctcggagacgctgagattggcgataacgtcaatatcggcgccggcaccatcacctgtaactatgatggcgcaaataaacataaaacggtgatcggcgatgacgtgtttgttggttcggacagccagctggtcgctcccgtgaccatcggcaagggagtcaccattgctgcaggaacgacggtaacgcgcaacgttgccgacgatgagttagttttaagccgcgtgccgcaggttcataaacagggctggcagcgcccggtgaagaagaagtaa

SEQ ID NO: 173981 - DNA, 1830 bp, Klebsiella oxytoca
atgtgtggaattgttggcgcagtcgcgcagcgtgatattgctgaaatccttctcgaaggtttacgtcgtctggaataccgcggttatgactccgccggtctggcagtcgtcgataacgaaggtcatatgaaccgcgttcgtcgccttgggaaagtccagatgctggcccaggcgttggaggaacatccgttgcacggtgggacgggaattgcccatacccgctgggcgacgcacggcgaaccctctgaaggcaacgcgcatccgcatatttctgaccatattgtggtcgtgcataacggaattatcgagaaccatgagccgctgcgcgagctgttgcagtcgcggggctacgttttcgcctccgagactgacaccgaagttattgcgcatctggttcactgggagctggaacaaggcggcaccctgcgtgatgctgttctgcggactatcccgcagcttcgcggcgcttacggtaccgtgattatggattcccgcgatccgggtacgctgctggccgctcgttcgggcagcccgctggttattggcctggggatgggagaaaacttcattgcctccgatcagctggcgctcctgccggttacccgccgctttatcttcctcgaagagggggatattgcggaagtcacccgtcgttcggtcactatctttgataaatccggcgccgaagtgctgcgcccggatattgaatccagtctgcagtatgatgcaggcgataaaggtatctatcgccactatatgcagaaagagatctacgagcagccgaacgcgatcaaaaataccctctccgggcgcattagccacggtgaagttgatttaagcgaactgggcccgcaggctaacgagctgctgtctcaggttgagcatattcagatcatcgcctgcggtacctcctacaactcaggaatggtttcccgttactggtttgaatcgctggccggtgtgccgtgtgatgtcgaaatcgcttctgagttccgctatcgtaaatcggccgtgcgtcgcaatagcctgatgatcaccctctcgcagtccggcgaaacggcggacaccctcgcaggtctgcgcctgtctaaagagctgggctatctgggctcgctggcgatttgtaacgtgccgggttcatcactggtgcgggagtccgatctggcgatgatgaccaatgccgggacggaaatcggcgtcgcttcgactaaagccttcactacgcaattgaccgttctgctgatgctggtggcgaaactggcgcgtcttaagggccaggatgccgcgattgaacacgatatcgtgcatggcctgcaggcgctgccgaaccgcattgagcaggtgctctcgcaggacaagcgcattgaggcgctggctgagaatttctctgataaacatcacgcgctgttcctcggacgtggcgatcagtaccccattgcccttgaaggggccctgaagctgaaagagatctcctatattcacgcggaagcctatgccgctggcgagctgaagcacggtccgctggcgctgattgatgcagaaatgccggtggttgtggtcgcgccgaacaacgaactgctggaaaagctgaaatctaacattgaagaggttcgcgcccgcggcggccaactgtacgtctttgctgacggcgatgcgggtttcaccagcagcgataatatgcacatcattgagatgccgcacgttgaagaggtgatcgcgccaatcttctatactgtaccgctgcagctgctggcttatcacgtcgcactgatcaaaggaactgacgtcgatcagccgcgtaacctggcgaaatcggtgaccgtggaataa

SEQ ID NO: 173982 - DNA, 1041 bp, Klebsiella oxytoca
atgaacgttatgcgtaccaccgtcgcaacagttgtcgccgcgaccttatcgatgagtgctttctctgtttttgcagcagcaagcctgactggcgctggcgcaactttccccgcgccggtgtatgccaaatgggcagatacctataacaaggaaacgggtaataaaatcaattaccagggtattggctcctctggcggcgtaaaacaaattacggccaacaccgtagatttcggtgcctctgatgcccctctggctgacgacaaactggctcaggaaggtctgttccagttcccgaccgtgatcggcggcgtggtgctggcgatcaacctgcctggcgtgaaatcaggcgagctggtgcttgacggtaaaacgttgggtgatatctacctgggcaaaatcaaaaaatgggatgacgaagcgattgctaagctcaacccgggtatgaagttgccttctcagaacatcgcggttgttcgccgtgcggatggctccggcacctccttcgttttcaccagctacctggcgaaggtgaacgaagagtggaaatctaaagtcggcgcgggttcaaccgttaactggccgaccgggctgggcggtaaaggcaacgacggcatcgccgcgttcgttcagcgtctgccgggctcaatcggctacgtagaatatgcctacgcgaaacagaacaacctcgcttataccaaactgctgtctgccgatggcaagccggtgagcccgacggaagacaacttcgctaacgcggcgaaagaaatcgactggagcaaatcctttgcacaggatctgactaaccagaaaggtgacaatgcctggccgatcacttctaccaccttcatcctggttcacaaggcttccaacaagccagagcaaaccgctgaagtgctgaagttcttcgactgggcgtataagaacggcggtaaagaagctaatgcgctggattatgccaccctgccggatagcgtggttgagcaagttcgcgcagcatggaagaccaacgtaaaggacagcagcggtaaagcgctgtactaa

SEQ ID NO: 173983 - DNA, 960 bp, Klebsiella oxytoca
atggctgcaaccaagccggcatttaaccctccggggaaaaagggtgacataattttcagcgtgctggtaaaactggcggcgctgattgtgctattgatgcttggcggcatcatcgtctcccttatcatctcgtcctggccaagcattgagaaatttggctttgcctttctgtggaccaaagagtgggatgcaccaaaccagattttcggcgccctggtgcccatttacgggacgctggtcacctcatttatcgcgctgctgatcgccgtaccggtgagcttcggtatcgcgctgttcctgacggaactttcacccgcctggctgaagcgcccgctgggtatcgctattgaactgctggccgccatccccagtatcgtttacggcatgtggggtctgtttattttcgctccactgtttgcgacttactttcaggagccggttggcaacgttttgtcgaccattccgttcgttggcgcgctctttgcgggtccggcgtttggtatcggcattctggcggccggcgtcattctggccatcatgatcattccttacatcgctgccgttatgcgtgacgtttttgaacagacgccggtaatgatgaaagagtccgcatacggtatcggttgtacaacatgggaagttatctggcgtatcgttctgccctttaccaaaaacggcgtgattggcggggtgatgctcggattggggcgcgcgctgggggaaaccatggcggtaacctttattatcggcaacacctaccagctcgatagcgcttcgctgtatatgccaggtaacagcatcacctccgcgctggcgaatgagtttgccgaagcggaaaccggactgcacgttgcagccttgatggaactgggtctgattctgttcgttatcacctttattgttctggccgcatcaaagtttatgatcatgcgcctggctaagaacgagggggcacgctaa

SEQ ID NO: 173984 - DNA, 891 bp, Klebsiella oxytoca
atggcgacgattgaattacaaaccaccgcagagctggcggaatcccgtcgcaaaatgcaggcgaaacgccgcatgaaaaaccgcctcgccctgacgctatcgatggcgaccatggcgtttggcctgttctggcttatctggatcctgatgtccaccgtcactcgcggcatcgacggcatgagcctggcgctgtttaccgaaatgacgccgccgcctaatacggcgggcggcggtctggcgaacgccctggcaggtagcggattgttgatcctgtggtcgacggttatcggtacccctctgggcattctggcggggatttatctggcggaatatggccgtaaatcctggctggctgaagtcattcgttttattaacgacatcctgctttccgcgccgtcgattgtggtcggtctgtttgtatacaccatcgtcgttgcgcaaatgcagcacttttccggctgggcgggcgtgattgcgctggcgctgctgcaggtgcctatcgtgattcgtactactgaaaatatgctgaagctggtgccggatagcctgcgcgaagcggcctatgcgctcggtacgccaaagtggcgaatgatttctgcgatcaccctgaaagcatcggtctccggcattatgaccggtatcctgctggccattgcccgtatcgccggggaaacggcgccgctgctgttcaccgcgctctccaatcagttctggagcaccgacatgatgcagccgatcgctaacctgccggtaacgattttcaaatttgccatgagtccctttgcggagtggcagcaactggcatgggccggggtattgattatcaccctgtgcgtattgctgctgaacattctggcgcgcgttattttcgcgaagaataaacacggttaa

SEQ ID NO: 173985 - DNA, 774 bp, Klebsiella oxytoca
atgagtatggtgaatacgaccccgggtaagctttcagttcgtaacctgaacttctactacggaaaattccatgccctgaaaaacatcaacctggatatcacaaaaaaccaggtgacggcgtttatcggtccgtcaggctgcggtaaatccacgctgctgcgtacgttcaacaaaatgtttgagctgtacccggagcagcgtgcagaaggtgaaattctgctggatggcgataatattctgaccaatacccaggatatcgcgctgctgcgtgccaaagtcggcatggtattccagaagccgacgccgttcccgatgtctatctatgacaatatcgcctttggcgtgcgtctgttcgagaaactctcccgcgcggatatggacgagcgagtgcagtgggctttgaccaaagccgcattatggaatgaaaccaaagataaactgcatcagagcggatattctctctccggcggtcagcagcagcgtctgtgtatcgcgcgcggtatcgctattcgtccggaagtgctgctgctggatgagccctgttcggcgctggacccgatctctaccgggcgtattgaagagctgatcaccgaactgaaacaggattacaccgtcgttatcgtgacccacaacatgcagcaggccgcgcgttgctccgaccatacggcgtttatgtatcttggcgagctgattgaattcagcaacacggacgatctgtttaccaaacccgctaagaagcaaactgaagattatattactggccgctacggttga

SEQ ID NO: 173986 - DNA, 726 bp, Klebsiella oxytoca
atggataacctaaatcttaataaacatatttccggccagttcaatgccgaactggagtacatccgcacccaggtcatgaccatgggtgggctggtggagcagcagctttctgatgctatcaccgcgatgcataaccaggacagcgaactggcaaagcgcgttatcgacggcgataagcaggtcaatatgatggaagtggcgatcgatgaagcctgcgtgcgcatcatcgccaagcgtcagccgaccgccagcgacctgcgcctggtgatggcgattatcaaaaccatcgccgaactggaacgtatcggtgacgttgcggataaaatctgccgcacagcgctggaaaaattctcccagcagcaccagccgctgctggtgagtctggaatcgctggggcgccataccgtgcagatgctgcacgatgtgctggatgcttttgcccgtatggaccttgatgaagcggtgcggatttatcgtgaagataagaaagtcgaccaggaatatgaaggtatcgtgcgccagctgatgacctatatgatggaagattcgcgcactattcccagcgtcctgaccgcgctgttctgcgcccgctcgattgagcgtattggcgaccgctgccagaatatctgcgaatatattttctacttcgttaaaggtcaggatttccgtcacgttggcggcgacgaactggataaactgctggcgggaaaagatcctaaagagtaa

SEQ ID NO: 173987 - DNA, 1647 bp, Klebsiella oxytoca
atgtttaaaaaaaatctgattacatctgccatacttattatggcgccgctcgcttattcgacgcatgctctggcggaatcgctaacggtcgaacagcgccttgagcttctggaaaaggcgcttaaagatacgcagtccgaacttaaaaaatataaagatgaagagaaagccagaaatcaaatctggatcgccaatacgcagtccggcaccaacacacaacgtgcttctacgcaggttgccagcgctcccgcaccggccggcggcgcagaaaaaccagccgcggttctggtgaaaaacgaacagcccgcggcgaatggcgagtccatttatagctcgatgacaatgaaggatttcagcaagtttgtgaaggatgaaattggcttcagctataacggctattaccgttccggctgggggaccgcatctcatggttcaccaaagtcctgggcgattggctcgctcggtcgcttcggtaatgaatactctggctggtttgatttacagcttaagcagcgggtctatcaggaagacaataagcgggttgatgccattgtgatgcttgacggtaacgtcgggcagcagtattcctccggctggtttggcgataacgctggcggcgagaactatatgcagttctctgatatgtacgtaaataccaaaggtttcctgccattcgcaccggaggcggatttctgggtgggtaagcacggcgcgccgaaaattgaaatccagatgctggactggaaaacgcagagaaccgatgccgcagcaggcattggtcttgaaaactggaaagtgggcgcgggtaaatttgatatcgcgctggtgcgcgaggacgtcgatgactacaaccgcacgttgaccaaaagccagcaaattaacaccaatactattgatattcgttataaagagatccctctttgggataaagcatcactgatggtcagcggtcgttatgtcgcggccaatcagagctcatctgagaaatataatgaaggtaataatggatattatgaatggaaagatacctggatggcgggaacgtcgttaacgcagaagtttgataacggcggatttaacgaattttccttcctgctggcaaataactccatcgccagcagcttctcgcgctacgcgggatccagcccgtataccacctttaacggcagatactatggcgatcacaccaacggcaccgccgttcgtttgacctctcagggagaaacctatttgagtgatgacatcattctggcgaacgccatcgtttactcttttggtaatgatgtctacagctacgagaccggcgcgcactctgattttgagtctattcgcgccgtcgtgcgcccggcctggatttgggataaatataaccagaccggcgttgagctgggctatttcaagcagcagaacaaagatatcaccggcaagaaatataacgaatccggctacaaaaccaccctgttccatacctttaaagtgaataccagtatgctgacctcccgcccggaaattcgtttctatgcgacttatattaaagcgcaggatatcgacctggataaggcagccaacagcaatactcgcagcatttttgaagacggtaagaacgaccagtttgccgtaggcgcccaggctgaaatctggtggtaa

SEQ ID NO: 173988 - DNA, 1167 bp, Klebsiella oxytoca
atgaaacgacatgctatttacttcgctctggcgctggcaggcgctgcgtttaccactcatgccgcgccattcccggccaccccgagcgcggcgatcccggtcagccagtatattacccaggttaacggcgataagagcattaccttccgcctgtttgccccggatgcaaaacgggtatccgtggtaacgggggcaacgccggataccttcgtctcccatgatatgaccaaagacgagcaggggatctggacatggaaaagcgaaacgatgaccccgaacctttacgaatattatttcgatgtcgacggattccgttctgtcgataccggtagccgctatcaaaaaccgcagcgacaggtgaataccagcctgattctggttcccggcagcattcttgacgatcgcgcggtggctcacggcgagctacgaaccctgacctatcactcaaaggccctgaattctgagcgtcgcgcctacgtgtggacgccgccaggctataccggtagcggcgagccgctgccggtgctctacttctatcacggttttggcgacagcggcctgtcggctatcgatcagggacgtatcccgcaaatcatggataacctgctggcggaaggcaaaatcaagcccatgctggtagtggtgccggataccgaaaccgatattcctgaagcggttgcggaaaacttcccgccgcaggagcggcgtaaaaccttctatccgctgaatgcgaaagcggctgataaagagctgatgaacgatattattccgctgattgatgagcgctttaacgtgcgtaaagacgcggatggccgggcgcttgccgggctgtcgcagggcggttatcaggcgttggtctccggaatgaaccatctggagagcttcggctggctggcaaccttcagcggcgtaacgacaacgacggtaccggatgccggcgttgaagcacagctaaaccagccgcaggcgatcaacaagcagctgcgtaactttaccgtcgtcgtgggtgagaaagacgtggtcaccggtaaagatatcgccggcctgaaagcggagctggagaagcagaaaatcaactttgattaccatgagtatccgggcctcaaccatgaaatggacgtctggcgcccggcctacgccgagttcgttcagaagttgttcaaataa

SEQ ID NO: 173989 - DNA, 723 bp, Klebsiella oxytoca
atgaaattaatcgtgacggaagattatgcggagatgagcctggtcgccagccatcacgttctgggctatatcaccgcgccgcgcagggtgaatctggcggtgacggcaggcagtacgccgaaaaaaatgtatgaatatctgacggccgcgattaaaggtaaaccgttctattctcaagtccattattacaactttgacgagatcccatttcgtggacaggatcgtgaaggcgtgaccatttccaatttgcgcaatctgtttttcactcccgctcagatcccggaagagaacattcacaagctcagccatgaaaactttatgcatcacgaccagcgattacaggaagaagggggcctcgatctgatggtgatgggcctcggcgccgacggccatttttgcggtaacttgccgaataccacgcgcttccacgatgcgacggtggaagtccctatcgtcggagatatggtggggcttgtcgctcacggcgaaatgggcggcgacttctctgcggtgccggatagctacgtcacgatggggccgaaaagcgttatggcggcgaaaaacctgctgcttatcgtcagcggcgccgcaaaggcgcgggcgctacaagaggtgattgaaggcgaagtcagcgagcgggttccggcatcagtgctgaaactgcatccatccctggtgatagtggctgataaagcggcggctgcggaattgagacaaccgtaa

SEQ ID NO: 173990 - DNA, 666 bp, Klebsiella oxytoca
atgacccaaccagaagcagtatttttcgactgtgacggcacgctggtcgacagcgaggtgatctgctcccgcgcctacgttcacatgttcagggaattcggcattacgctggatttagaggagatttttaagcgcttcaagggcgtaaagctgtacgagattatcgacaccattaacgcggagtacggcgttaatctggataaggcgacccttgagccggtgtaccgcgatgaagtcgcccgcctgtttgatagcgaactggaagtcatctctggcgcccaggcgctactggacgcggtcagcgtgccgatgtgcgtggtctccaacggtccggtgagcaaaatgcagcactctctgggtaaaaccggaatgctgcaccattttcccgagcgtctttacagcggctatgatattcagcgctggaagcccgatccggccctgatgctgcatgccgcaaaagcgatgaacgttaacgtcgaaaactgcattctggttgatgattccagcgcaggcgcgcagtcagggattgccgccggaatggaggtgttctacttctgcgccgatccgcataataagccgatcgaccatccgaaggtgacgacctttacccgcctggaagagctacctgaactatggcaagcgcgcggctggaatataacgcgataa

SEQ ID NO: 173991 - DNA, 1338 bp, Klebsiella oxytoca
atgagtcaacaacaaaccagccagtcttctggccagggtctgctggagcgcgtgttcaaactgcgtgaacacggcacgacggcacgcaccgaagcgattgcaggtttcaccacctttctgacgatggtgtacatcgttttcgttaacccacagatcctcggcgtggcgggtatggataccagcgccgttttcgtcacaacctgtctgattgctgcattcggtagcatcatgatggggctgttcgctaaccttccggtggccctggcgccggcgatggggctaaacgccttctttgcttttgtcgtggtacaggcgatgggcttgccctggcaggtcgggatgggcgcgattttctggggcgccgttggcctgctcctgctgacgattttccgcgtgcgctactggatgattgcgaatattccggttagcctgcgcattggtatcaccagcggtatcggcctgtttatcggtatgatgggcctgaaaaacgcgggcgttatcgtcgccaacccggaaaccctggtgagtattggcaacctgacgtctcatagcgtgctgttgggtattcttggcttctttattattgctattctggcttcccgcaacatccacgcggcggtgctggtttctatcgtggtcaccactttgctgggctggatgctgggtgacgttcactacagcggcatcgtttccatgccgccgagcgtaacgacggtcattggccatgttgacctggcaggttcgctgaatcttggcctggcaggagttatcttctcgtttatgctggtgaacctgttcgactcctccggcaccctgatcggcgtaaccgacaaggccggcctggccgatgctaagggcaagttcccgcgtatgaagcaggcgctgtttgtcgatagcgtatcctccgttgcggggtcttttatcggtacctcttccgtcactgcctatattgaatcttcctctggggtttccgtgggcggccgtaccggcttaaccgccgtggtggtgggcattttgttcctgctggtgatcttcctgtcgccgctggcgggcatggtccctccttatgccgcagccggcgcgctgatttacgttggcgtcctgatgacgtccagcctggcgcgcgtgaagtgggatgatttaaccgaatccgttcctgcgtttattaccgccgtgatgatgccgtttagcttctccattacagaaggtattgccttaggctttatctcttattgcgtgatgaagattggcaccggccggctgcgcgatctcagcccgtgcgttattgtagtttcactgctgttcgtgctgaagattgtgtttattgacgcgaaataa

SEQ ID NO: 173992 - DNA, 567 bp, Klebsiella oxytoca
atgtctgatacgttgaaagttgttacgttactcggaagtctgcgcaaaggctcttttaatgccatggtcgcacgtaccctgcccggcatcgcgcccgcgggtatggaagtttccgcgttaccgtccattggcgatattcctctctatgatgccgacgtgcagcaggaagagggtttcccacaaagcgttcaggatatcgcgcagcaaattcgtgaggcggatggcgtggttatcgttacgccggaatataactactcggtgcccagcggcctgaaaaacgccatcgactggctgtctcgtctcccggaacaaccgctatccggcaagccggttctgatccagaccagctctatgggggccattggcggcgcgcgctgccagtatcatctgcgtcagattctggtattcctcgacgcgatggtgatgaataagcccgagtttatgggcggcgtgattcagaataaagtggatccgcaggaggggaaagttgtcgatcagggcacgctcgatcatctgaccgggcagcttagcgcttttgccgagtatattcagcgagttaaggcctga

SEQ ID NO: 173993 - DNA, 738 bp, Klebsiella oxytoca
atggcaacgcattttgcaagagggatactcaacacccgggagccgctatccacacgcctgtcagcggcctgtcatcaatccgccagacgcctgcctgagtaccgacaaagccgatatcgcgcatcccggtcactcctcgcagaactcctctttatgttgtacggcatcagtgaactccccgaaattattgacgaagagaatggaaaaccggcttttcgcgacgaacatctcccgcgtttctccatctcctatgccggaaatatcgtcggcgttgccttaaccaccgaaggcgattgcggcctggatatggaattgccgcacgcttcccgcgcgttacaggcatcgcacgatacggaacgttacgtatttaacagtaatgagcgaatatggattagcaatcagcacgatcctgacgaagcgcgcgcgcagcttgatgcgttacgcaaaagcgtgatgaagctgaccggcgaaaccgccttgaacctgcagcttctcccgggctccggacggttgcggacaagcgggacgcagtcaatcgaagccgtctgcgacgccgaaacggtgctagtctggtctattgccgccagcccggatattggccagctaaaagtctgggaatataacgcgaaagagggttggcgcagcctgcctgacgcgcaggcccgtgctaaagaaccatccgcccggctgatgcgcttcaccagtttaccggtagaaaaagccttctccctcaactga

SEQ ID NO: 173994 - DNA, 960 bp, Klebsiella oxytoca
atgaagaaacccctgtcgagtctcgatcttaatctgctgctctgcctgcagctcttaactcaggagctcagcgtcacccgcacggcgaaacggatgaacgtctcgccgtcagcggtaagcaaatcgctggccaagctgcgcgcctggtttgacgatccgctgtttgtcaaaacgcctctggggctatcgcccacgccgctgatgagcagtatggagcaggatctggcggactggatgcagatgggcaatcagatccttgataagcctcatcacactatgcccagcgggctaaagtttgagctggcggcagagtcgccgctgctgatgatccttctcaatacgctttcgcagcggatttaccagcgctatcctcaggcgctgatccgcctgcgtaactgggattacgattcgctggatgcgattattcgcggtgaagtcgatatcggattttgcggcagggaaacacatcctcgctcccgggagcagcttagcctgctgccctggtatattgattttgaaatcctgtttaccgatctcccgcaggtatggctgcgcgccgatcatcccgcgctgagcgaagagtggaatctggacacgttcttgcgctatccgcacattaatatttgctgggaacaaagcgacacctgggcgctggacgatgtcctgcaggatctgggacataaacgcaccgtggcgctgaccgttccgggttttgagcagtcgttatttatggccgctcagcccaatcatacgatgctggccaccgctccgcgttactgccagcgttacaatcagcagcaccacctgccgctggtttgcttacctctgccgctggaaccgtcgcagctggagaaaatacgcgtcccctttacccttctttggcataagcgcaacagttataacccgaagatcgtctggctacgggaaacgctcaggcagctctacgccgaaccgctatag

SEQ ID NO: 173995 - DNA, 1185 bp, Klebsiella oxytoca
atggcacgctttcttatctgcagttttgcgctggttctgctttatccatccggcatcgatatgtatctggtcggcctgccgcgcattgcgcaggatctgggggccagtgaagcgcagctgcacatcgccttttcagtttacctggcaggaatggccgcggcgatgctgtttgctggccgtatagccgacaaatccggccggaagccggtggcgattttcggcgccgtcgttttcctgctggcctctcttctttgctcgcaggcgcagggcagcgcccatttcctggccgggcgttttattcagggtattggcgcgggcagctgctacgtggtcgcctttgcggtattgcgcgataccctggacgatcgccgccgggcaaaagtgctttctctccttaacggtattacctgcattattccggttctggccccggtaatcggtcatctgattatgctgaaattcccctggcagagcctgttctataccatgagcggcatgggggctctggtgggattgctgtcgatatttgtgttgcgggaaacgcgaccaacatccgttccgcacgcggcaaagcagcaaaatatcgtcccggagtcgctgctcaatcgctttttcctcagccgaatcgtgatgactactctgagcgtgacggctattctgacctacgttaacgtctcaccggtgctgatgatggaggtgatgggcttcgatcgcggtacctattccatgaccatggcgcttatggcgctcgtgagcatggtggtttcgttttcgacgccgtttgctctgacgctatttaaaccccgcacgctcatgctgacctcacaggcgctgttctttagcgcgggcgtgctgctgagtctgtccaccagccagacggtgacgatgctggggctgggactgatttgcgcagggttctccgcaggctttggcgtggcgatgagtcaggccctcgggccattcaccctgcgcgctggcgtagcgagttcagttttagggatagctcaggtttgcggctcttctctgtggatttggctggcggccatcatcggactcagcgcgatgaatatgctgatcgggatacttattgcctgtagcatagtgagcattgttctgattatggtcgcctctccggcgcgggccgcgcaacgctatgaagaaacccctgtcgagtctcgatcttaa

SEQ ID NO: 173996 - DNA, 465 bp, Klebsiella oxytoca
atgattatcggcgatatccatcacccggaatgcgcaggactatcacccgttctgcttgaggctgtgaggctggccgttaaggcccaaccgcagcagtgtgaacccgggcgttatgatttacagggcgatgatatttatatgaacgtcatgcgcttcgctacgcagccggcggaaagtaaaaaagcggagctgcacaaaaaatttattgatattcagatcctgctggaaggcgaagaaacaatccattatggcgtggtcgatagcgcccgggagtgcgaaacatggcaccacgaggaggactaccggctatgttcaaccattgccgaccagcagcaggtagtgctgaagcccggtatgtttgccattttcttgccgggcgagccgcataagccaggcgtgcagggcgcagagagcgttgagataaaaaaaacggtgattaaagttaatcacacgctgctggcctga

SEQ ID NO: 173997 - DNA, 876 bp, Klebsiella oxytoca
atgaccacgctggcaattgatatcggcggcaccaagctggccgccgcactggtcgatactcagcatcgcgtgctggaaaaacagacgctgtcaacgccagccagcaaaacgccggcggcgctaacggaagcgttacgcgagctggttgcgcctttcgcaggccggccccggcaggtagcggtcgcctccacgggcattattggtcacggcgttctgacggcgttaaacccggataacctgggcgggctggcgcagtttcctcttagggacacgctggcgcagctaacggggctgccgtgcctggcggtgaacgatgcgcaggcggcagcctgggccgaatatcacgctctggctgccgatgcgagcgagatggtcttcatcaccatctctaccggcgtgggcggcggtatcgtctgccacggtaagctcttgtccggcaaggaggggctggccggacatatcggccatacgctggctgacccgcacggcccgcgctgcggctgcgggcgtattggctgcgtggaggctattgcatccggaagggggatcgccgcgctggcaactgacgatctgcagggaatgacggccaaaaccatttttgctctttcgcagagcggccattcccaggcgacatccttagttcaccgttcggcgcaaaccatcgcccggctgattgccgacatgaaggccagctataactgccagtatgccgtcctgggcggcagtatcgggctggcgcccggctatattcctctggttgaaagatatctggcgcaggagcctgcggtatatcacacccctattgtagccgcacactatcagcatgatgccgggctgattggcgcggcgttgttagcagaggacaaagcattatga

SEQ ID NO: 173998 - DNA, 690 bp, Klebsiella oxytoca
atgtctttatttgatgatttggatagtaacgttaaacaattgggtggcctcattgtctcctgccagccggtaccgggtagcccgttagataaacctgaaatcgtcgcggctatggcgctggcggcggtcaatacgggggcggtcgcagtacgaattgaaggccttaacaacctgaaggcgacccgcgagctgatttcagtaccgattattggcatcatcaagcgcgatctgccggactcgccggtgcgcattacgccatttctggaagatgtagacgcgctggcgcaggcgggggcggatattatcgccttcgacggtacggatcgcccgcgtccggttggcgttaaggcaatgattgaccgaattcatcagcgtggctgcgcggcgatggcagactgctccagcctggaggacgggactgagtgccacaatcttggcgcagacattatcgggacaacgatgtccgggtataccacggatgcggtacctaccgaaccggatttcccgctagtgcaggcgctgagcgccaaaggataccgggtcattgccgaaggccgatttaactccccggcgctggcggcgcaggcgataaagcacggcgcatgggcggtgaccgtcggctcagcgattacgcgtctggaacacatctgccagtggtaccgcgatgcgctgactgaggctgcgctatga

SEQ ID NO: 173999 - DNA, 1491 bp, Klebsiella oxytoca
atgagtgaaataataagtaccaaaccatggtataagcacctcaataagtcgcagtggcgggcgttttccgcagcctggctgggctatttactggatggttttgatttcgttttaattgctctggtgctcaccgaagtacaaagcgaattccagctcaccacggtacaggcggcgagtattatctcggcggcgtttatctcccgctggttcggcggcttgctgctgggggcgatgggtgatcgctatggccgccgcctcgcgatggtcagcagtattattcttttctccgtcggtacgctggcctgcggctttgcgcccggatacacctccatgtttatcgcccgtatggtgattggaatgggaatggccggagagtacggctccagcgccacctatgtgattgaaagctggccaaaacacttgcgaaataaagccagcggcttcctgatttccggcttttccgtcggcgctgtcgtagcggcgcaggtttacagtctggtggtccccttgtggggctggcgcgcgttattcttcctcggcattctgccgattattttcgcgctgtggctgcgtaaaaatattccggaaacggaagactggacagagcgccagacgaaaaaaacgccggtgcggacgatggtggatattctctatcgcggtaaatatcgcgccatgaatatgctgatgacgctggccgcaacggccgcgctctggttctgcttcgccggaaacctgcacaatccgctcgtggtgattgcgctggcgctcgtctgcaccatcattttcatcagctttatggtacagagcagcggaaaacgttggccgaccggcgtgatgctgatggttgtcgttctgttcgcctttctctactcctggcctatccaggcgctgttgccgacctatctgaaaaccgagctggcatacgatccgtcgacggtcgcgaaggtgctcttctttagcggattcggcgcagccgtcggctgcatcgtcggcggtttcctcggcgactggctgggcacgcgaaaagcctacgtttacagcctgctggcatcgcaggttctgattattccggtcttcgccatcggcggctccagcctctggggtctgggcatccttctcttcttccagcagatgctgggtcaggggattgccgggatcttaccgaaattgatcggcggctacttcgacaccgaccagcgcgctgccggtctgggtttcacctataacgtaggcgccctgggcggggcggctgcgccggtcctcggcgcgctggtcgcacagcacatgcatctgggtacggcgctggggtcgctctccttcggactgacgtttgtggtgatcctgctgattggtctggatatgccgtctcgagtacagcgctggattcgcccggaagcgctacgtacccatgacgctattgatggtaaaccgttcagcggcgcactggttggtcacaacaaagcgaacgctccgctttgcgataaacactaa

SEQ ID NO: 174000 - DNA, 882 bp, Klebsiella oxytoca
atgacgactccgacttcgccggtcaaagccgggaaaatacttgataccctgggggcgatgcaaagcagtatgacccgcgtcgggaaaagcatcgcgcagtatgtgatcgcttccccgcataaggtgactcagctttcgattgccgatctctcagaggaagtgaacgcgggcgaagcatcggtgatccgtttctgtcgacagctgggctataaaggttttcagaacttcaaaatggaactggccattgagctggccatgaacgatagcgatgacaacagcacgctgctggaggctgaaattcagaaaaccgacgatgcgcacaccatcggcctgaagctccagggcgccatctcgaccgtgctttcggaaacgctaaatctgctggatatggagcaggtggaacgggtcgtggaggcgctgcatacttgtaattgcgcctatatctttggcgttggcgcttccggactgaccgccgaggagatgaagcataagctgatgcgaatcgggctgcgcgtcgatgccttaacaaataatcactttatgtatatgcaggccgcgctgctcaaggttggcgatgtcgccatcggcatcagccactccggacattcgccggaaaccgcgcacgccctcgatctggcaaggcaggctggagccaccaccgtcgccttaacgcataacctcggatcgccattgagtaaagtcgctgatattacgctcattaacggcaaccgacaggggcgcctgcagggtgactctatcggcactaaaacggcgcagctcttcgttctggatctcatttatacgctgctggtgcaaagagacccggaagccgcccgcgcgaataaactgcggacgatggatgctctgtccatgctcaagtag

SEQ ID NO: 174001 - DNA, 891 bp, Klebsiella oxytoca
atgacaaagttaacaggtcttattgccgccccccatacgccttttgatgccaacggcgaagtcaactaccccgttatcgatcggattgccgagcatctgattgcgcagggcgttaaaggtgcctacgtctgtgggacgaccggagaaggcatccactgttccgtagaagagcgtaaaaaaattgccgagcgctgggtcgcggcaagccagggacaattaagcattacgctacacaccggggctctcagcatcgccgatgcgctggagctcagccgccatgctgaaaccctggatatttttgccacctcggtcatcggaccgtgcttcttcaaaccgtcaaccgtcgacgatctggtggaatattgccgtattatcgccgccgccgcgccgtcaaaaggcttctattactaccactccggcatgtcgggtctgagcctggatatggagcagttcctgatcgcggcagcggataaaatcccgaacctgtctggtatgaagtttaactccgcggatatgtatgagttccagcgctgcctgcgcgtcaacaatcgtcagttcgatattccgttcggcgtggatgagtttttacccgcaggcctggcctgcggcgccgtcggcgcggttggcagtacttataactatgcggcgccgctctatcatcgtctgatcgacagctttaaccggggagaccatcaggatgttgctgcctgtatggataaggttatcgcaattattcgcgtcctggttcagtacggcggcgttgcggccgggaagctggcgatgcagctgcacggtattgacgtcggcgatccgcgccgcccgctgcgcccgatgaccagcgagcaaaagcgcgtcgcgttggacgcttttcgcgctgccgattttatttaa

SEQ ID NO: 174002 - DNA, 408 bp, Klebsiella oxytoca
atgttgagtgattacaccctgattgataccgtgccttctgcggaagacttttgccgcctgcgcatcatttctggtatgtcctcgcgcccgctggaaggcgcccgcgcgggactgccgcatagctgctacggcgtgcatatcctctatgagggcgtgcccgttgggatggggcgcatcgtcggcgacggcgcgctgaactttgaaatcgtcgacgtcgccgttgatcccgctcatcagggaaaagggcttggtcgccagatcatgcaaaaaattgtcgcctggctggatgaaaacgcgtttaaaggggcatacgtctcgctggtggcggatgttcccgagctgtacgcaaaatttgggttttccagcgtcaggccagaaagtgaaggtatggcaaagatctggaaataa

SEQ ID NO: 174003 - DNA, 1365 bp, Klebsiella oxytoca
atgagccataacgacactatcgtcgcccaggcaaccccaccgggacgcggtggtgtgggcatcctgcgcatctctggcctgaaggcgcgcgacgttgcgcaggcggtgctgggcaagctgccgaaaccgcgctatgccgactacctgccgtttaaagacagcgacggcagcgcgctggatcagggtattgccctgtggttccccggcccgaactcctttactggtgaagacgtgctggagcttcagggccatggcggccctgttattctcgacctgcttctgaaacgtattctgacgcttccgggtgtgcgcatcgccaggcccggcgagttctccgagcgcgcgtttttgaacgataagcttgatttagcccaggccgaagcgattgctgacctgatcgacgccagctccgagcaggcggctcgttcagcgctgaattcgctgcagggcgcattctctactcgcgtcaaccatctggtggaagcgctgactcacctgcgcatctacgtcgaagcagccattgattttccggacgaagagatcgacttcctctccgatggtaaaatcgaagcccagcttaacgcggttatcgccgatctcgacgccgtgcgcgccgaggcgcgccagggcagcctgctgcgcgaagggatgaaagtggtcattgccgggcggccgaacgccgggaaatcaagcctgctgaacgcgctggcgggccgggaagcggctatcgtcaccgatattgccggaaccacccgcgacgttctgcgcgagcatatccacattgacggtatgccgctgcacatcattgataccgccggcctgcgcgatgcgaacgacgaggtcgagcgcatcggcatcgagcgtgcctggcaggagattgaacaagccgaccgcgtactgttcatggtcgacggcaccaccaccggtgcgaccgatccggcggatatctggccagattttatcgcccgtctgccgaaaaatttgccgattaccgtggtgcgcaacaaagcggatattaccggcgaaacgctggggttgagcgaagtaaatgaccactcacttgtccgcctttcggcgcgtaccggcgagggcgtagacgtgctgcgcaatcatctcaagcagagcatgggttttgagaccaatatggaaggcggctttctggcgcgccgtcgccacctgcaggcgctgtccgatgccgcagagcatctgcagcagggtaaagcgcagctgctgggcgcctgggctggcgagctgctggcggaagagctgcgcctggcccagcagaatctgagcgaaatcaccggcgagtttacctccgacgacctgctggggcgcattttctccagtttctgtattggtaagtaa

SEQ ID NO: 174004 - DNA, 1647 bp, Klebsiella oxytoca
atggattcgcaacgcaatcttcttatcatcgctttgttgttcgtgtctttcatgatctggcaagcctgggagcaggataacaatcctcagcctcagcagcagaccacgcagacaacgaccacagcaacgggtagcgccgccgaccagggcgtaccggccagtggccaggggaaactgattacggtaaaaaccgatgtgcttgacctgaccatcaacacccgcggtggtgatgttgagcaggcgctgcttctggattatccgaaagagctgaaatcaactgagccattccagcttctggaaacttcgccgcagtttacctatcaggcgcagagcggtttaaccggtcgtgatggcccggacaatccggcaaacggaccgcgtccgttgtataacgtcgataaagatgcgtttgtgctggctgatggccagaacgaaatcgtcattccgctcacgtacaccgataaagcaggcaacgtattcaccaaaaccttcaccctgaagcgcggtgaatatgcggtgaacgtcggctatagcgtagagaacgccagcgaaaaaccgctggaaatctcaacctttggccagctgaagcaaaccgctaacctgccgacgcatcgcgacacccagaccggtggcctgactaccatgcacaccttccgtggcgcggcgtactcaacgtctgaaacgaagtacgaaaaatataaattcgatactatcgttgataacgaaaacctgaacgtcagcaccaaaaacggttgggttgccatgctgcagcagtactttactaccgcatgggttccgcagaacaacggcactaacaacttctataccgcgaaccttggcaacggtcttgtggctatcggctacaaatctcagccggttctggtccagccgggtcaaaccgacaagctggaaagcaccctgtgggtcggcccggccattcaggacaaaatggccgccgttgcgccgcatcttgacctgaccgtcgactacggctggctgtggtttatctctcagccgctgttcaagctgctgaaatggatccacagctatctgggcaactggggcttctccatcatcgtcattacctttatcgttcgtggcatcatgtacccgctgaccaaagcgcagtacacctccatggcgaagatgcgtatgctgcagccgaagattcaggcaatgcgcgagcgtctgggcgacgacaagcagcgtcagagccaggagatgatggccctgtataaagcggagaaggttaacccactgggtggctgcttcccgctgattatccagatgccaatcttccttgcactgtactacatgctgagcgcctcggttgaactgcgtcatgcgccgtttatcctgtggatccacgacctgtctgcgcaagacccgtactacatcctgccgatcatcatgggcgcgacgatgttcttcattcagaagatgtctccgactaccgtgaccgacccgatgcagcagaagatcatgacctttatgccggtcatctttacggtgttcttcctgtggttcccgtctggtctggtggtttactatatcgtcagcaacctggtcaccattattcagcagcagctgatttaccgtggtctggagaagcgtggtctgcatagccgcgagaagaaaaaatcctga

SEQ ID NO: 174005 - DNA, 327 bp, Klebsiella oxytoca
ttgttaactcccagtcatttcactttcgtcttccagcagccattacgggctggcacgccgcaaatcaccatcctcggccgccaaaattcgctggggcatccccgcatcggtcttaccgtcgccaagaaaaacgttaagcgtgcgcatgaacgcaatcggatcaaacgtctgacgcgtgaaagcttccgtttacgtcaacatgaactcccgccaatggatttcgtggtggtggcgaagaaaggggttgccgacctcgataaccgtgctctctcggaagcgttggaaaaattatggcgccgccactgtcgcctggctcgcgggtcctga

SEQ ID NO: 174006 - DNA, 1401 bp, Klebsiella oxytoca
gtgtcactttcgctttggcagcagtgtcttgcccgattgcaggatgagttaccagccacagaattcagcatgtggatacgccctttgcaggcggagttgagcgataacacgctggcactgtatgcgccaaaccgttttgtgctcgattgggtaagggataaatacctcaataatatcaatggactcctcaatgatttttgcggtgcggatgccccacagctgcgctttgaagtcggcgcgaagcctgccgttcagatgcagagaggcgcggtaagcgttgccgcggtcgcccctgcgcagcaggttcagacggcgcgcgttgccccgactatcgtgcgtccaggctgggataacgtgccggcgccggcagaaccgacctatcgctccaacgtcaatgtgaaacatacgtttgataacttcgtcgagggtaaatctaaccagctggctcgcgcggcggcgcgtcaggtagcggataaccccggcggcgcgtataacccgctgtttctttatggcggcaccggcctgggtaaaactcaccttttacacgcggttggtaacgggattgtggcgcgtaaacccaacgcaaaagtggtttacatgcactccgagcgctttgtgcaggacatggtaaaagctctgcaaaacaacgccattgaagaatttaagcgctactaccgctccgttgacgccctgctgatcgatgatatccagttttttgctaataaagagcgctcgcaggaagagtttttccatacctttaacgccctgctggaaggcaatcagcagatcatcctgacctcggatcgctatccgaaggagatcaacggggttgaagatcgtctgaaatcacgcttcggctggggtctgacggttgcgatcgaaccgccagagctggaaactcgcgtggcgatcctgatgaaaaaagcggatgaaaacgacatccgcctgccgggcgaagtggcgttctttatcgccaagcgtctgcgctctaacgtacgtgagctcgaaggggcgctgaaccgcgttatcgccaatgccaactttaccggccgggccatcactatcgacttcgtccgcgaagcgctgcgcgatctgttggctttacaggaaaaactggtcaccatcgacaatattcaaaagacggtggcggagtattacaaaattaaggtagcggacctgctgtctaaacgccgctcccgttcggtggcgcgcccacgccagatggcgatggcgctggcaaaagagctgaccaaccacagtctgccggaaatcggcgatgcgtttggcggtcgcgaccataccaccgtcctgcacgcttgccgcaagattgagcagttgcgtgaagaaagccacgatatcaaagaagatttttccaatttaatcagaacattatcctcgtga

SEQ ID NO: 174007 - DNA, 1101 bp, Klebsiella oxytoca
atgaaatttaccgtagaacgtgaacatttattaaaaccgctgcaacaggtgagtggtcctttaggtggtcgtccgacgctaccgattcttggcaacctgctccttcaggttaccgatggcgcgctgtcgctgaccggtaccgatctggaaatggaaatggtcgcgcgcgttgcgctgattcagccgcacgaagcgggagcaacaaccgttccggcgcgtaaattttttgatatctgccgcggcctgcctgaaggcgcggagatcgcggtacagctggaaggcgaacgtatgctggtgcgttccgggcgtagccgtttctcgctctcgacgctgccagcggcggatttccctaaccttgacgactggcagagcgaagttgagtttaccctgccgcaggcgaccatgaagcgcctgattgaggcgacgcagttttcgatggctcaccaggacgttcgctattacttaaacggtatgctgtttgaaaccgaaggcagcgaactgcgcaccgtagcgaccgatggccaccgcctggcggtctgctctatgccgctggaagagtccctgcccaatcattcggtgatcgtgccgcgtaaaggcgtgattgagctgatgcgtatgcttgatggcggcgatacgccgctgcgcgtacagatcggcagcaacaacatccgggctcacgttggcgactttatctttacttcgaagctggtcgatggtcgcttccctgactatcgccgcgtactgccgaagaacccggacaagcatctggacgccggttgcgatattctcaagcaggcctttgcccgggcggcgattctttctaacgaaaaattccgcggcgtgcgcctgtatgtcagtgaaaatcagctgaaaatcaccgccaataacccggagcaggaagaagcggaagaaattctggacgttacctatgccggtacggaaatggaaatcggttttaacgtcagctatgtactggatgtgctgaacgcactgaagtgtgagaacgtacgtattctcctgacggattccgtttcgagcgtgcagattgaggatgcggcttcgcaatccgcagcctacgtcgtcatgcccatgcgattgtag

SEQ ID NO: 174008 - DNA, 1074 bp, Klebsiella oxytoca
atgtcgctatcccgacttctaatcaaagacttccgcaatattgaaaatgcggatctcgccttatcccccggctttaacttcctggttggcgccaacggcagcggcaaaaccagcgtgcttgaagctatctatacgctcggccacggtcgggcgtttcgtagcttgcagattggccgcgtgattcgtcacgagcaggagtcatttgttctgcacggtcgcctgcagggcgaagagcgagaagtcgccatcggtctgacgaaagataagcagggcgacagcaaggttcgtatcgacggcactgacggccataaagtggcggagctggcgcttctgatgccgatgcagctgattacgccagaggggtttactttactcaacggcggccccaaatacagaagagcgttccttgattggggatgcttccacaacgaagccggattctttaccgcctggagcaacctgaagcgcctggtgaagcagcgcaacgccgcgctgcgtcaggtgagtcgctatgcccagctgcggccatgggatctggagctgatcccgctggcggagcaaatcagccgctggcgcgccgaatatagcgccgctattgtcgaagatatggcggatacctgtcggcagtttttacctgagttcgccctcaccttttctttccagcgcggctgggagaaagaaacggattatgccgaggtgctggaacgaaatttcgaacgcgatcgcatgttaacctataccgcgcacggtccgcacaaagcggatttccgcattcgtgccgacggcgcgccggtagaggatacattgtcgcgcgggcagcttaagctgctgatgtgcgccctgcggctggcgcaaggtgagtttttgacccgcgagagcgggcgacgctgcctgtacctgatagatgattttgcctcggaactcgacgacgcgcggcgcgggctgctggccagccgtttaaaagccacgcagtcgcaggttttcgtcagcgccattagcgctgaacacgttatagacatgtcggacgaaaattcgaagatgtttaccgtggaaaagggtaaaatagcggattaa

SEQ ID NO: 174009 - DNA, 2415 bp, Klebsiella oxytoca
atgtcgaattcttatgactcctccagtatcaaagtcctgaaagggctggatgcggtgcgtaagcgcccgggtatgtatatcggcgacacggatgacggcaccggtctgcaccacatggtattcgaggttgtggataacgctatcgacgaagcgctcgcaggttactgtaaagacatcgttgttacgatccacagcgataactccgtctccgtacaggatgacggccgcggtattccaaccggtattcacccggaagagggcgtgtcggcggcggaagtgatcatgaccgttctgcacgcaggcggtaaattcgatgataactcctataaagtttccggcggtctgcacggcgtaggcgtttccgttgttaacgccctgtcgcagaagctggagctggttattcagcgcgataacaaaattcaccgtcaggtttatgcccacggcgtgccgcaggctccgctggcggttaccggcgaaaccgaaaaaaccggtaccatggtgcgcttctggccgagctacgaaacctttaccaacgttgtcgaattcgaatacgagattctggcaaaacgcctgcgcgagctgtcgttcctgaactccggagtgtcgattcgcctgcgcgacaagcgcgacggcaaagaagatcatttccactacgaaggcggtatcaaagcctttgtggaatatctgaacaaaaacaaaacgccgatccacccgaatattttctatttctccactgaaaaagacggtatcggcgttgaagttgcgctgcagtggaacgacgggttccaggaaaatatctactgctttaccaacaatatcccgcagcgcgacggcggtactcacctggcgggcttccgtgcggcgatgacgcgtaccctgaacgcctatatggataaagaaggctacagcaaaaaagcgaaagtcagcgctaccggcgacgacgcccgtgaaggcctgattgccgtggtttccgtgaaggtgccggatccgaaattctcctcgcagaccaaagacaagctggtctcctctgaggtgaaatcggcggtcgaacagcagatgaacgaactgctgaacgagtacctgctggaaaacccgtctgacgccaaaatcgtagtgggcaaaatcatcgatgccgcccgtgcgcgtgaagccgcgcgccgcgcgcgtgaaatgacccgccgtaaaggcgcgctggacctggctggcctgccgggcaaactggcggattgccaggaacgcgacccggcacactctgaactgtacttagtggaaggggactctgcgggcggctctgctaagcaggggcgtaaccgtaagaaccaggcgattttgccgctgaaggggaaaatcctcaacgttgagaaagcgcgctttgacaaaatgctcgcttcgcaggaagtggcgacgctgattaccgcgctgggctgcggcattggtcgcgacgagtacaacccggacaaactgcgctaccatagcatcatcatcatgaccgatgcggacgtcgacggctcgcacattcgtacgctgctgttgaccttcttctaccgtcagatgccggaaatcgttgagcgcggccacgtctatattgcccagccgccgctgtacaaagtgaagaaaggcaagcaagaacagtatattaaagacgatgaggcgatggatcagtaccaaatctccatcgcgctggatggcgcaacgctgcacaccaacgccaacgcgccggccctggccggagagccgctggagagactggttgccgagtataacgccacgcagaaaatgattacgcgtatggaacgtcgttatcctaaagcgctgctcaaagagcttatctatcagccgacgctcgcagaggccgacctggcgaatgagcagaccgtgacgcgctggatcaacgccctggtgagcgagctgaatgagaaagagcagcacggcagccagtggaaatttgatgtccgcgagaacgccgagctgcagcagtttgagccgatcgttcgcgtgcgtacccacggcgtggataccgattatccgctggatcatgagtttgtcaccgggccggaataccaccgtatctgcgcgctgggcgaaacgctgcgcggtctgattgaagaggatgcctttattgagcgcggcgaacgccgtcagccggttgccagctttgaacaggcgctggactggctggtgaaagagtcgcgccgcggcctctctatccagcgctataaaggtcttggcgagatgaacccggatcagctgtgggaaaccactatggacccggatagccgccgcatgctgcgcgtgaccgtgaaggatgcgattgccgctgaccagctgttcaccaccctgatgggtgacgccgttgaaccgcgtcgtgcctttatcgaagagaacgccctcaaagcggcgaacatcgatatttaa

SEQ ID NO: 174010 - DNA, 936 bp, Klebsiella oxytoca
atgaccgatacgctgaaggatattccggtttttgtggccgccgttgaggcgggaagttttgctcaggccgcaattcgtttgcatttgtcgcgctcggcggtaggaaagagtatcgctcggcttgaagagcggttgggggtacgtctgtttcaacgtacgacccgcagccaaagcctgaccgacaacggcgcccttttttatgaacgttgtcagcgcgcgctggaggaaattcgtggagcagagtcgctgctggaaacagggaaacagcaggttagtggccgcctgcgcgtggccatgccggtgctgtttggtcgccagtgcgtggcccccctgctgatcgagcttgcgcaggaacacccaggtctcgagctggagatgtcattcagcgatcgcgtggtggatctcgtcgaggaagggtttgatatggcggtgcgtaacggcccccttcaggacagcagcgttctggtcgccagaaagctgggagaacaccgcatggtgctgtgcgccgcgccggattacctgctgaagaagggtctgccacaaagcgttgatgatttaccccaccatgcggccattaactatctgcaagcaggcagagtgctatcctggcagctgatggataaagaaggagtctcgcacacctttactccccgttcatcgctcaatatggatgatttgcaggcaatctgcgacgctgcgctggccggccacggcattgcatggctgccctgctggatggccagcaaagaaattcatcagggaaaactcgtcccgcttttaaagcaggcgccggatgtgcgcttcgacgttcatgcggtctggcaacagacgccgcatctaccgctgagggtgagaattgccgtcgatatgctcgccagccgtttaccgtccgtgatatcgctggatatgcctgcgcccacaaaaaagccgcgctaa

SEQ ID NO: 174011 - DNA, 1026 bp, Klebsiella oxytoca
atgacgcagacaatgcaacgctggtctatggacgccctcgggcgtgagaacctcaatcttattcaggcgcctgttccgcagccgggcccgggtgaagtccgcgtgcgggtgaatgccgttgcgctcaactatcgcgataagatggtcattgaaggcaccatgcctattgcgctttccttcccttttacgccggcgtctgatatggcgggcgtggtggagagcacgggtgagggcgtcacgcgtttcaaacccggcgctcgggtgatctccacctttttcccggagtggatcgacggtagaccagcgtcagatgcccgcactttgccttataaaaccaccggcgggtacttccagggcatgctggctgagtacgtggttgtgaatgaaaactggctggtggctgcaccggaaacccttgatgatgcagaagccagcacgctcccttgtgcagggcttaccgcatggttcgcgctggtggaacgcggtcatttacacgccgggcaatcggtgctggtacaggggacgggcggtgtggcgatattcgctttgcaaattgcaaaagcacagggggcaaaggtttttgtcacatcaggaagtgatgaaaaactggcgcgggctaaacaacttggcgccgatcatgggataaaccggctcaaaagtgattggacggaaggaatttacgaactgaccgccgatcgcggcatcgatcatattattgaaaccgttggcggggagaatctgcgacattccctgcgcgccgttgcggttcatggtcgcatatcggtcattggcgtgctggccgggagtgaaatctcgctaccggctggcgaactgttgctgaaatccccggtgattcagggtattggtgtcgggcaccgtcgtgcgctggaagatttcgtccgcgccgttgacgtgaccgggttaaaaccggtgattgaacaccgttaccgttttaaccagcttgaacaggcgcttgcacatctcgatcgcggggcgtttggtaaaatcgttctgacccgcgagtaa

SEQ ID NO: 174012 - DNA, 813 bp, Klebsiella oxytoca
atggctattaaactaatcgcaatcgatatggacggcacgctgctgctgcctgaccataccatctctcctgcggtgaaaaccgcgattgccgcagcccgcgaacgcggcgtcaacgtggtgttaaccaccggacgaccttacgcaggcgtgcacagctacctgaaagaactgcatatggagcagccgggagattactgcatcacctacaacggcgctttagtacagaaggcaagcgacggcagtaccgttgcgcaaaccgcgctgggctacgacgactatcgctatctggaacagctggcccgtgatgtcggctcccacttccacgcgctggatcgtaacaccctgtataccgctaaccgcgatgtaagctattacacggtgcatgaatcctacgtggcgacaatcccgctggtcttctgcgaagccgaaaatatggatcccaacatccagctgttgaaagtgatgatgatcgatgaaccggccattctggaccaggctatcgcccgcatcccggctgaagtgaaagagaaatacaccgtgctgaaaagcgcgccctacttcctggaaatccttgataaacgcgtcactaaaggcaccggcgtgaaatcgctggccgatacgctgggtatcaagccggaagaggtgatggcgattggcgatcaggaaaatgacattgcaatgatcgaatatgcaggcgtcggcgtggcgatggacaacgcgatccctgccgtcaaagaagcggcaaactttatcaccaaatccaatctggaagacggtgtggcatatgctattgaaaaatatgtcttaaactaa

SEQ ID NO: 174013 - DNA, 690 bp, Klebsiella oxytoca
atgactctcaataaaaccgatcgcatcgtcatcacgctgggcaagcagattgtcagcggtaaatacgttcccggctctgcgctgcccgcggaagccgagctgtgtgaggagtttgctacctcgcgcaatatcattcgcgaagtgttccggtcattgatggccaggcgactgattgaaatgaagcgctatcgcggcgcattcgttgcctcgcgcaaccagtggaattatctcgacaccgacgttttacagtgggtgctggagagcgattacgacccgcggctgattagcgcgatgagcgaggtacgtaatctggttgaaccggcgatagcccgctgggcggcagagcgcgcaacatcgagcgacctggcgcaaatagaagaagcgctcaacgacatgatcgccaacaaccaggacagggaagcgtttaacgaagcggatattcgctaccacgaggcggtgctgcagtcggtacataacccggtactgcaacagctcaacgtggcgatcagctcgctacagcgggcggtatttgaaaggacctggatgggcgatgaggccaacatgccgaaaacgctccaggaacataaggcgctgtttgacgccatccggcatcaggacagcgaagcggcggagcaggcggcgctcaccatgatcgccagctcgacacgaaggttaaaggaaatcacatga

SEQ ID NO: 174014 - DNA, 876 bp, Klebsiella oxytoca
atgacatctcgctacatcgcaattgactggggatcgacaaacctgcgcgcctggctttatcagggcgagcagtgtctggagagcaggcaatctgaagcaggcgttacgcgcctgaacggacactcccccgcagcggtgtttagcgaaataaccgcgggctggcgcgacagcgctaccccggtagtgatggcgggaatggtcggcagtaatgtcggctggaaggcggcgccctacctgccggttcccgtccatttttccgccattggcgaacaattaaccgccgttagcgaccagatctggattattcccggactcagcgtctctcgcgacgataaccataatgtgatgcgcggcgaagagactcagctcctcggcgcgcgggcaatagctccttcctccgtctacgttatgcccggcacccactgcaaatgggtgcaggctgaccgccaacaaattagcgactttcgcacggtgatgaccggcgaactccaccacctgctgctgcgccactcgctggtcggcgccgggttaccggagcaggtctcagctcctgacgcgtttaacgccgggcttgagcgcggcctgcattcgccagacatcctgccgcagctttttgaggtacgcgctgcgcacgtgctgggctcactgccgcgcgaacaggtgagcgaatttctctccggcctgctgattggcgcggaagtcgccaccatgagcgcacatttccacgatcgccaggtcaccctcgttgccggagaggcgctggcagaccgctatcagcaggcgcttggcgctattggccgtcaggcaaccgtggtgtcaggcgacaccgcatttcagaccggaataaggagcatcgcccatgcagtggcaaactaa

SEQ ID NO: 174015 - DNA, 618 bp, Klebsiella oxytoca
atgcagtggcaaactaaactaccgcttatcgctattctgcgcggcattacgccggaagaggcgctggaacatgtcggcgccgtcattgatgctggcttcgacgccgttgaaatcccgctcaattctccgcagtgggaaaaaagcatttccgccgttgttgaggcttatggcgacagagcgctgataggcgcgggcaccgtacttaagcctgaacgtgtggacaggcttgccgaaatgggctgcaggcttatcgttacgcccaatattcagccagaggtgattcgccgcgcggtgagcttcggcatgaccgtttgtcccggatgcgcgacggcgacggaagcttttaccgcgctggatgctggcgcacaggctttaaaagtattcccttcctcggcttttggccctgactacatcaaagcgctaaaagccgttttgccgccggaggtgcccgttttcgccgtgggcggcgtgacgccggagaacctggcgcagtggctaaaagccggttgtaccggtgccgggctgggcagcgatctctatcgcgccgggcaatccgtagagcgtaccgcacggcaggcggcagcatttgttaaagcgtatcgagaggcagtgcaatga

SEQ ID NO: 174016 - DNA, 1149 bp, Klebsiella oxytoca
atgaaaataaccaaactcaccacgtatcgtttacccccgcgctggatgtttttaaaaattgaaaccgacgaaggcgtgattggctggggcgagcccgtgattgaagggcgcgcgcgcaccgtggaggctgcggtgcatgagctcggcgattatctgataggccaggatccggcgcagattaacgacctgtggcaggtgatgtaccgcgcgggcttttatcgcggcggcccgattttaatgagcgccatcgccggtatcgaccaggccctgtgggatattaaaggcaaagtgctgaatgccccggtctggcagctgatggggggcctggtacgtgacaaaatcaaagcctacagctgggttggcggcgatcggccggcagaagtgattgacggtatcaaaaagttgcgcggaattggttttgatacctttaaattaaatggctgcgaggagctggggctgatcgataattctcgtgcggtggacgctgcggtgaataccgtggcgcaaattcgcgaagcgttcggcaatgaaattgaatttggcctcgatttccacggtcgcgtgagcgcgccgatggcgaaggtacttatcaaagagctggagcaatatcgcccgctatttattgaagagccggttcttgccgagcaggcagaatactatccgcggctggcggcgcaaacctcgattcctattgcggcgggcgaacgcatgttctcgcgcttcgagtttaaacgcgtgctggaagccggtgggctggctattctgcaacccgacctgtcgcacgccggcggtattaccgagtgctataaaatcgctggaatggctgaggcctatgacgtggcgttggcgccgcactgcccgctgggacccattgcgcttgccgcctgtctgcatgtcgattttgtctcctataacgccgtcttccaggaacaaagtatgggcattcactataacaagggcgcggaattactcgactttgtaaaaaataaagaagacttcaatatggaaggcggcttctttaaaccattaatgaagccagggcttggcgtagagatcgatgaagcgcgggtaattgaattaagtcaaaatgcgccggactggcgtaatccgttgtggcggcatgaggatggtagcgtcgcggaatggtaa

SEQ ID NO: 174017 - DNA, 1293 bp, Klebsiella oxytoca
atggatatttcagttacagctgcaaaacccgggcgtcgtcgttatttaacgctgattatgatctttattaccgtggtgatttgttatgttgatcgcgccaaccttgccgtggcatcggcgcatattcaggaagagtttggtattaccaaagcggaaatgggatatgtattttccgccttcgcgtggctgtatacgctttgccagatccccggcggttggttccttgaccgcgtgggatcgcgactaacctactttatcgctatttttggctggtcagtggcgacgctactgcagggatttgccacgggactgatgtcgttgattggtctgcgcgcgattaccgggatctttgaagccccggcttttcccactaataatcgcatggtgaccagctggtttccggagcacgagcgcgcatcagccgtcggtttttacacttcagggcagtttgtcgggctggcattcctgaccccgctattaatctggattcaggaaatgctgagctggcactgggtatttatcgttaccggcgctatcgggataatatggtctttaatttggtttaaggtttatcagccgccgcgtctgacaaaaagtatcagcaaagccgaactggattatattcgcgacggcggtggcctggtggacggcgatgcgcccgttaaaaaagaggcgcggcagccgctgaccaaagccgactggaagctggtattccatcgcaaactaatcggcgtttacctcgggcagtttgccgtaacctccacgctgtggttcttcctgacctggttccctaactatctgacccaggaaaaggggattacggcgctgaaagcgggctttatgacaacggtgccgttccttgccgcctttgttggcgtgctgctctccggctggctggcggacaggctggtccgaaaaggcttctcgttaggcgccgcgcgtaaaacgccaattatctgcgggctgctgatctcgacctgcatcatgggggcgaactacaccaacgatccggtgtggattatgatcctgatggcgctggccttcttcggcaacggcttcgcttccattacctggtcgctggtatcgtcgcttgcgccgatgcggcttatcgggctgaccggcggtatgtttaatttcgtcggcgggctgggcggtatcaccgttccgctggtggtgggttatctggcccaggactatggttttgcgcctgcgctggtttatatttccgttattgcgctgattggcgcgctctcttacatcctgctggtgggggatgtcaaacgcgtaggctaa

SEQ ID NO: 174018 - DNA, 1227 bp, Klebsiella oxytoca
atgaaacaagtcacctttgctccccgtcatcatcagttgaccaacactcgcacctggacggcagacagccgctggctggtctttgacgttcgcccttctggcgcttcctttaccggcgaaaccatcgagcgggtgaatgtcgatacgggagacgttgagatcctctaccgtgccgggcaaggcgcatacgttggcgtggtgaccgttcatccatcggtagataaatatgtcttcatccacggcccggaaaaccctgacgagggctggcattacgatttccaccatcgtcgcggcgtggtgacgtaccagggagaaacccacaacctggatgcgatggatattaccgctccctatactcccggcgcgctgcgcggcggcagtcatgtgcatgttttcagtccgaacggtgaatttgtcagctttacctataacgaccacgtgctgcatgaacgcgatccggcgctggatttgcgcaacgttggcgtagcggttccctatggcccggtagtaccgcgtggcgatcatccacgtgaatacggcggcagccactggagcgtgctggtcagccgtacaacgccaaccccggcgccgggcagcgacgagattaatcgcgcctatgaagagggatgggtaggcaacggggcgctggcgtttattggcgatacgctggcgataaatggcgacaaagtgccggagctgtttattgtcgaactgccggagagcgaacggggctggaagcaagcgggcgatgcgccgctggcaggaacgcaaaccacgatgccggcgcctcctgccggcgttgttcagcgtcgcttaacgtttacccaccaacgccgttatccagggctggtgactacgccccgccattgggtacgcgccaatccgtcggcaacggacatcgcttttctgatgcgcgatgaggctggcgtggtgcaaatgtggctcatttcggcgcggggggacgggctgcggcagttgacccacaaccgctccgatatccagtcggcgtttaactggcatccctcaggaaaatggctgggctttgtgctggaaaaccgcatcgcgatctgtgacgcgcagaacggggaaatcgactttttgaccgatgagcatgcccatccgccatcggccgatgcgatcgtcttttcgccagacggcaaacagcttgcctggatggaggaggtggacggttaccgccagctctgggtaaccgaaacggcgcgctaa

SEQ ID NO: 174019 - DNA, 330 bp, Klebsiella oxytoca
atgaaaaacggtcttttaaagctggtcctgttcggcgggataataagtttgggcggttgctccagcgtgatgtcacatactggcggcaaggaaggaacctatcctggaacgcgcgccagcgcgcagatgctcggggatagcgacgcaaactggggcacgaaatcgctggtggcgttggatatgccgctcacggcggtcatggacacgctgctgctgccgtgggatatgttccgtaccgacagttcggtgaaatcgcgcgtggaaaagagcgaggaagagacgctggcgaccaattccgtgatcccgccagcgcggatgccaaccccctga

SEQ ID NO: 174020 - DNA, 414 bp, Klebsiella oxytoca
atgcgtaatttcgatctctccccgctgtatcgttctgctattggtttcgaccgccttttcaatctgttagaaaataatcaaagccagagcaatggcggctaccctccgtacaacgttgagttagtagacgagaacaactaccgcatcgcgattgccgttgccggttttgccgagagcgaactggaaattaccgcccaggataatctgcttattgtaaaaggcgcccatgccggcgagcagaaagagcgtacctacctgtatcagggcatcgctgagcgcaactttgagcgtaaattccagctcgcagaaaatattcatattcgcggcgccaacctggtaaacggtctgctgtatatcgaccttgagcgcgttattcctgaagcgaataaaccgcgccgtatcgaaatcaactaa

SEQ ID NO: 174021 - DNA, 429 bp, Klebsiella oxytoca
atgcgtaactacgatttatccccgcttctgcgtcaatggatcggttttgacaaactggccaacgcgctgcaaaccgccggtgaaagccagagcttcccgccttataacattgaaaaaagtgacgataaccactatcgcattacccttgcgctggccggtttccgtcaggaagatttggatatccagcttgaaggcacgcgcctgacggtaaaaggcgcgccgcagcagccggaaaaagagaccaaatggctgcaccaggggctggttaaccaggcatttagcctgagcttcacgctcgccgaaaatatggaagtctccggggcaacctttactaacggcctgctgcatatcgatttgacccgcaacgagccggaacagatcgccccgcagcgcatcgccatcagcgagcgccctgcgttacagagctaa

SEQ ID NO: 174022 - DNA, 1662 bp, Klebsiella oxytoca
atgagtgatatagcattgaccgttagcgtattggcgctggtggcggtagtcggattgtggatcggcaatgtaaaagtgcgcggtgtcggcttcggtatcggaggcgtgctgtttggcggtattatcgtcggccactttgtagaccaggcgggcattacgctcagtagccccatgctgcactttattcaggaattcggcctgatcctcttcgtgtacaccatcgggatccaggtggggccgggcttcttcgcttcgctgcgcgtctctggcctgcggcttaacctgttcgccattctgattgtgattctcggcggtctggttaccgcggtcctgcataaactgttcgatattcctctccccgtggtgctcgggatcttttccggtgcggtaaccaacacgcctgcgctgggggccgggcagcagatcctgcgcgaccttggcgtgccgcttgataccgtcgaccagatgggtatgagctacgccatggcctatccattcggtatttgcggcattttgctgaccatgtggctggtccggctgttcttccgcatcaacgttgagaaagaggctcagcaatttgatgaaaacagcggcaatggccatgcacatctccagaccatcaacgtgcgggttgaaaaccccaacctgaacaatatggcgattcaggatgtgccgatgcttaacagcgacaagctgatctgctcgcgtctcaagcgcgaggagatgctgatggtgcccgcgccgaataccctgattcagcttggggacctgctgcacctggtcgggcgaccggaggatttgcataacgctcagctggtgattggcaaggaagtttccacttcgctctccactcgcggtaccgatctgaaagtcgagcgcgtggtggtgaccaacgaaaaagtattgggtaaacgcattcgcgatctgcactttaagcagcgctatgatgtggtgatctcgcggctcaatcgcgccggggttgaactggtcgccagcagccatgccagcctgcagttcggcgatattcttaacctcgtcggccgcccggaggcgattgatgcggtagccgccgagctgggcaacgcccagcaaaaactgcagcaggtgcagatgctgccggtatttatcggcatcggcctgggcgtgctgctgggctccattccgctgtttattccgggattcccggcggcgctgaagctgggtctggcaggcgggccgctgattatggccctgatcctcggacgtatcggcagcatcggtaagctgtactggtttatgccgcccagcgccaaccttgcgctgcgcgaactgggcatcgtgctgttcctcgcggtggttggcctgaaatccggcggcgattttgtcgcgacgctgattgaaggcgacgggatgagctggattgtctacggcatctttatcaccgcgataccgctgctgacggtgggtattctggcgcgcatcctggcgaagatgaactacctgaccctgtgcgggatgctggccggctcaatgaccgaccctccggcgctggcgtttgccaataacctgcatgccaccagcggcgcggcggcgctctcctacgcgaccgtttatccgctggttatgttcttacgtattattaccccgcagctactggcggtgctgttctggggggtagggtaa

SEQ ID NO: 174023 - DNA, 747 bp, Klebsiella oxytoca
gtgatctacaaatctatcgccgacagattacgtttacggcttaattcttccgatttcgatattggcagcccgctaccgagcgaaaaaaagctggcggaagagttcggcgttgcgcgcatgaccatccgcaaagccatcgatctgctggtcagctggggactggtggtgcgtcggcacggctccggcacctatgtcgcccgcaaagacctgcatcatgaaaccagcaatctaaccggactggccgaagtgctgcgcaagcacggcaaagaggtggtcagccgggtattggtttttgaggtgatgcccgcgcccccggctatcgccagcctgctgcggatacaaattgatgaacggatctacttctcgcgccgggtacgctatgtcgatggcaagccgctaatgctggaggacagctatatgccggtaaagttgtttcgcaatctgtcgctggtgcacctggagggatcgaagttcgattacattgagaaggagtgcggaataaccattagcggtaactatgaaacgctgtcgccagtgctggcggacaggcagctggcgcagtcgatgaacgtgccggaacagacgccgctgctgcgtataacctccctttcctacagcgacagcggcgaatttcttaactactcggtgatgttccgtaacgccagcgaatatcaggtggactaccatctgcggcgcgtccagacggagcacccgttaccctaccccccagaacagcaccgccagtag

SEQ ID NO: 174024 - DNA, 1623 bp, Klebsiella oxytoca
atgctcagtcaaatacaacgctttggcggcgccatgtttaccccggttttactctttcctttcgccgggatcgtggtgggtatcgccattatgttgcgtaacccgatgttcgtcggcgaagcgctcacagcacccgatagtttatttgctcagatcgtttacatcattgaagagggcggctggaccgtctttcgtaatatgccgctgatttttgccgtcggtttgccgatcggcctggcgaaacaagctcagggccgggcttgtctggcggtactggtcagcttcatgacctggaattatttcatcaacgccatggggatgacctggggccacttcttcggcgtcgacttctccgttgaaccaacggcaggcagcggcctgacgatgatggccgggataaaaacgctcgataccagcattattggcgcgatcgttatctccgggctggtgaccgccctgcataaccgctacttcgataaaccgctgccggtgtttctggggattttccagggctcctcgtttgtggtgattgtcgccttcctggcgatgattccctgcgcctggctgacgctgttgggatggccaaaagtgcagatgggtatcgaatccctgcaggcctttttacgctcggccggggcgctgggcgtctgggtctatatcttccttgaacgtatcctgatcccgaccggtttacaccacttcgtctacggaccgtttattttcggcccggcggtagtggaaagcggtattcaggtttactgggcgcagcatttacatgaattcagccagagtaccgtggcgctgaaaaccctgttcccggaaggcggattcgcgctgcacggtaactcgaaggtctttggttccgtggggatcgcgctggcgctctactacaccgcagcaccggaaaaccgcgtgaaagtcgccggtctgctgattcctgccaccttgaccgccgtactggtgggaataaccgagccgttagagttcaccttcctgtttatctcgccgctgctgtttgccgtccatgcggtgctggcggccactatggcgacggtgatgtatatctgcggcgtggtcggcaactttggcggcggcctgctcgaccagttcctgccgcaaaactggatcccgatgttccacaaccacgcgtcgatgatgtttatccagataggcgttggcgcatgcttcaccgcgatctacttcgttatcttccgcactctgattctgcgcctgaacctgaaaacgccgggccgtgaagagagtgaaattaagctctacagcaaagcggattaccaggccgcgcgcggcaaaaccagcgttgcgggggctacagataccaaactgggccaggccgccggcttcctgcaggcgctgggcggagcgggcaacatcgagagcatcaataactgcgccacccggctgcgcattgcgctggtcgatatggcgaagacccaaagcgacgacgtctttaaagcgctgggcgcccacggcgtagtccgccgcggcaacgcaattcaggtcatcgtcggcctgcacgttcctcaggtccgcgaccagctggaaaccctgataaaagattctctacagaccgaacaaaccaccatgacggaggcagtatcatga

SEQ ID NO: 174025 - DNA, 1323 bp, Klebsiella oxytoca
atgaaaaaattctcagttgttatcgcaggcggcggcagtaccttcaccccgggcatcgtgctgatgctgttagcgaaccaggatcgcttcccgctgcggtcgttgaaattttacgacaacgacggcgcgcgtcaggagaccatcgccgaggcgtgcaaagtcattctcaaagagcaggcgccggatatcgcgttcagctacaccactgacccgcaggcggcctttaccgacgttgatttcgtgatggcgcatatccgcgtgggcaaatatccgatgcgtgaaaaagatgaaaaaattccgctgcgtcacggtgtgctggggcaggaaacctgcggtcctggcggtatcgcctacggtatgcgctccatcggcggcgttctggaactggtggactatatggaaaaatattcgccaaacgcctggatgctgaactactccaacccggcggccattgtggcggaagcgacccgtcgcctgcgtccgaacgctaaaattctcaacatctgcgatatgccgatcggtatcgaagggcgcatggcgcaaatcgtgggtcttaaggaccgcaaacagatgcgcgtgcgctactacggtctgaatcacttcggctggtggacctcgattgaagatttacagggcaacgatctgatgccgaaactgcgcgaacatgtggcgaaattcggctatgtgccgccgtcaaacgacccgcataccgaggccagctggaacgataccttcgccaaggcgaaggacgtgcaggcgctggatccggatacgatgcccaatacttacctcaagtattatttgttcccggactacgtcgtggcgcactctaacccggaacgtacccgcgccaacgaggtgatggatcatcgcgagaaaaacgtctttagcgcctgccgggccattattgaggccggtaactcatccgcgggggatctggaaattgacgaacatgcttcctatatcgtcgatctggcggcggcaattgcttttaatacccaggaacgcatgctgttgattgtgccgaacaacggcgcgattcataacttcgatgccgatgcgatggtggaaattccgtgcctggttggccacaacggaccggagccgctgacggttggcgatattccgcacttccagaaagggatgatgagccagcaggtcgcggtggaaaaactggtggtggatgcctgggaacagcgttcttaccataagctatggcaggcgattgcgctgtcgaaaaccgtgccgagcgcatcggtcgccaaagcgattcttgatgacctgatcgcggccaataaagagtactggccggaactgcattaa

SEQ ID NO: 174026 - DNA, 894 bp, Klebsiella oxytoca
atgaatggaaaaatacagatttcgcatgtaaaaaacgaaactacgtataacattccgttagttctggaagaaaatgtgatctcaagcgggatttcactgctctcgctatggcataccctggccgatgaaagctaccgggtcagctggccgcgcgataaaaagaaaccgcttatcgccaactcgtgggtggcgatatatacgctccagggatgtggtaaaatatatctcagagaccacactgaaataaccttaaacggtaactgcgtcatattcttaaaacccatcgagatcaaatcctatcactgcgccggattggtctgggaacaatactggatggaatttattcctactacgctgatgcctgttccggtattacaaatcggcactatttatcacgccgatatttttaataaggaactcaatgaagtggccttattgattgctgaccgcgatccgctaaagaataatctggccgtcgcctacctcacgaaaatcatttatcaatggatttgcctgatcgccgaaaatggcaaaaaagatcgtcaactgcaaaagctggaaaaactgattgccgctctacacgctaatccgcaaaagcgctggagcgtagccgatatggctgatgctatgcagtgcagcgaaccctggctgcggcgcctctttttgcgtcataccggcaaaacgccaaaggagtattaccttaacgcccagcttgagctggcgcagtcgctattaaagcaggaggggaatacggtgggtaaggtggcggagatgctgaacttcttcgactcctttcattttagcaaggcgtttaaacgccgcttcggctatgcgccctcagcggtactaaaaatgaatgaccggcaccctatggatgccggtcagcaggattaa

SEQ ID NO: 174027 - DNA, 1716 bp, Klebsiella oxytoca
atgaatgccatacaaattttgagctttgtcgggtttacattgctggtggctatcattacctggtttaaggtaagaaaagcggataccggctcgcagcagggctatttccttgccggccgttcgctgaaagcgccggtcatcgccgcctcgctgatgttaaccaacttatcgaccgaacagctggtgggattatcgggccaggcttacaaaagcggcatgtcggttatgggctgggaggtgacatcggcggtgacgctgattttcctggcgctgatctttcttccccgctatctgcagcgcggtatcgccaccatcccggactttctggaagagcggtacgataaaacgacccgcattattatcgacttctgctttcttatcgccaccggtatctgctttttacccatcgtgctttactccggcgcgctggcattgaatagcctttttcatattggtgaatcgctgggtctgacccagggcgccgccatctggttactggtgattttgctcggtctggccgggattttatacgcggtgatcggcggcatgcgcgcgatggcaatcgctgattccattaacggaatcggcctggtgattggcggcctgatggtaccgatttttggcctgatggcgatggggaaggggagttttttacagggtatcgagcagctgacgacggtacacgcggagaagctgaactctattggcggcagcagcgaccccctaccgattggcgcggcgtttaccggcctgattctggtgaacaccttctactggtgtactaatcaggggatagtgcagcgtaccctggcgtcaaaaagcctggcggaggggcagaaaggggcgctgctgacggcggttctcaagatgctcgatccgttgattctggtgcttcccggtttaattgcctttcatctctaccaggatctgccgagcgcggatatggcctatccgacgttggtcaacaaggtcatgccgcttccgctggtcggtttttttggcgccgttctgtttggcgccgttatcagtacctttaacggctttttaaacagcgccagtaccctgttcagcatgggaatttaccggcgcatcatcaatgaaaacgcccagccggagcagctggtgcgcattgggcggaaatttggcctttttattgcggtgatctcggtgattgtcgcgccgtggatcgctaatgcgccgcaggggctgtatagctggatgaagcagctcaacggtatttataacgtgcctctggtaaccatcatcattatgggcttcttctttccgcgtatcccggcgatcgccgccaaagtagcgatggggctggggattgttagctacatcacgattaattacctggtgaaatttgatttccatttcctctacgtgctcgcctgcacgttctgcatcaacgtggtggtgatgctggttatcggcttcattaagccgcgggcgacgccgtttacattccatgatgcgtttgccgttgatatgcagccgtaccggcacgtgaaaattgcctcggtgggcattctgttcgcgatgatcggcgtttacgcgggcctcgccgagtttggcggctacggcactcgctggctggcggcggtgagctacgccattaccgcagcggtcattatctatctgatttacagcagctggcgggaacgccgctccgctccagcttcctatgctatcgatgtgaaggaaaaatcatga

SEQ ID NO: 174028 - DNA, 1494 bp, Klebsiella oxytoca
atgagtcgccccaatttcctgtttattatgaccgatacccaggctaccaatatggtgggttgttacagcggtaagccgctgaatacccaaaatattgattgtctggccgccgaaggcatccgcttcaattccgcctatacctgctcgccggtatgcaccccggcacgtgccggactgtttaccggaatctatgccaaccagtccggcccgtggaccaataacgtcgcgccgggaaaaaatatctccaccatggggcgctactttaaggatgcgggttaccgcacctgctatatcggcaagtggcatctggatggtcacgactactttggtaccggcgagtgcccgcccgagtgggacgctgactactggtttgacggcgcgaattacctcgcagagctgactgaggaagagatcggcctgtggcgtaacggcctgaacagcgtagaagatttactgcagcatgggatagatgaaaccttcacctgggcgcaccgcatcagcaaccgggcggtcgacttcctgcgccagcccgcccgcgctgacgagccgttcctgatggtggtttcctacgatgagccgcaccatccgtttacctgcccggtagagtatctgcgcaagtaccaggacttttattatgatcttgggccaaaggctcatgactcgctcgccgataaaccggaacaccatcgcctgtggtcgcaggcgatgccctccccggtaggtgaagatgggcgctatcatcatccgctttactttgcctgcaacgactatgtcgacgatcagattggtcgggtgattaacgccttaacgccacagcagcgggacaatacctgggttatttatacttccgatcacggcgagatgatgggcgcccataggctcattagcaaaggcgcggcgatgtatgacgatatcactcgtattccgctgatcatgcgcccgccgcagggcgtacccatgcagatcgacgcgccggtcagccatatcgacctgctaccgacgatgatggcgctggcgggtatccctaagcccgatattctgccgggggataatattcttaacgccgaaacctcacgcggggtgatggtggaattcaatcgctatgagattgaacatgacagctttggcgggtttatcccggtgcgctgctgggtgacggatgagtacaaactggtgcttaacctgtttaccagcgatgaactgtacgacagaaaaaacgacccggatgagctgtataatcttattaatcgccccgatttcgccgacgttcgctgtcaaatgcacgatgcgctgcttaactatatggataaaatccgcgacccgttccgtacttatcaatggagcttgcgtccgtggcggccggatgccctgccgcgctggatgggcgctttccgcccgcgcccgcaggacggctactcgccggtcgtgcgcgactatgacactggactgccgacgcggggcgtgaaggtggaggagaaaaaacagaagttttga

SEQ ID NO: 174029 - DNA, 348 bp, Klebsiella oxytoca
atgaaaatatcccgccttggcgaagcaccggattaccgcttctcgctggccaatgaacgtacctttctggcgtggatccgcacttctctcggctttctggccggtggcgttggcctcgaccagctggcgccggatttcgccacgccgctgattcgcgaaatcctcgctctgctgctgtgcctgtttgccggcggtctggcgatatacggctatttacgctggctgagcaacgaaaaagcgatgcgccttaagcaggatttgccctatacccgcacgttgctgctgatcagcattctgttgaccatcgttatcgtggtggtgatggcgctggtgctctatgccggataa

SEQ ID NO: 174030 - DNA, 363 bp, Klebsiella oxytoca
atgccggataatcgtcgggcgcgtcgtgagagcgatccggggctgcagccggagcgcacgtcgctggcctggtttcgaaccctgctgggctatggcgcgctgctggcgctggcgattaagcaccactggcatcaggcggggcttccattctggatctcgctgggcatattgccgttcgttgccattatcctctggcgctatacccgcagccgtaatctgatgaacgtcgagcaaagcgattttgctcagccgcaggcggttcgtgacaaatttttgatcgcattcgcagtactttccctgtcattgttgtttgctgtaacccatatacgacaggtgattttgtttattaaggatgtgacatga

SEQ ID NO: 174031 - DNA, 531 bp, Klebsiella oxytoca
atgacaggatgtcaggctgactacggtgacgatcggcactgcggcaactgccagtctctggcgagcgatattcccgtgcaggaagtgatcattcatcgtcaggagtgtgaacgccccgagctcgtctaccatcagttgagcgcccagggggcagtggctatcaagtttattccccatctgcagcccgccgacgcccgtctgtggggggattttctttgcgcggttttcgcgatttgggtcaaagaagatgctaatcgtatcgtcgtgccgctttttgaggccacgctgcgcgcatggcgcggcgagtcggtgcagtatgctaataatccgccggggccggcctgcgctggctgcgcctggctaagattatgcggtgggggctgcccgcagctgcgtctggaggatggctccaatgccctttgtgagggataccggcagttttatagctggagcgctccctatatgcgcgttctgcgcgatctactcaatcagcaccgttcgccggttgagcttatgcatctgctgcgctaa

SEQ ID NO: 174032 - DNA, 1329 bp, Klebsiella oxytoca
atgaaaaacgctgacatgaccaatttactcgcgcagtttcctctgctggaggaactgatagccctgaaagaaaccacctggtttaacccgtcaacgacgtcgctggcggaagggttaccctacgttggcctgacgacagaagacgttcaggacgcccacgcccggctcgatcgttttgcgccatacctggcggaagcctttcctgaaaccgcagccactggcggtattatcgaatcagaactggtagccatcccggcaatgaaggcccggctggaaaaaacctttcatcaaccgattggcggcgatctgctgctgaaaaaagacagtcacctgccgatttccggctcgattaaggcccgcggcggcatttatgaagtgctgacgcatgcggaaaaactggcgatcgacgcgggattattaaacacaaccgatgattatcgtaagctgctaacccccgagttcagggccttcttcagccagtacagcatcgccgttggctccaccggcaacctgggaatgtcgattggcattatgagcgcacgcatcggcttcaaggtgacggtacatatgtccgccgacgccagagcgtggaaaaaggccaaactgcgcagccacggcgtaacggtggtggagtacgaagaggattacggcgtggcggttgagcagggacggcaagccgccgagtccgacccgaactgcttctttatcgatgacgagaactcgcgcaccctgttcctcggctactccgtggccggcgagcggctaaaagcgcagtttgcccgcgaagggcgcgtagtggacgccagtcatcctctgtttgtttacctgccgtgcggcgttggcggcggccccggcggcgtggcgtttggcctgaagctggcgtttggcgatagcgtacactgcttcttcgccgaaccgacccactccccgtgcatgttgctgggtgtctataccggtctgcatgaccagatttcggttcaggatctggggattgataatctgaccgccgcagacggcctggcggtaggccgcgcctccggtttcgtgggtcgggcaatggagcgcctgctggatgggttctactctctcgatgaccagaccatgtacgatatgctgggttggttagccgaagaagaaggtattcgcctggagccatccgctctggccggcatggccgggccacagcgggtctgcgccagccaggcgtatcagcagatgcacggtttcaccgctgagcagatgcgcaatgcgacccatctggtgtgggcaaccggcggcggcatggtgccggaagaggagatggcgcagtatctggcaaaaggacggtaa

SEQ ID NO: 174033 - DNA, 1338 bp, Klebsiella oxytoca
atggaatctcagatctgggttgtgagcacgctgctgatcagcatcgtgttgattgtgttaactatcgtcaaactgaagtttcacccgtttctggcgctgctgctggccagctttttcgtcggcgccatgatgggcatgagcccgctggatatggttaacgccatcgagagcgggattggcggcacgctgggcttcctggcggcggtaattgggctggggacgattctcggcaaaatgatggaggtctccggcgcggctgagcgtatcggcctgacgcttcagcgctgccgctggctgtccgctgacgtcattatggtgctggtgggcctgatttgcgggatcacgctgttcgttgaagtaggcgtggtgctgctgatcccgctggcgttttccattgccaaaaagaccaacacgtcgctgctcaagctggccatcccgctgtgtacggcgctgatggcggtacactgcgtggtgccgccgcatccggcggcgctgtttgtcgcgaataagctgggcgcggatatcgggacggtgatcgtatacggtctgctggtgggcctgctggcttcgctggtcggtggcccgctgttcctgcggctgctcggcaaccgcctgccgtttaaagcggttccggctgaatttgccaatctcgaagtgcgcaaagaagagaccctgccttcgcttggcgccaccctgtttaccgtcctgctgccgatcggcctgatgctggtaaaaaccatcgccgaactgaatatgaccaaaggcggcacgctatatatgctgctggagtttatcggtaaccccatcaccgccatgtttatcgcggtctttgtggcctattacgtgctgggcatccgtcagaatatgggcatgagcaccctgctgacgcatacggaaaactgcttcggctctatcgccaatatcctgctgattatcggcgcaggcggggccttcaacgccatcctgaagaccagcggtctggccgatacgctggcggtaattctgtcgaacctcgatatgcacccgattctgctggcctggctggtggcgctgattctgcatgccgcagtcggttccgccaccgtggcaatgatgggcgcaaccgccatcgtcgcaccgatgctgccgctctatcccggcgtgagcccggaaatcatcgctatcgccatcggctccggcgcgattggctgcactatcgtgacggactccctgttctggctggttaagcagtactgcggggcaagccttaacgaaacgttcaaatactataccacagcgacctttatcgcttcgctgcttgcactggccggtacattcctgctttctttcatcatctga

SEQ ID NO: 174034 - DNA, 930 bp, Klebsiella oxytoca
atggagacgctaaaagagttaggcactcgcctgcttaacggctggcagctatcgaagctgtatacctttgaagtcgccgcccggcatgagtcgtttgcgctggcggcggaggaactgtcgctgacgccgagcgcggtgagccaccgtatcaaccagctggaagaagagctggggatccagctgtttgtgcgctcgcatcgcaaggtagagctgacgcatgaaggtaagcgggtgtactgggcgctgaagtcctcgctggatagcttaaaccaggagattctggatattaaaaaccaggagctgtcgggaaccttaacggtttattcgcgcccgtccatcgcccagtgctggctggtgcctgcgctcggcgattttacccgccgctatccgtcgatatcgctcaccgtgctgaccggcaacgataacgttaatatgcagcgtgcgggcatcgatctggcgatctacttcgatgatgcgccttcatcgcagttgagccaccattttctgatggatgaggccatcgtgccggtctgcacggcgaactacgcgcgccagcatcagctaccgcagaatcccggcaatcttcgccactgtacgctgttgcacgatcgtcaggcctggagtaacgattccggcaccgatgagtggttcagctgggcgcagacattcggcatcgagttgccgcaatcgtcgggtattggcttcgatcgttcggatttagcggtgattgccgcgatgaatcacgtcggcgtggcgatggggcgtaagcggctggtgcaaaagcgcctggagagcggagaactgatcgcgccgttcggcgagatgaccctgaaatgccatcagcactactacgtgacgaccctgccgggccgtcagtggccgaaaatcgatgcttttatccactggctgcagagccaggcgcaattatga

SEQ ID NO: 174035 - DNA, 1185 bp, Klebsiella oxytoca
atgaaacggcataagaacttcaatttgttgttgatgctggtactgctggtggccgtcggccagatggcgcagaccatttatatcccggcgattgccgatatggcggtatcgctaaacgtgcgtgaaggcgcggtacagagcgtgatggccgcttatctgctgacctacggcgtctcgcagcttttctacggcccgctctccgatcgcgttggccggcgtccggtgatcctcgttgggatgtctatttttatgctggcgacgctgattgccattaccacccatagtctgccggtgttgatcgccgccagcgcactgcagggaatgggtaccggcgtcggcggcgtgatggcgcgtaccctgccgcgtgacctgtatgaaggcgcgcagctcaggcacgccaatagcctgctgaatatgggaattctggtaagcccactgctggccccgttgattggcggtattcttgataccttgtggaactggcgggcctgcttcgtattcttgctcattctttgcgctggcgtcaccttcagcatggcgcgctggatgccggaaacccggcccaccggcgcaccgcgcacccgtctcatcaccaactataaaacgctgttcggtaccggcgcgttcaactgctatctgctgatgctgatcggcggcctcgcgggcattgccgtattcgaagcctgttccggggtgctgatgggggcagtgctgggactgagcagtatgtcggtcagcattctgtttattctgccgattccggcggcgttctttggcgcctggtttgccgggcggccaaacaaacgcttcccgacgctgatgtggcagtcggtgatttgctgcctgctggcgggcgtgctgatgtggataccgggcctgctgggcgtgatgacagtctggaccctgctggttcctgctgcgctgttcttctttggcgcaggaatgctgtttccgctggcgaccagcggcgcgatggaacctttcccgttccttgcaggcaccgccggggcgttagtgggcggattacaaaacatcggttccggcgtgctggcgtggctgtcggcgatgatgccgcaaaccggccagggcagcctcggcctgctgatgatgctgatgggattgctgattctgctgtgctggctgccgctggcatcgcggtttcatcaacatcagcagccggtttaa

SEQ ID NO: 174036 - DNA, 834 bp, Klebsiella oxytoca
atgaccattaccgtattctgtatattgctgttcgccgccctgcttcacgcaagctggaacgctatcgttaaagccagcggcgataaaatgtacgcggcgattggcgttagcggctctgcctcgctcatcgccctggttttgctcccttttgccccccagccgacgctggccagcgtgccgtttcttgctgtctcctgcgcgctacaggtggtgtatacggtgctggtggcgaaaacctatcaggtctcggatatgagccagacctatccgctgatgcgcggaaccgcgccgctactggtggcgataatcagcgttatcttccttggcgaccacctctctccgctggcgtggctgggcatcggcgtcatctgcctggcgatactggcgatggcgtttaacggccgatcccgttcaagcaccggtatcctattagcgctgatcaacgcctgctttattgccggctatacgctggtagacggaaccggggtgcggctttcagaaaccgcactgggctatacgctatggaccttttttatgaatggcttctgtctgctgggctgggcgatgattgcccgacgcccgcaggccagccgctatctgcgccagcactggaagaaaggcctggtcggcggcgttggcactatgggttcttatggcctggcgctgtgggcaatgacccaggcgccgctggcggtggtcgccgccctgcgcgaaacctcaattctttttggcgcggttatcgcgtttatcctgttgaaagaaaagatggttccattacgcatcgtggctgcctgcggcattgccgccggggcgattctgctgcggctgtcgtaa

SEQ ID NO: 174037 - DNA, 447 bp, Klebsiella oxytoca
atggcccccttgttgattgccgccatcaccccggacgaacccggtttttcggcactacgcgccgaaagcctgacgcaaaacctgactatgctgggccgcctggcggagaactggcagagcgggataaaccgctttaacgcgccgggagaaaagctgctgggcgcttttgcatttgggcagctggtcggggtttgcgggctcaatgtcgacccttttagccagcagccgcgagccggccgcatccgccatttatatatcggcgagcgccaccgtcggcaggggatcgggcatcagctgctggtctcggttattacccactccggcgccagctttgattttctcaacacccatgcgccgtcaacggcctggtcgttttatgaaaatctgggatttcgcccggtctatgatgaaccgcgggtcacccatcgcctgttttgttcgctctag

SEQ ID NO: 174038 - DNA, 1689 bp, Klebsiella oxytoca
atggcaagttcgggcacaacatcacaaaaaatgcgcttcactggcgcacagttagtcgttcatttactggagcgtcaggggatcactacggtcagcggcattccgggcggctccatccttccgatttacgatgcgttaagtcaaagcactcagatccgccatattctggcgcgtcacgagcagggcgcgggatttatcgcccagggcatggcgcgcaccgagggcaaaccggcggtgtgtatggcctgtagcggtccgggagccactaacctgatcaccgctatcgccgatgcccgtctggattcgattccgctggtgtgcattaccggccaggttccggcctcaatgatcggcaccgacgctttccaggaagttgacacctacggtatctctatccccatcacgaaacataactatctggtacgcaacattgctgagctgccgcaggtgataagcgacgcgtttcgcatcgcgcagtccgggcgaccagggccggtgtggatagatattcctaaggatgttcaggccgcgaccattgagctcgatgccctgccggaacccggcgcccgtacggcggctccgatgttcgatagcgccagcgtgcgtgaagcggcggcgatgattaacgccgcgcagcgtccggtgctctatctgggcggtggggtgatcaacgcgcctgagcacattcgccaactggcggaaaaagccaacctgccgaccacccagaccctgatggcgctggggatgctgccgaaagcgcatccgctgtcgctgggcatgctggggatgcacggcgcgcgcagcaccaattttattttgcaagaggctgatttattggttgttttaggggcgcgttttgatgaccgggcgattggtaaaaccgagcagttctgcccgaatgcgaaaattattcacgttgatatcgaccgctctgagctgggtaaaatcaaacagccgcacgtggcgattcagggcgatgttggcgaagtgctggcgcagctgatcccgcaggtcgaggcgcagccgcgcagcgaatggctgcagctggtggccgatctgcagcgggagttcccctgcaccattccgcaggagcaagacccgcttacccactatggcctgattaacgccgttgccgcctgcgttgacgatgaggcaatcgtgaccaccgacgtcggccagcaccagatgtgggtcgcgcaggcgtatccgctgaaccgtccgcgccagtggctgacctccggcggcctcggcaccatgggctttggtctgcctgccgcggtaggcgcggcgctggctaacccgcagcgcaaggtcatctgcttctccggagacggcagcctgatgatgaacattcaggaaatggctaccgcggcggaaaatcagctggacgtgaaaattatcctcatgaataacgaagcgctggggctggtttatcagcagcagagcctgttctataagcagggcgtattcgccgcaacctatcctggcatggtcaactttatgcagattgccgccggttttggtctgcaaacctgtgatttaaataacgaagccgacccgcaggcggcgctgcaggcgattatcgatcgcccgggtccggcgctgatccacgtgcgtatcgatgctgaagaaaaagtgtatccgatggtaccgccgggtgcggccaatactgaaatggtgggggaataa

SEQ ID NO: 174039 - DNA, 291 bp, Klebsiella oxytoca
atgcaacaagcgactcatgaaaacgttattctacagctcaccgtgcgcaaccatcccggcgtgatgacccacgtttgcggcctgtttgcccgccgcgcatttaacgtggaaggcattctttgtctgccaattcaggacagcaaccagagccgcatctggctactggtcaacgacgatcagcgcctcgggcagatgattagtcagattgaaaagctggaagacgttgagaaagtggtacgcaatcagtccgatccctccatgttcagcaaaattgcggtgttcttcgaataa

SEQ ID NO: 174040 - DNA, 594 bp, Klebsiella oxytoca
atgaccacaatcgcccttattgacgatcatcttatcgtccgctccggctttgcccaactgctggggctggaagccgattttcaggtcgtcgcagaattcggttccgggcgcgaagcgctggcggggctgcccggccgcggcgtgcaggtctgcatctgcgatatctcgatgccggatatctccgggcttgagctgttaagccagctaccgaaaggaatgtcgatcgtaatgctgtcggtgcacgacagtccggcgctggtggagcaggcgctgaacgccggcgcgcgcggttttctctccaagcgctgcagcccggatgagctgatcgctgccgtccgcaccgtggcggccggcggctgctatctgacgccggatatcgccatgaagctggcggccggacgacgggacccgctgaccaaacgcgaacgcgaagtggcggaaaagctggcgcaggggatggcggtaaaggagattgccgccgagctgggcctgtcgccaaaaaccgtgcacgttcatcgtgccaatctgctggaaaagctgggcgtcagcaacgacgttgagctggcgcgccgcatgttcgatagctggcaatga

SEQ ID NO: 174041 - DNA, 1503 bp, Klebsiella oxytoca
atgaacgcctttctctcccggctgctctcggttatcggctgttgctttatcttttccgccgcgtggttttgcctgtggagcatcagcctgcacctggtagagcgtgccgatcttgcggtgctgctgtttcccttcgggctgcgtcttggcctgatgctgcagtgcccgcgcggctactggccggttctgctgggcgcggagtggctgctgatcctctggctggcgcaggaagttgcgctggcgcacccgataatattgatgaccggaagcctgttaaccctgctgccggtggcgctgatctcgcgctatcgtcagcagcgcgactggctcaccctgctgcgccaggggggcgcgctgatcgccgctgcgctgcttcagtcgctgccgtggctgctggagggtaaagaggggctgaacgcgctgctgctgaccctgaccggcggcctgacgctggcccccacttgcctggtgatttggcactatctcaccagcaccgtctggcggccgctggggccatcgctggtctcgcagccggtgaactggcgcgggcggcatcttatctggtacctgctgctgttcagcgtcagcctctggcttcagctggggctacccgccgagctctcacgatttacgcccttctgcctggcgctgccgattatcgctctggcctggcattacggctggcagggcgcgctgatcgcgaccctgatgaacgctatcgcgctgatcgccagccagacctggcacgaacacccggtggatttattgctttcgctgctggcgcaaagcctgacgggcctgttgctgggcgccggcattcagcggctgcgcgagctgaaccagtcgctgcaaaacgagctggtgcgtaaccagcggctggcggaacgcctgctggaaaccgaagagagcgtacgtcgcgaggtcgcccgcgagctgcacgatgatatcggccagaccattaccgccatacgcacccaggcggggatcgtccagcgtctggcgccgaacagcgccagcgtcaggcagagcgggcagctgattgaacagctttcgctcggcgtctatgattcggtgcgccgcctgctgggccgcctgcgcccgcgccagctggacgatctgacgcttgagcaggcggttcgctcgctgatgcgcgaaatggagctggaggatcgcggtatggtcagccatctggagtggcgtattgatgagtcgctgctgagtgaaaaccagcgagtcaccctgttccgcgtttgtcaggaggggctgaataatattgtcaaacacgccagcgccagcgccgtcacgctgcagggctggcagcaggagcagcggctaatgctggtgctggaggacgacggctgcggcctgccgccgggctccggtcagcagggctttggcctcaccggcatgcgcgaacgcgtcagcgcgctgggcggcaccttaaccatctcctgcacccacggcacccgcgtttgcgtcagcctgccgctgcgctacgcctga

SEQ ID NO: 174042 - DNA, 1320 bp, Klebsiella oxytoca
atgtttgcctttttgaaatctccgcctgatgctccgccgattaccgataaacaggcgctggacgagcgctaccgctactggcgtcgacatattctgctgaccatctggctgggctatgcgctgttttattttacgcgtaaaagctttaatgccgccgtgccggaaatcctcgccagcaacgtactgacgcgtagcgatatcggcctgctggcaacgctgttttacatcacctacgggctatcgaagtttttctccggtatcgtcagcgaccgctctgatgctcgctattttatggggattggtctggtcgccaccggcgtagtgaatatcctgtttggcttttccacttcgctgtgggccttcgcgctgctgtgggccctgaacgccttcttccagggctgggggtcgccggtgtgcgcgcgtctgctgacggcctggtattcgcgtaccgaacgcggcggctggtgggcgttgtggaacacggcgcataacgtcggcggggcgctgatcccgatggtggttggcgcggcggcgctgcactacggctggcgaacgggaatgatgattgccggcatgctggcgatcctcgccgggctgtttctctgctggcggctgcgcgaccggccgcaggctgtagggctgcccgcagtaggcgactggcgtcacgatgaactggagattgcccagcagcaggaaggggtagggctgacccgcaaagagatcctcaccaaatacgtgctgttgaatccctatatctggctgctctcgctgtgctacgtgctggtatatgtagtgcgcgcagcgattaacgactggggcaatctctatatgtcggaaacgctcggcgtcgatctggtcacggcgaattctgcggtcaccatgttcgaggtaggcggttttatcggcgcgctggtggcgggctggggctcggataagctgtttaacggcaatcgcgggccgatgaacctgattttcgccgccgggattttgctgtcggtcggcggcctgtggctgatgccgttcgccagctacgtgatgcaggcggcctgtttctttaccgccggctttttcgtttttggcccgcagatgctgattggcatggcggcggcggagtgctcgcacaaagaggcggcgggggcggcaaccggctttgtcgggctgtttgcctatcttggcgcgtctctctccggctggccgctggcgcaggtcatggagatctggcactggagcggttttttcgtggtcatcgccattgctgccggcatctccgctctgctgctgctgccgtttctaaatgcccaggcgccgcgagaagcgtga

SEQ ID NO: 174043 - DNA, 1392 bp, Klebsiella oxytoca
atgctggccttcttaaaccaggtgcgcaagcctaccctggacctgccgctcgaagcgcggcgcaaaatgtggttcaaaccgttcatgcagtcgtatctggtggttttcatcggctatctgaccatgtacctgatccgcaaaaactttaatatcgcgcagaacgacatgatctccacctacgggttgagcatgacgcagctggggatgatcggcctcgggttctctatcacctacggcgtgggtaaaacgctggtttcttactacgcagacggtaagaacaccaagcagttcctgccgtttatgctgatcctctcggccatttgtatgctcggcttcagcgccagcatgggtgcggggtcgaccagcctgttcctgatgatcgccttctacgccctgagcggctttttccagagcaccggtgggtcgtgcagctattcgaccattaccaagtggacgccccgccgtaaacgcggcaccttcctcggcttctggaatatctctcacaacctcggcggcgccggcgccgcgggcgtggcgctgtttggcgcgaactacctgttcgacggccacgtgatcgggatgtttatcttcccgtcgattattgcgctaatcgtcggttttatcggcctgcgcttcggcagcgactccccggaatcttacggtctcggtaacgccgaagagctgtttggcgaagagattagcgaagaggataaagagacggaagagaacgccatgaccaaatggcagatctttgtcgagtacgtgctgaagaataaagtcatctggctgctgtgtttctccaacatctttctgtacgtggtgcgcatcggcattgaccagtggtccactgtttacgctttccaggagctgaagctctccaaagaagtggcgattcagggctttaccctttttgaagtaggcgcgctggtcggcacgctgctatggggctggctgtcggatctggcaaacggtcgtcgggcgctggtagcctgcattgcgctggcgctgattatcgccacccttggggtttatcagcacgccagtaaccagtacgtttatctcgcatcgctgtttgcgctgggtttcctggtttttggcccgcagctgctgatcggcgttgccgcagtaggctttgtgccgaaaaaagcgattggcgcagccgacgggatcaagggcacctttgcctatctgatcggcgatagcttcgccaagctcggcctcgggatgatcgccgacggaacgccgatttttggcctcaccggctgggcggggacctttgcggcgctggatgcggcggcaattggctgcatctgcctgatggccatcgttgcggtgtttgaagaacgtaaaatccgccgtcagaaaaagacacaaactttgcagactgcctga

SEQ ID NO: 174044 - DNA, 453 bp, Klebsiella oxytoca
atgatctggttaggactggccacgctgatagtggtatttgttgtgggatttcgggtgcttacctctgattcacgccgtgcgattcgccgtctgagcgaacggttaggcattacgccggtaccgctggaatcgatgatcgatcagctgggaaaaacggccggtaacgagtatctgcgctacctggaacggccgaatgaagcgcatttgcaaaatgccgctcaggtgctgctgatttggcagactgctatcgtcgacggcagcgagcagaacctgcattactggtatcggttgatgaaaaaggcccgcctcgcggcgccaattaccgaagcgcaaattcgcctcgcgcaaggtttccttcgcgagctggagccggaagtgagcgagctgcacgctttacaggagcgctataacacgctgtttttacccgaagatggggtccactggctacactga

SEQ ID NO: 174045 - DNA, 324 bp, Klebsiella oxytoca
atgactgcaaaaactaaattcaaaagccccgcctttgaagctatccatagcgctgccgcaggtttatacagtgttgatgcgatcgcgcaggagacgatgcgcagctttgatgaaacatgcatcagccgcgtaagcgatttccaacctggtgaaattaaggctctacgtgaccaactcaacgtcagtcagccggtttttgcccgctatctgaacaccagcgtgtccacggtccaaaaatgggaaagcggggcaaaacgccccggtgggctggcattgaaattactcaatatcgtgcaaaaacatgggttagaagtgctggcatga

SEQ ID NO: 174046 - DNA, 360 bp, Klebsiella oxytoca
atgcgtatttttaaaacaaaatggtttaccagggaagcccgggctcatgcgattgatgacgacgaactttgcaaagcgattgaagccactctccagggaaaagtagataaccttggtggcggcgtttacaaaaaacgcctcaataaaaatcgcgatcgcgcaatcatcctggcaaagggtgctgagcattggttttacacatttttatacgccaaacaggatatcgccaatatcgataaccgagaactcgcggcgttccgtgagttagccaggcattattcccttctcagcgaggagaaaatggcggcattggttaagagaaaagaattggtggagatttgtcatgactgcaaaaactaa

SEQ ID NO: 174047 - DNA, 1182 bp, Klebsiella oxytoca
atgactccttcgaatgcctctgcgccgcaggctaatcaggcggcgcgacccaactggtcggcggtttttgcggtggccttctgcgttgcctgcctgattaccgttgagttcctgccggtaagcctgcttacgccgatggcgcaggatttgggcatctcagaaggcgttgccgggcagtcggtcaccaccaccgcgtttgtggcgatgtttgccagcctgtttatcacctcgatcatccgcagtaccgatcgtcgctacgtggtgattctgttttccgtcctgctgaccgtctcttgtctgctggtttcctttgccaacagtttctccttgcttctggtggggcgcgcctgccttgggctggcgctgggcggtttttgggcgatgtcggcgtcgctcaccatgcgactggtgccgatgcgcgtggtgcccaaagcgctgtcggtcattttcggcgcggtatcgatagcgctggtgatcgccgcgccgctcggcagcttcctcggcgggattatcggctggcgtaacgtctttaacgccgccgcggtgatgggcgtggtctgtacgatttgggtgttgaaggcgctgccttctttgcctggcgagtcgacctcggcgcagcaaaatatgtttggcctgttaaagcgccccggcgtaatggccgggatgtgcgccatctttatggccttcgccggccagttcgccttctttacctatattcgcccggtgtatatgacgctggcgggctttgacgttgacggcctgacgctggtgctgttgagcttcggcatcgccagcttcgtcggcacctcgctctcttcgatgctgctcaagcgatcggtgaaagcggcgctggcgatcgctccggtggtgctggccatcagcgcggcggtgctggtgctgtggggggagagtaaaatcgtggcgtcggcggtggccgttatctggggttttgccttcgcgctggtgccggttggctggtcaacgtggatcacccgctccctgtccgatcaggcggagaaagccgggtcgattcaggtggcggtgatccaactggccaatacctgcggcgcagcggtgggcggcgtggcgctggaccaccttggtctgctctcgccgctggtcctctccggtacattaatgctgctcaccggtgtactggtggcgacgaaagtacgggtgtaa

SEQ ID NO: 174048 - DNA, 810 bp, Klebsiella oxytoca
atgaaccgtattaacgccgttattcttgattgggcaggtaccaccgtcgactttggctccttcgcgccgacgcagattttcgttgaggccttccgtcaggcttttgccgtggagattacactcgaagaagccagggtgccgatgggtctcggcaaatggcagcatattgcagcgctggggaaactcccctccgtggacgcccgctggcaggcgaagtttggccgcgcgatgaacgctgccgatatcgatgcgatctatgccgcgtttatgccgctgcagattgctaaagtcgtcgattttgctgcgccaatcgccggggttgtcgacaccattgccgcgctgcgcgccgaaggtataaaaattggctcctgttccggctatccgcgtccggtgatggaaaagctggcgccggccgccgccgcgcagggctatgcgcctgaccactgggtagcgacggacgacctcgccgtcgggggacggccgggaccatggatggcgttgcagaacgtcattgtcctcggcatcgacgcggtagcccactgcgtcaaggttgatgattccgctcccggcattaccgaaggattaaacgccgggatgtggagcgtgggtctggcggtttccggtaacgaattcggcgccagctgggaggaatatcagcagatgagcgccgaagagatcgccgcccgccgcgagcacgccgccgggaagctgtccgccgccggggcgcattacgtcgtggatacgctggcggatttaccgggcgtcattgccgacatcaaccgtcgcctggcgcagggcgaacgcccgtag

SEQ ID NO: 174049 - DNA, 1104 bp, Klebsiella oxytoca
atgaattcacgcaattatctgctgctgacccccggcccactgaccacttcccgtacggtaaaagaggcgatgctgttcgacagctgtacctgggacgatgactacaatctcggcgtggttcaggccatccgccaacggctggtggaactggcgacgcccgccgacggctacacttcagtactgctgcaaggcagcggtagctacgcggttgaggcagtgctcggcagcgcgatcggcgtgcaggacaagattttgattatcagcaatggcgcctacggcgcgcgcatgatcgagatggcgaaactgttgaacattgcgcaccacccttacgactgcggtgaagtcgcgcgaccggacgctgcagcgatcgaacggatcctgcaaaccgacccggcgatcacccatatcgctatggtccattgcgaaacgacaaccggtatgctcaacccgatcgaagcggtggcggcgctggcaaaacggtacgacaaacgctacatcgtcgatgccatgagcagcttcggcggcattcccatggacgtcgccgcgctgaacattgactatctgatcagctccgccaacaaatgcatacagggggtgccgggcttcgccttcgtcattgcccgggaagcgcagctggcaaactgccagggccgctcgcgctcgctgtcgctggatctctacgcccagtggcgctgcatggaggataaccacggcaagtggcgctttacttcaccaactcataccgtgctggcctttgcccaggcgttaaaagaactggcggaagaaggcggcgtgagcgcacgtcaccagcgatactgcgctaaccagcagcgtctggtggccggaatgcgcgcattaggctttcagccgctgctcaacgatagcctgcactcgccgatcatcaccgcgttttactccccggatgcgccgcagtatcgctttaaggatttctatcagcggcttaaagagcagggtttcgtgatctacccgggcaaggtgtcgcaaagcgactgcttccgtatcggcaacattggcgaagtgtacgacgccgacatcaccgccctgctggcggccattaaaaacgccatgtactggcaacgctaa

SEQ ID NO: 174050 - DNA, 720 bp, Klebsiella oxytoca
atgaaatcaccctctggcgagacgccacagtatctgctgatcaaggcgcagctacaggcgcgtattcaaaacggcgcgttgaagagcggcgataaactgccttccgagcgcgagctgtgcgcgctgttcaataccacgcgtattacggtgcgcgagagcctggcgcagcttgaggccagcggcgtgatttatcgcgccgaccgccgcggctggtttgtcacgccggagcggctttggctggatccgacgcaaaataccaacttccataagctgtgcctggagcaggggcgggagccgaaaacggtgctgctggacgggcgtttaaccgccgttccgctggacgttatggcgccgctggcgctgcagccattcgatcaggtttacctgctcacccgtctgcgttatgccgacgggcgggcgatttgctactgtgaaaaccactgtctgcccgccagggttcccgagctgctgcgccatgatttaaacggcagcctgaccgagatttatcagacccgctatgacctgatatataccagtatgcatctgtcgttctggcccacctcgatgccgccccaggccgcggaagccctgggggtgatggaagggcgtccggcgctgctgctgcgccggctcaactacgatcaacacgggcgaattctcgattacgatatcgagtactggcgtcacgacagcctgcgcatcgaagtcgatacccattga

SEQ ID NO: 174051 - DNA, 1014 bp, Klebsiella oxytoca
atgaaactctcccgacttgctctgttaaccgttaccgtactcgccagcgccccggtgtggtccgctgacgttgtcaccgtttattccgccgacggcctgcacgacggcgacaacagctggtatcagaaccagtttgccgcttttacaaaggcaacgggcatcaaagtgcagtacgttgaaggcggctctggagcgattgtcgaacggctggcaaaagagcgcaccaatccgcaggcggacgtgctggtgacggtgccgccgtttatccagcgcgccgccaaagaacaattactggccgaatttaagccgcagggcagcgaccagatccccggcgtccacgaccgctactcgccgctggtgaacaactatctgacctttatctataacagcaggctgctgaaaaccgcgccggccagctggcaggatctgctcgatagccgtttcaggaacaagctgcagtactcgacgccgggacaggcgggcgacggtacggcggtcatgctgcaggcgttccacagcctgggcagcaaagatgcggggttcgattatctgggtaaactccagaccaacaacgtcggaccatcggcttctaccggtaagctgaccgcgctggtcaataaaggtgagctgtacgtcgctaacggcgatctgcaaatgaacctgtcgcagatggcgcgtaatccgcatgtgcaaatcttctggcccgcagacgctaaaggcgaacgcagcgcgctggcgctgccctataccatcggtctggtgcaaaacggcccgaacggtgaaaacggtaaaaagctgattaacttcctgctcgataagcccgctcaggccagcgttagcgcgctctcttgggggctgccggcgcgcagcgacgtgacgccggaagacgctaactttaaagcggcgaaagcggcgcttaacggcgtgaaaagctgggaacccaactgggacgaggttgcggcttcactgtcggcggatattgcccgctggcatcaagtcaccgacagcgagtaa

SEQ ID NO: 174052 - DNA, 1113 bp, Klebsiella oxytoca
atgttaatgaaaacgaccgtcgctcatcccccgtcgtcgacgggaacgtccgggatcactctcgactcgctgcgcgtttcttatcacggcaacgtggtgctgaagccgctgaccttaactattgaaccgggtgaagtgctggcgctgatcggtccatccggatccggaaaaaccacggtgctgcgggcgatagccggatttgtacagccggcgggcgggcggattttgctgggcgatacggatgtcacccacctgccgccgtatcaacgcggccttggcatggtggtgcaaaactacgccctgtttccgcatatgaaggtagaagataacgtcgccttcggcctgcgggcgcagaagcagccgaaaacggagatagctgcacgcgtcaaagacgccctgaaaatcgtcggcatggcggattacgccagccgctatccgcaccagctatccggcggccagcagcagcgcgtcgcgattgcccgcgccatcgccgtacgtccgcgggtcttgctgcttgatgagccgctctcggcgctggatgcgcaaatccgtcacaacatggtggaggaaattgcccgcctgcaccgcgaactgccggagctgaccattctctacgtcacccacgatcagactgaagccctgaccctggcggacaagattggcatcatgaaagacggctcgctcattgcccatggcgaaacccatcagctttaccactatccgcctaatcgtttcaccgccgagtttctcggacgcgccaatatcctgcaggcgacggcgctgaaagataccgcagggcctggcctggtcagcgtcagctgcggcggtggattgattaccgctttcagccgcggcggtcagcacggcaataataagctgctgtgtattcgtccgcagcatatgagcctcgcgccgcgaacggccaccagcaatcggcttaacgctaccctgcagtcggtgcactggcagggcgatttgacccacctgctatgcgacgtggccggggaggcggtgcgcattgtgatgacccacgtggatccgctgccgcgggccggcgacaggctggcgctctattttgaacccaacgatgcggtcctgattgaggtgtcataa

SEQ ID NO: 174053 - DNA, 861 bp, Klebsiella oxytoca
atgtcgcagatcctaacgctcccgcgtcgctctgttcagctgcggcccttactgtggcttctgccgccgctgctggtgctggcgaccctgtttttctatccgctgctgctgatcggcgaacaggcgctacgtgatgccagcggtcacctgagccttgaaaccttctggcaggtcgtgggatcccggcgctttatcaacgcgttgctcaatacgatgcaaatcgcgatcttcgccaccctgggctgcctgctgctcggcagcgtcctggcgctgattctggtgtttattccctttcccggcagccagttgatcagccgggtgattgatacctttattgccctgccgacctttctcattaccctggcgtttacttttatctacggctccgcgggtttgctgaacggcgcgctaatgtcgctattgtctttcgaactgccgccgatcgattttctttattccattcagggcgtgattctggcggaaatcaccgttttcacgcctctggtgatgcgtccgctgatggccgggttgcggcagattgataaaagccagctagaggcggcgagtattctcggcgcgcatccgctgcgggttatcggccaggtgattttcccggcggcgctgccggcgctgatggcgggcggtagcctgtgcctgctgctgacgactaacgagttcggcatcgtactgtttatcggcgccaaaggcgtgaatacgctgccgatgatggtgtacagcaaggctattctcgaatcggattacagccaggcctgcatgattgccctgataaatattctgctgtcgctgggactgtttataatctatcgcctggccgccgcgcgtaccggcgtgaggagctaa

SEQ ID NO: 174054 - DNA, 798 bp, Klebsiella oxytoca
atgttgatttggtcgcgtaaaggccgcgcggcggcgggcgcgctggcggcaacgctgtttgccggattcttcttcctgccgctggcggtgattttgatgtccagcttgagccagcagtggaacggcctgctgccgtccggttttacccttgggcactttgtgaacgcctttcgcggggctgcgtgggatgcgctcttttccagcctgatggttggattttgcgccagcctgttcgctctgctgtgcggcacgtgggctgcgctggctctgcgccagtacggcgcgaagctgcaaaaatatcttgggctggcgttctatttaccgagcgccattccttcggtatcggtgggtttaggcattctggtggctttcagccaggggccgctacaaatgaacggtactttctggatcgtgctggcggcgcacttcgtgctgatttctgcgtttaccttcagcaacgtctccaccggtctgacgcggatttccgccgatattgaaagcgtcgcctccagcctcggggcatcgccgtggtatcgcctgcgccatgtcacgctgccgctcatggctccgtggatgatctccgcgctggcgctgagcctgtcgctgtcgatgggggagctgggcgcgacggtaatgatctatccgccgggctggacgacgctgccggtgacgattttcagcctcaccgatcgcggcaatattgccgatggttcggcgctgaccatcgtgctggtgggcatcacgctgctgctgatgattaagcttgagcgcattgcccgccggatgagccagaggtaa

SEQ ID NO: 174055 - DNA, 1380 bp, Klebsiella oxytoca
atgaaaactgtaaaaatactgccattaaccatggcggtcgtcgccgcgctgtgcccagtttccgtatttgcacaagaatttactcaggaacagatcgacgccattgtcgccaaagccgtcgataaagccctggccgaacgccaggcgaaaatcgatgccgccgccaataaaaaagtggacgtcattaccaacccgcagaccaccgcagccacgccggatatggcgatccccttcggcctgaagttcagcggctacgcccgctacggcgcgcagttccagaccggcgatcagaagtttgtcggcgtggatggttcctataacggcgcctccgcgatcggtcgtttaggcaacgaaggcaacggcggcgaatttcagataaccaaagcctttaagagcagtaaaggcgcgatctgggatatcaacgtcatgtttgaccactggagcgacgaagttaacctgaaaaaagcctacgtcggcgttaccaacgtgctggagtctaaccccaacgcctatatctgggccggccgcgacttccatcagcgcccgcaacaggggattaacgactacttctggatgaaccacgacggccagggcgccggggtgaaaaactttgacatcggcggcgtacagtttgacgtggcggcggtgtcgcaggtggaatcctgtagcccggaagtgatggccgacgaagcgaacccgtcgcgcatcacctgtaccggcggctccggaaccggcgatgatggccactatgcgctgaccactaaaacccataatcttaaagccggaccgatcgacgttgaggtttacgccaactacggtttcgattcgaaagcggtagacagcgacgagcgtctcgaagcctggcagggcgggctggtgctgagccacaccaacgacagcggcgtcaataaagtgattctgcgctactccgacaactcggataacagcgtctataacaagaccgacgatctcaccgctatctatgccagctttgaagggctgcataaattcacccagcaggcgcagatcgaatatctgctggccttccacgactatgacaacggtacagacaataccgacaatcgtaaaaactacggcgccattgtccgtccaatgtacttctggaacgatgtccactccacctggctggaagcgggctatcagcgcgtcgattacgaccagggcggcgataaccacggctggaagctgacgctgtcgcagaatatcgccatcggtatggggccggagttccgcccgatgctgcgcttctacgtaaccggcggtcaggtagataacaagcgcaccgcaaaggtcaacggcaccaaagacgaacagctggattcgctgaacgttggcggcatgtttgaagcgtggttctaa

SEQ ID NO: 174056 - DNA, 303 bp, Klebsiella oxytoca
atgattgaactagaagatgcggtaatggaaattatcgttaatgcgggacagtcacgctcattatgttttgaagcgctgcattgtgcccgtagcggtaatatagatgaagcgcgcttgctgctgaatgaagccgatggctacgcccgccgggcgcaccagatgcaaacccagcttatcgcgcaggatgcgggccaagcgcgccagccgatgaccctcattatggtgcatgctcaggaccatctgatgaattcgctgctcgcgcgtgaattttcagaagagcttattcatttataccagcgttaa

SEQ ID NO: 174057 - DNA, 1326 bp, Klebsiella oxytoca
atgagttctctgtatcagtccatgattgccgtgatcgagcaatcaattaccccgctggcaggacgccttgggcagcagaaatacgttatcgcgattcgcgatggtttcactgccgcattgccgtttatgatcatcggctcattcatgctggtatttatctttccgcctttttcgccggataccactaacggtttcgcccgcggctggctggacttctcccagcagtatcgcgaacagctgatgctgccgtttaacctcagcatgggcgtgatgacgttctttatttcggtgggaatcggcgccagcctgggacgccagttccagctcgatccggtgatgtccggtctgctggcgtttatggctttcttactggttgccgcgccgtatgccgacggcaaaatctccacccagtatctctctggtcagggtattttcaccgctttgatcaccgctatctactctacccgcgtttacgcctggctgaagcagaacaacattacgattcgtctgccgaaagaggtgccgaccggcgtcgcgcgctcgttcgaaatccttatcccggtgctggtggtgatcgcgacactgcatccgctgaatctgtttatcgaagcgcagaccggtatgattctgccgcaggcgattatgcacctgctggagccgctggtttccgcctctgactctctgccggcgatactgctgtcggtgctgatgtgtcagattttctggttcgccgggatccacggctcgctgatcgtgaccggcattatgaaccccttctggatggccaacctgtcggcgaaccaggcagcgctggcggccggcgcggctctgccccatgtctatctgcagggtttctgggaccactatctgctgattggcggcgtcggctccacgcttccgctggccttcctgctgctgcgtagccgcgtagctcacctgcgcaccattggcaaaatgggtatcgttccgagcttctttaatatcaatgaaccgattctgttcggcgcgccgataatcatgaacccgatgatgtttatcccgttcgtctttgtcccgatgattaacgccgttctggcttacggtgcgacgcgcctcggctggctcagccaggtcgtttcgctgaccccgtggacgaccccggcccctatcggtgcatcctgggctgcaaactggacgctaagcccggtggtgatgtgcttaatttgcatggtgatgtcagcggtaatttatctgccattcctccgcgcctatgaacgctcattaatgaaaactgaagtcgaaaaagccaaagctgcggtgccggttgccgaaacggtcagccaataa

SEQ ID NO: 174058 - DNA, 312 bp, Klebsiella oxytoca
atgtacaagattatgctgtgctgctctgccgggatgtccaccagtctgttggtcagaaagatggtcgatgccgcgaaggaacgcgccctgccggtgcagattgatgcctatggagtttccgaatttgatatgcagtttccgcagtaccaggtggtgcttcttgggccccaggtgaagtacatgctgaaaaccttatctgagaaagccgcgcccctgaatattccggtccagccaattaacaccatggattacgggatgcagcggggagacaacgttctggattatgccctgtcgctgatcgaagcgcattaa

SEQ ID NO: 174059 - DNA, 942 bp, Klebsiella oxytoca
atgtctactatcaacgatgtatcacgattagctggggtatctaaagccacagtctctcgggtgttgagcggttcgcgcggcgtaaaggaagccagccggcaggcggtattacaggcggcggaagaactcaactaccggccgaacatgatagcgcaatctttgctgagtcagaccaccggctgcatcggcgtgatctgcgcccaggacaacatcaatcaaaccaccagctatctctatgcgctggaaaagcagctcagccagcaccagaagcatctgctgctgcgttttgccaacagccgcggtagggtgctgcactctctggaagagttaacctgcggtttatgcgacaacgtgctgattatcggcgcccggtttccgctcaatatcgaccgtcctgacgtggtgctgatcgactgtctggaaagcgaaggggcgaacagtattcattttgaccacgcattcgcggcggaaacggcctgtaactatctgataagccaggggcgcaggcagattgcgcttatccacccgcagggcagcggctttgcagaccaggtcctgctgggctataagcacgcgctggaaaagaattttctgccgtttaatcgcaacctggtttttctcgacagtccttcgccatccgtagcggtgcaggagctggtgaataacgcaacaaccctgaacttcaatgcgttattggttgccaacgagcagcaggcgcagctggtggtgccgcagctccaggcatttaaccgcgcggtgccggaaaaagtcatggtattcagcctggcgggctcgttacagctgcccggtattccgaccatcccggcgattgaatattccatggacgcgatggccagccggatagtcaactggctgaccgagaagacgcaaatgctcggcagtagcccgctgcgcggggatttgatcatcccgaaccgctga

SEQ ID NO: 174060 - DNA, 297 bp, Klebsiella oxytoca
atgatgaagagaatgagtattgcgctttcgctggcagccagcctgatgctaccccatctggccgcagccgcgccgctctccggcctgaagtttgaacagcagaagcagcagatcgtgaaggatgtgaggaaaaactgccctgccagcagcgcgctggatgatacgcagtttgctaaccgcgtgctggaatcagcggaaaataagaccgccgtacaaagcgcgacgcgggcgctggataaaaacaacagcgccgcttatcagaaggccattagcggcattcagtgcccaacgccctga

SEQ ID NO: 174061 - DNA, 966 bp, Klebsiella oxytoca
atgatgaaaaaaggaacgacctcgacgccgcacgacgcggtttttaagcagtttttatcgcatcccgagtgcgccagggattttatcgacattcatcttcccgcgtcgctgcgccagctatgcgatctgcaaacgctcaggctggagtcaggcagctttattgaagcgaatttacgcgccagctactccgacgtgctgtggtcgctaaaaaccagcgacggtgatggctatatctacgtggtgattgaacaccagagcacgccggatgcgcatatggcattcaggctgatgcgctacgcgctggcggcgatgcagcgtcatctggatgccgggcataaaacgctgccgctggtggtgccgatgctgttttatcacggcgcgaaaagcccttatcccttctcgctttgctggctggatgagtttaccgatacgcagacagcacgacgactttatgccgccgctttcccactggtggatattacggtggtgccggatgacgacattatgcagcaccggcgtgtggcgctgctggagctgattcaaaagcatattcgccagcgcgatttacttggcctggtggagcgattagcagagctgttggttaaaggttgcgctaatgacagccagttgaaagcgctgtttaattacatgctgcagtgtggtgatgcgcctcattttggtgaatttcttcacgaggtcgagcggcgcgttcctcaacataaggaggtactcatgacgattgcggaaaggctacggcaggaagggagacaagaaggcaagttggagggcaagttagagggcaagttagaaggtaaacaagagggtagacaagaagaagcgttgcgtattgctcgttcatgtctggaacagggatttgagcgcgagctggtgcaggtggtttgtgagctgtcggatgacgatctgaagatgctgcaaactcaggtcgcagcatctccggccagataa

SEQ ID NO: 174062 - DNA, 903 bp, Klebsiella oxytoca
atgggctccagcaaaaaagggatgctgaacgtactgatcgccgccgtgctgtggggcagttccggcgtctgcgcgcaatatattatgcagcaaagtcagatgtcatcgccgtttctgaccatgacgcgcctgctgttcgccggtctgattcttctgatgctctcgttcgttcacggcgataaaattttccgcgtcctgcaaaatcgccaggacgctatcagtttgctgattttttcgctgttcggggcgctcaccgtgcagtacacctttctgatgaccatcgagaaatcaaacgccgccaccgcgacggtgctgcagttcctgtcaccgacgattatcgttgcgtggtttgccatcgcccgcaaaacgcgccccagtccgctggtgctggcggccatcggtacctcgctggcgggcacatttctgctggtgacccacggcaatccgacaacgctctcgatttctcccgcagcgctgttctgggggattgcttcggcatttgccgccgcgttctacacgacatatccatcgacgctgattgcccgctacggcaccctgccgattgtcggctggagcatgctgctcggcggcgccatgctgctgccattctacgccggacagggcaaccattttgtggtgaccggcggcctgctgctggcctttttctacctggtggttatcggcacctcgctgacgttcagcctctacctgaacggcgcgcagaagattggcggcgcgaaggcggggatcctcagctgcgcggagccgctgagtagcgccctgctctcgctgctgctgctcggcattacctttagcctgccggactggctgggcacgctgctgattctctcgtcggtggtgctgatcgccatggattcgcggcggcgggtgaaaacaggctga

SEQ ID NO: 174063 - DNA, 1434 bp, Klebsiella oxytoca
atggcgaaaataaataaagagatgatagcgcggatcctgcagcacgtgggcggagccgggaacgtcgcgcaggcgggcaactgtatgacccggctgcgcctgaccctacgcgatgaatcacgggccgacagcgccgccatccgtcagattgacggcgtgatgggagtgatcgttagcgatgaacagttccaggtcgtccttgggcccggcaaggcgcaaagcgcggcggaaatgatgaacgcgttactggaagacgcgccggcggaggcgccatcgctggccgacgtcgccgccgaaaagaaacaggcgctgaagagcaagcaaaccagcggcattcaaaaattcctcgcgaaattcgctactattttcaccccgctcattcccggttttatcgccgtcggcctgctgctggggttcgccactttggcggagcagatattcgtccttgaaaacgcgcatccgaatgcgacgctgctggcgctgatcggctacatgaaggtattcagcaaggggatgtttaccttcctgagcatcctgatcggctataacgcccagaaagccttcggcggctccggagtcaacggagcgatcatcgctgcgctgtttgtcctcggctataacccggaagccaccagcggcttctattccggaatttcgaccttcttcggccacggtattgacccgcgcggcaatattatcggcgtactgatcgcctcgattatcggcgcgtgggtggagaagcaggtgcgacgcatcatgcctgccaacctcgatatgatcctcacctcggcggtgacgctgctgatcatgggcgcgataacgtttaccgttattatgccgatcggcggctggctgtttaccgggatgtcatggctgtttttgcaccttaacggtaacccgttcggatctgcggttttggccggcctgttcctgctggcggtgatgttcggcgtccatcagggcttcgtgccggtctatttcgcgctggtggatgcgcaggggtttaactcgctgtttccgatactggccatggccggggccggacaggttggcgcggcgctggcgcttttctggcgggcgaagcacggttctctgctgcgcacgcagattaaaggggcaattatccccggcttcctgggcatcggcgaaccgctgatttacggcgtcacgctgccgcgtatgaagccgtttatcaccgcctgtctcggcggcgcctgcggcggtttctttctcgggctcatcgcctggatggggctgccggttggcctgaatacggtgtttggcccgtcggggctggtggcgctgccgctgatgacctccggcagcgggatctacgccggaatggcggtgtatgccgccgggctggcggtctcttatctctgcggatttgccctcacctggctattcggcagtaaaaacgttgatttaagctaa

SEQ ID NO: 174064 - DNA, 903 bp, Klebsiella oxytoca
atgagtatcgacctgagcaaactgctgaccgagcgccgcaacgccaatagcgtcaacattgataccctttccaccgaagagatgctgtcggtgattaaccaggaagatcggaaggtggcccacgccattaccccctatctgccgcaaattgcccaggtcgtggataacgtcgcggcggcgctgcaggcgggagggcgcctgatttacattggcgcgggtacttccggtcgcctggggatccttgatgccagcgagtgcccgccgaccttcggtacccgaccggagcaggtggtgggcattatcgcggggggtcataaagcgatcctgagcgccgtggaaaacgtcgaagacaacaaagcccaaggggcgatggatttgcagaacctgaactttagcagccgcgacgtactggtcggcctggccgccagcggacgcacgccgtacgtcatcggcgcgatggagtatgcccatagccagagcgcttttgtcgccatcgtcagctgtaacccgcacggcgaaatggcccaactggcggacgtcgccattacgccggtcgtaggtccggaagtggtgaccggctcaacgcgcctgaaggcgggcaccgcgcagaagctggtgctgaatatgatttccaccggggcgatgattcgcatcggcaaggtttacagcaatctgatggtggacgttgaagcgaccaacgccaagcttatcgagcgccaggtgtccatcgtcatggaagcgaccgaatgcgatcgcgcaaccgcccagagcgcgctggaagcctgcgatcgccactgcaaaacggcgattgtgatggtgctggctgatttaagcgccgcggaggctcaggcgctgctggcaaaaaataacggctatatccgcaaggcgctgagccactcctga

SEQ ID NO: 174065 - DNA, 1167 bp, Klebsiella oxytoca
atgtcccgaatttccctctcctgggtcgtggttctcggtttgcttagcgccattgggccgctgtgtaccgacttctatctgcccgcgctgccggaaatcacccagcagctcagcgccaccggcacgcagacccagctgtcgctcacggcggcgctgattggtctcggccttgggcagctgtttttcggcccgctgagcgatcgcattggccgtaaaaagccgctggcgctctccctgctgctgtttatcttctcctcggcgatgtgcgcgataacctacgatatccatatgctgatcgcctggcgctttctgcagggcttcgccggcgcgggcggctcggtgctgtcgcgctccatcgcccgcgacaagtatcagggcactctgctgacccagtttttcgccctgctgatgaccgttaacggcattgcgccggtgctttcaccggtactcggcggctggatcatcaccgccttcgactggcgtattctgttctgggcgatggcggcgatcggcattattttgctgctgctcagcctgacggtgctgcacgaaacgctgccggttaaaagcgccgcctcggttacgcagcagcaggatgaggcgccggtactgaaaaaccgccgctttatgcgctactgcctgattcaggcctttatgatggccgggctattttcgtatatcggctcatcttcgttcgttatccagagcgaatatgccatgagcgcgatgcagttcagcctgctgttcggcctaaacggcatcgggctgattatcgcggcgctgatcttttcccgcctggcacgccgcttcagcgccgaagccctgctgcgcggcggccagctgctggcagtgacgtttgccgccatcaccctgctcttcgcctggctaccgctgccgacgctggcgctggtcggcctgttttttaccgtttctatgatgagcggtatcagcaccgtcgccggtgcggaagcgatgaatgccattaatgcccgtcaatccggcaccgcgtcagccctgatgggcacgctgatgtttgtgttcggcggtattgccgcgccgctggccggactcggcggcgaaacgatgctcaaaatgagtttcgcgatgagcctttgctatctggccgcgctgctgattggcctgaaaaagccgcggcccacggtataa

SEQ ID NO: 174066 - DNA, 1365 bp, Klebsiella oxytoca
atgtttcgttttaccatagtctttgttgcgctcctgacggcgggctgcgtctctctcgatccgaactatgagcgcccggccgcgcctgtgccagcgaccctgccgggcagccacggcgaggcaaccgcggtggtcagcgactggcagcaggtagtgaatgacgcccgcctcaaaaaagtggtgaacatcgcgttaaccagcaaccgcgacgtgcagaaagcgctggccgacatcgaagccgcgcgcgcccagtttggtgaaacccgcgcctcgctgtttccgaccctcgacgccgagctgagccatacccgcagtaaaacggtggccagcggtctcacctcgtcagcggaagccgacggcgcggtttccagcttcgagctggatctgtttggtaagaaccaaagcctgacgcgcgcggcgcgggaaacctggcttgccagcgaattcaccgctcagaatacgcgtctgacgatgattgccgatctgaccaccgcgtggataaccctcgccgcggacaacagcaatctggcgctggcgcaggaaaccatggccagcgcggagaactcgcgcaacatcgtcacccgccagatggaagtcggcaccgcctcagctggcgacctgagcgatgcggaaagcgtttatcagcaggcgcgcgccagcgtcgccagctatcgcacgctggtggcgcaggataaaaacgcgctcaacctgctggccggagaaaccgtgccggatagcctgctgcccggcacccttgaaagccttggcgatcgtagtatcaccctggtgccggcgggcgtctcttcatcgatactgctgcgccgcccggatatccaggaagcggagcataatctgaaaagcgctaacgccgatatcggcgcggcgcgggccaacttcttcccgtccatctcgttgaccgccagcgccggggtcggcagcgactcgctctcgtcgctgttcagccacggcatgcaggtgtggtcattcgcgccgtccatcagcttgccgctgtttaccggcggcagcaacctggcgcagctgcgctacgctgaagcggagaaaaagggtctgatcgccacctatgagaagaccattcagagcgcctttaaggatgttgccgacgcgctggcgcgccgggaaacgctcagcgaacagctggacgcgcagaataaatacgtcgcggcggagcagaaatcgctgaatattgcgatgaagagctatcaggccggggtcggagattatctgtcggtgctgaccgcccagcgaacgctgtggtcggcgcaggccacgctgatctccctccagcagaccgatctggaaaaccgcattaccctctggcagtcgctgggaggcggcgccagctaa

SEQ ID NO: 174067 - DNA, 3108 bp, Klebsiella oxytoca
atgttttcccgcttctttgtgcgacgcccggtcttcgcctgggttatcgccattctgattatgctcgccgggattctggctatccgcaccttgcctgtcgcccagtatcctgacgtcgcgccgccggcgataaaaatctccgccacctacaccggggcctctgcggaaaccctggaaaacagcgtcacccaggtgattgagcagcagctcaccggactggataacctgctctactttacatccaccagcagctccgacggctcggtcagcattaccgtcacgttcgagcagggtaccgatccggataccgcccaggttcaggtgcagaacaaagtgcagcaggcggaatcccgtctgccgagcgaagttcagcagtctggcgtaacggtggagaaatcgcagagcagcttcctgctgatcctcgcggtgtatgacaaaaacaacaaagccaccagctccgatatctccgactggctggtcagcaacatgcaggatccgatggcgcgtatagaaggcgtcggcagtctgcaggtgttcggcgccgaatacgccatgcgcatctggatggacccgaccaaactggcctcctattcgctgatgccatccgatgtgcaatcggctatagaggcgcagaacgtacaggtgtccgccggtaaaatcggcgcgctacccgcctccaacgcgcagcagctgaccgccacggtacgcgctcagtcgcggctgcaaaccgtcgcccagttcaaagagattatcgtcaagagcaagagcgacggttcggtggtgcgcctgagcgacgtcgcccgcgttgaaatgggcagcgaagattacaccgcttccgccaatcttaacggccatccggctgcggggatcgcggtaatgatggcgccgggcgctaacgccctgaataccgcgacgctggtaaaaaacaagattgccgagttccagcgccagatgccgcagggctacgatatcgcttacccgaaagacagcaccgagttcatcaaaatctcggtggaggatgtgattcagacgctattcgaggcgataatcctcgtggtctgcgtgatgtatctgttcctgcaaaacttccgcgccacgctgatcccagcggtggcggtcccggtcgtactgctgggcacctttggcgtactggcgctgttcggctactcgatcaacaccctgacgctatttgcgatggtactggcgataggcctgctggtggatgacgccatcgtggtggtggaaaacgtcgagcgtatcatgcgcgacgaggggctgcccgcccgcgaagccaccgaaaaatcgatgggtgaaatctccggcgcgctgatcgccattgccctggtgctctcggcggtatttctgccgatggccttcttcggcggctcaaccggggtgatttatcgccagttttcagtgaccattatctcggcgatgatgctctcggtagtggtcgccttaaccttaaccccggcgctgtgcggcgcgctgctgagccattcgaaaccgcataccaaaggcttcttcggcgcctttaaccgcctgtggggacgcaccgagcagggctatcagcatcgtgttgtcggcggcctgcgtcgctcggcgatgatgatgggcgcttttgtcctgatttgcggcggcatggcgctggcgatgtggaaattgccgggcagcttcctgccgacggaggatcagggcgaaatcatggtccagtacacgctgcctgccggagcaacggcggtacgcaccgccgaggttcgccgccaggtcaccgactggttcctgacgaaagagaaagccaataccgacgtgatctttaccgttgacggttttagctttagcggcagcggacaaaacgccgggatggccttcgtgtcgctgaaaaactggtccgaacgtaaaggcgaagaaaataccgctcaggctatcgccctgcgcgccaccaaagagctcggcagcattcgcgacgccaccctgttcgccatgaccccgccgtcggtagatggcctggggcagagtaacggtttcaccttcgaactgatggccagcggcggcaccgatcgcgacagtctgatgaaaatgcgcagccagctgctggccgcggcgaatcaaagttccgagctgcagtcggtacgcgccaacgatttgccgcaaatgccgcagctgcaggtcgatatcgataacaataaagccgtctcgctcgggctgtcattaagcgatgttaccgataccctctccagcgcctgggggggaacctacgttaacgactttatcgatcgcggtcgcgtgaagaaggtctatatccagggcgaaagcaacgcccgcgccgtgccgtccgacctcggtaaatggttcgtacgcggcagcgatgacagcatgacgccgttctccgccttcgccaccacccgctggcaatacggcccggagagcctggtgcgctacaacggctccgccgcctttgaaatccagggcgaaaacgccagcggcttcagctccggcgcggcaatggacaagatggaagccctggccaatgacctgccggccggtaccacctgggcatggagcggcatgtcgctgcaggaaaaactcgccagcggccaggcgatgagcctctacgccatctcgattctggtggtcttcctgtgcctcgcggcgctgtatgagagctggtcggtaccgttctcggtgatcatggtgatcccgcttgggctgctcggcgcggcgctggcggcatggatgcgcggtctgaacaatgacgtttacttccaggtggcgctgttaaccactatcggcctgtcgtcgaagaacgccatcctgatcgtcgaattcgccgaatcggcggtggaagagggctattccctgtcgcgtgccgccatgcgcgccgcgcagacccgcctacgacctattgtgatgacctcgctggcgtttattgccggggtgctgccgctggcgatcgccaccggagccggggccaacagccgcgtggcgatcggtaccgggattatcggcggaaccctgaccgcgacgctgctggcggtgttcttcgtgccgctgttctttgtgctggtgaaacgcttcttcactcgccatcgttcttctcaggagtaa

SEQ ID NO: 174068 - DNA, 1125 bp, Klebsiella oxytoca
atgaaatacactatagcccccatcgcagcagcattatttctccttagcgggtgcgataatgcgcaaacctcctccccgcagcagatgacgccggaagtcggcgtcgtcactctgcaggggcaacctgtcccggtggtaagcagcctgaccggacgcaccaccgcctcgcttagcgctgaagttcgcccgcaggtgggcgggatcgtgcaaaaacgcctgtttaccgaaggcgatatggtcaaagccggacaggcgctgtaccaaatcgacccgtcaagctatcgagcgacgtttaacgaagccgccgcatcgctgaaacaggcccaggcgctggtgaccgccgactgtcaaaaagcccagcgctacgcggtgctggtcaaagataacggcgtctcccgtcaggacgccgatgacgcaatagcgacctgtaatcaggataaagccagcgtcgagtcgaaaaaagcggcgctggaaagcgcgcgtatcaacctgaactggaccaccgtgaccgcgccgattgccgggcgcatcgggatctcatccgtcacgccgggggcgctggtatccgccgatcaggacaccgcgctggcgacgatacgcggcctggatacgatgtacgtcgatctcacccgatccagcgtcgatctgctgcgcctgcgtaagcaaagcctggcgagcaacagcgatacgctcaacgtgaccctgacccttgaagatggcagcacctacagcgaaaaaggccgcctggcgctgaccgaagtggcggtagatgaatcgaccggatcggtcacgctacgcgcggtcttccccaatccgcagcatgtgctactgcccggtatgttcgttcgcgcccgcatagacgaaggcattatgaacgatgcgatcctcgccccgcagcagggcattacccgcgatgccaaaggcgatgccaccgcgctggtggttgatgctaataacaaggttgaacagcgcagcgtggaaaccggcgaaacctacggcgacaaatggctgatcgttaacggtctgaagagcggcgaccggctgattgtcgaagggaccggcaaagtggcgccgggccagcaggtcaaagccgccgaagtcaaaaatgacggaggcaacgcctga

SEQ ID NO: 174069 - DNA, 417 bp, Klebsiella oxytoca
atggcattaataataacagagaacattaatcctaccgatcaagaagagctgctggcgggcctgcgggaatacaatttgcgctttctcgacccggctcagttcggcgagctgggcgtttattcacgcgatgaagctggcgcgatgcgcggcgggttgattgccaaacgcaaaggcagctggctgtgcattgagtatttgtgggtcagcgaagcttcgcgcggcagcggcctgggcagcgagctgatgtatgaagcggaatctcaggcgcggtcgcgtggctgcagccatatgctggtggatacgttcagctttcaggcgctgccgttttatcagaagctgggctatcagctgcagatgtcgctgccggattttccgcacgcgggtatgcagcgccattatttatcgaaagtcttgtaa

SEQ ID NO: 174070 - DNA, 648 bp, Klebsiella oxytoca
atgtcagcacaaaaagacaacgaagcaccgcgtcgtcccggtcgtccgcgcgggcaaaaatccggctccgccaaccgcgaacagctgatggatattgccctggcgctgtttgcgcgccacgggatcgcccgcatttcgctgaacgccattgctaaagaggcgggggtgacgcccgcgatgctgcactactacttcagctcgcgcgaagcgctggtggaaaagctggttgaggagcgctttatgccgctacgcagcgagatcggacagatttttgtcgcgcacggcgacgatccggtcaccgcctttacgttgctcattaaaaccctggcgaccatggcggagaaaaacgcgtggttcgcgccgctgtggatgcaggagatcatcggcgagatgccggtgctgcgccagcatatgcacgcgcgttttggcgatgagaagtatcataagatgctggagacggtgcgccgctggcagcgggagggcaagcttaatccggcgctctccccggagctgctgtttaccactctgataagcctggtgctggtgccgttctcccgcacccacaccgatccgcggttaaaatcggtagaccgggagatgattgtcagccatgccctggcgttgacagacaatggcatcggcggctaa

SEQ ID NO: 174071 - DNA, 1497 bp, Klebsiella oxytoca
atgacatctgaagtcgccacccaaccggcggtaccctcgatccgcctgctcttcagcgccctgctgctggtgatgctgctctcggcgctggatcagaccatcgtctccaccgcgctgccgaccatcgtcggtgaacttggcgggctggataagctttcctgggtggtcaccgcctatatcctgagttcgaccatcgcggtgccgctgtatggcaaatttggcgatctgttcgggcgcaaaatcgtcctgcaggtggcgattgtactgtttcttgccggttccgttctttgcgggctggcgcaaaatatgacccaactggtgctgatgcgcggcctacaggggctgggcggcggcggcctgatggtgatcagtatggcggcggtggctgacgttatccctcccgccagacgcggccgctatcagggactgtttggcggcgtctttggcctggcgacggtcatcgggccgttaattggcggcttcctggtgcagcactcctcctggcggtggattttttatatcaacctgccgctggggctgtttgcgctgctggtgatcggtgcggtttttcacagcagcaacaaacgcagccagcatcagatcgactggctgggagcgatctatctcagcatggcgctgctgtgcatcatcctgtttacctccgagggcggcagcgtccgcgcgtggagcgacccgcagctgtggtgcatcctggcgtttggtctggtcgggatcgttggctttattcatgaagagcggctggccagcgagccgattattccgctctccttgttccgcaaccgcagctttttgctgtgcagcctgattggctttgttatcggcatggcgctgtttggctcggtgacctttctgccgctctatttacaggtggtcaaagaggcgacgccgaccgaggcgggcctgcagttaattccgctgatgggtggcctgctgctgacgtcaatcatcagcgggcgcattatcagccgcaccggcaagtatcgcctttttcctattatcggcactctgctgggggtcatcggcatggtgctgctgacgcgcatcactattcactccgcgatgtggcagttgtacctgtttaccggggtgctgggggcgggcctggggctggtgatgcaggtgctggtgctggcggtgcagaacgcgatgcccgcgcagatgtacggcgtggcgacctccggggtcacgctgtttcgatcgattggcggttccatcggcgtggcgctgtttggagcggtgtttacgcatgtgctgcaaagcaatctccagcgcctgctgccggaaggcgcgcagctgccgagggcgctgaacccggcggcggtgcagaatcttccggcggagattcgcctcgattacctggatgccttcgggtccgctattcatgcggcgtttctgatggccgccggcattatggcggtagcgttcgcgctctcctggttcctgaaagaagcgccgttaaaaaccaccgcaggctag

SEQ ID NO: 174072 - DNA, 915 bp, Klebsiella oxytoca
atggaccgacttagcgcgatggcgctgctggtaaaagtgaccgaactcggcagtatgtcggcggctgcgcgggcgctgaatatgcccctgactaccgtcagtcgccagattggcgaactggaaaataccctcggcgtacgcctgatgatccgcactacgcgcaagctgacgctgaccgatgccggcgtcgattatgtcgccgccgcgcggcgcattctggaagaggtagagcgcgccgagcgccaggcggcgggtgaatatcaggagccaaaaggcgaactggttctctcagccccaaccatgtttgggcgcctgcatgttttaccgatagtcgcccgttttctcgctcgttacccgcagattcgcgtccgtttgctgctcagcgaccgcaatgccgacctggtgggcgaccatattgacttagcggtacgtatcggcccgctaccggacagcgggatggtggccacccggctgggcgagatgcgcatcgtgacctgcgcccacccggctttgttggaaaaacacggcataccacaacgcccgcgcgagctggccgcgctaccaatcattggtattgaatcaccgatgccttaccgcggctggcgctttcacgccgaagaggcggaggaccggctggtgctggtgcagccggtgctgtcactgaccacgccggagagcgccgccgaggctgcccgccagggagtcggcgtggcccgactgctgcattaccaggcgatcgatggcctggcccgcggcgaattacggatgatcctgcaagcgacggagccggaacctgtgccggtgcacctgctgtacacctcccgggatctggctccgctcaagctgcgtaaatttatcgattttgccacaccggcactgcgccaggcgctgttacgtattgccgccgccgtctag

SEQ ID NO: 174073 - DNA, 627 bp, Klebsiella oxytoca
atgccagcagaatttcttgatatcgccatgacgccggacgtaatggatgtccagcatgaaatgggcagcgatgagctgtggcaggcgccgcatcgccagcgccggggtgagcgcttcggcgccagcgaggaggcgatgattgtcacccgcgacagcttctatctggccaccctttcgcaaaccggctggccctatgttcaacatcgcggcggtccggtgggctttgtgcatctgctggatgaaaccaccctggcgatggcggatttttccggtaatcgccagtacatcaccaccggcaacctgcgcggcagcaatcgagcctgtctgtttttgatggattacccgcggcgtgccaggctgaaaatctacgccaccgtagaggttgtggcggtggatgccgacccgcagctgctggcgcgggtggccccggagaactatcgggcccggattgagcgcatttatcgtttccgcttacaggcttttgactggaactgcccgcagcatattaccccgcgctacaccgcccgacaggtggcggagtatagccagacgctgcaacagcgtattgacgagctggagcgggaaaatcagcgtctgcagcagcgtattcatacaggagattcatga

SEQ ID NO: 174074 - DNA, 471 bp, Klebsiella oxytoca
atgaccgaacaacgtccgcctctgccgccgttcacccgcgagagcgccgcgcaaaaagtccgagccgctgaagattgctggaacagccgcgatgccgctaaggtcgcgctggcctataccgtcgatagcgaatggcgtaaccgcagcgaatttgttcacggcagaacgcagattatcgacttcctgcagcgcaaatggcgtaaagagcaggagtaccggctgattaaggagctgtgggcgtggagcgataatcgtattgcggtacgctttgcctatgagtggcacgacgacagcagcaactggtttcgttcatacggcaacgaaaactgggagtttgatcggcacggcctgatgcagacgcgctacgcctgcatcaacgatctgccgataaccgaaagcgagcgtctgtttcactggccccagggccgtcgtccggacgatcacccggggctgagtgagctggggctgtaa

SEQ ID NO: 174075 - DNA, 921 bp, Klebsiella oxytoca
atgattttatttccggttgcggtttttgcgtttaaaacctccccacaaagtcgttatagtttcagacgaaaaaataataacgatcttctatggactgatggggtgataacaatgaaattgcgtttacggacagccgccgccgtggtgctggcgggcctgctgctggcgggctgcgaccagaagggcagcgatgcgaaacacattaaagtcggcgtgattaacggcgcggaacaggatgtggcggaagtggcgaagaaagtggccaaagagaaatatggcctcgacgttgagctggtgggttttagcggctcgctgctgcccaatgagtccaccaacgccggcgatctggacgccaacgtcttccagcatcgcccgttcctcgaacaggataataaagcccacaactatcacctggtagcggtaggcaacaccttcgtcttcccgatggcgggctactcgcgcaaaattaaatccgtcaccgagttgaaagacggcgcgacgattgccataccgaacgacccgaccaacctggggcgcgcgctgcttctgctccagcaggaaaagctgattaccctcaaagcgggcaccggcctgctgccgacggcggtcgatatcaccgacaacccgcataacctgaaaataatggagctggaaggggcgcaactgccgcgcgttatcgacgacccgaaggtcgacgtagcgatcatcagcaccacctacctgcagcaaacgggcctttccccggtgcgcgacggtatctttattgaagataaaaactcgccctatgtgaacatcatcgtgacccgcgaagacaacaaagacgcggaaaacgtcaaagcgtttatccactcctaccagtcgccggaagtggcgaaagcggcagagacaatctttaacggcggcgcggtgcccggctggtaa

SEQ ID NO: 174076 - DNA, 861 bp, Klebsiella oxytoca
atgacccggcaacgccaggctgatttgctgctcatagccgcgacggttatcgccgcctgcggatggattttttcccgggaagcgattgccggtatgccggttttcgctttcctcggtctgcgctttttcttcgccgcgctgctgctgctgcctttctgccgcggctttcgcgtcggcagggagcactggccgcgcatcataatcagcggtctgtggtttgccttaaacctgtgcctgtggatctactcggtatcgacgaccccgtcgctgggcgaaggggcgtttatcatgagcctgtcgatgctgttcgtgccgcttaccgcctgggtgatgatgaaggcgaggccggcgcgggcctactgggagtgcctgccgatagcggttgtcggtctcggcttgctcagcctgcatatgccgattgcgtttcaccccagccagggttggtttctgctgaccgcgctggtgcagtcgatctggttttgctacaccagcaaaagcgcccgcgaggtgccgctaatcccgctgaccaccgtgcagctcggcattaccgggattgttggactgggggtctccgccgccgttgaaagctgggatcagccgtttacgctgccgaccttcggctggctgctcgccagtatcgttatcgccaccagcctgcgcttcggcctgcaaatgaaggggcagaagtacgcggcggtcgccagcgcggcgattattatggtgctggagccgctgctgacggtgattgccgcggcgctgtggtacggcgaacagctaccgctgcagaaaattatcggcggcctgctgatcctcgtcgctcagctatggttccgctggcgaatgctgaagccgctacgctaa

SEQ ID NO: 174077 - DNA, 555 bp, Klebsiella oxytoca
atgaagaaaaaactcacctccgacgacctgcatgatgccgaagttctggcgcattgtccgtggttcagtatgcgcaaggttgggattgatatggcgcccggcgatcggcgggatttttactctattcactacccgcacccggcggtagggattgtggcgatgcaggatgacaaagtgctgctgattcgccactaccgttacctgatcgatcgggtggtatgggcaattccttccggcggcgtcgatgaaggcgaagacccgcgcgaggcggccctgcgggagctgcgagaagagaccggctggcaggcgcagcacgctgaagaaattatccgctataacccctcctacggcagcagcgatcagctgtttattacctggctggcccgcgatttggcctgggtgggaatggatgaagatcaggacgaagtgatggaaacgggctggtttaccctcgaagagataggccagatgatcgcccgcggcgatatgccggacgggctatcgctggtgccgctgctgcatctgatggcgcagcggcgtaccggtttagcgtag

SEQ ID NO: 174078 - DNA, 780 bp, Klebsiella oxytoca
atgaaaatcacccatgtgcgtaatgccacccagcttattgattatgcgggtaaaaagtttctcattgacccgatgctttctgccaaagacgcctgggcgggctttgccggtaccgcgcgcagcgagttgcgtaacccgctggtggacctgcctttttccatcgaagcgatcgttgacgtggatgccgttatcgtcacccacactcatcaggatcactgggacgaggcggcgatcgccgcgatccccaaaaccctgccggtttatgtccagcatgatgccgacggacagctgctgcgcggtcagggctttcgcgatattcgtctgctctctgaggacagcgcgtttgctgatgttgcgctggtgaaaaccacctcgggccagcacggcagcgaccgcacttatgcgctgccggcaatggccgagcgcctgggcgaagcctgcggcgtggtgctgcgccatccgcaggagaaaaccctgtggctggtgggggacactatctggcgcgatgcagtggaagccgacatgctcaggctgcgccctgaggtggtggtgctgaatgccgggtatgcgcacgtcatcggttttgggccgatcatcatgggcaaagaggatgtgctgaaggcgcacttcgtcctgccggaagccaaaatcgtcgctagccatatggaagcggtgaaccactgtctgctgagccgcgatgagctgcgccagtacgtggctgacaatcagattgccgaagcggtcagcatcccgcaggatggggaaagtatggtcttttag

SEQ ID NO: 174079 - DNA, 954 bp, Klebsiella oxytoca
atgaaactgacggaagtggcgattgtggcggtggacgggtttagtccgtttcactactcggtgccctgtatgctgtttggcgatacggtctcggaaaccaaacgctttaacctgcatatttgcgccgaacgccccgggctgctgaacgctcgcgacggctttgcgctgaacgccagcggcgatttttccactctggagcaggcggatattgtggtggtgccttactggggggcggtgaatcagcgcccaccgcagccgctgcttgacggcctggttcgcgcgcgtaacaacggcgcgcagatcgtcggcctgtgtctcggggcgtttgtgctcggctacgccgggctgctggatggcaggcgcgcggcaacccactgggagttcgagcaggattttcagcgcctgtttccgcaggtgcggctggatatcaacgcgctgtacgttgacgatgaggggatcatcacctcggcgggcaccgcggcggcgctcgactgctgcctgtatctcattcgccagcgcttcggcagccttgccgccaatcagatcgcccggcggatgatcgtcccgccgcaccgggagggaggacaggcgcagtttatcgctcagccggtaccgaaaaacacccgcgacgcgcggataaacggcctgcttgagtatcttcagcagcatatccgcgaatcgcataatctcgattcgctggcgcaggtggcggcgatgagccgccgtaccctgacccgccatttcgccaaagcgaccggtatgggcattgccgactggctggccgccgagcgcctgcggcgcagccagatcctgctggaggccggggatttacccgtcgggcaggtggcggaggaagtgggctatcgctccgctgtaacctggcgtcagcagtttaaagcgcgctttggcgtcagcccggtggagtggcggcgcacctttcgtcgcggggcttag

SEQ ID NO: 174080 - DNA, 1050 bp, Klebsiella oxytoca
atgcaaatcaacgctattggaacgaattcggccagccagccgttggggtctatggccatcacccgccgcgagccggggccggatgatgtgcagatcgccattgattattgcggcgtctgccactcggatgtgcaccaggcgcgctccgagtgggcagggacgctctatccctgcgtaccgggtcatgaaatcgtcggccgggtgaccgccgtaggcagccgcgtctccggtcacgccgttggcgatctggtgggcgtcggctgtatggtcgatagctgtaaagagtgcgaggagtgccgggacgggctggaaaactactgtgatcatatggtgctcacctataacggcccaacgcaggatgcgcccggccacacgctcggcggttactcccagcagatcgttgttcatcagcgctacgtgctgcgcatatcccatcccaaagaacagctggccgccgtcgcgccgctgctgtgcgcgggtatcacgacctactcgccgcttcgccactggaacgttgggccgggcaaaaaagtcggcatcgtgggcatcggcgggctggggcatatgggcatcaagctggcccacgccatgggggcccacgtggtggcctttactacctcggaatccaagcgtgacgcggcgcgagagctgggcgcggacgaagtggtggtctcgcgcaacgaaaacgaaatggccgcccatctgaaaagcttcgactttatacttaacaccgtggcggcgccgcataacctcgatgccttcaccacgctgctcaaacgcgacggcaccatgacgctggtgggcgcgcccgccacgccgcatccctcgccggaagtgtttaatctgatcttccgccgccggtcaattgccggatcgatgatcggcggcatcccggaaactcaggagatgctcgatttctgcgccgagcacggcatcgtcgccgatattgagctgattcgcggcgaccagattaacgaggcctgggagcggatgattaaaggcgacgtgaaataccgtttcgtcatcgacagcgccacgctcggcggctaa

SEQ ID NO: 174081 - DNA, 303 bp, Klebsiella oxytoca
atgagcggcgaggcgatttcacttctcgcggtgctgacggcgaaaccgggctacaacgacgcgctgcgccaggccctgcgggcgctcctgttgcccacgcgtcaggagccgggcaatcttgattacgccctgtttcagctgcgcgatgcgccggatacgttctatatgcgcgaatcctggcgcaatcaggaggctctggacgcgcatatcgccctgccgcacttccaggcttttattgcgcagatggatagcctgcttgccgggccgctgcggctggattatctgacgcccgtcgcgccctga

SEQ ID NO: 174082 - DNA, 1008 bp, Klebsiella oxytoca
atgaaagcgatcgccattactcgcgcagcgaccgaaggcagcaacattccttttttaaccgacatcgagctgccgcagccggttgccgaggggcatgatctgctggttgaagtgaaggccatttccgtcaacccggtggataccaaagtccgcgccggctttaacgccgataccccgcgcgtgctgggctgggacgcggttggcgtagttaaagccgtcggcaacgcggtaaccctgttcgccgcgggcgatgaagtgtggtacgccggcgcgctgggccgtccgggcagcaacagcgagtttcagttagtggacgaacgcatcgtcgcccgcaaaccgcgttcgttggataacgccgccgccgccgcgctgccgctcaccgccatcaccgcatgggagctactgttccaccgccttggcgtagaggaaggcggcaacgcgggcgacacgctgctgatcgtcggcgcggcgggcggcgtcggttcgatactgacccagctcgccagcaagctcaccggtatgacggttatcggcaccgcctcgcgtccggaaagccagaaatgggtacgggaagcgggcgcgcatcatgttatcgatcacagcaaaccgcttgctgaagagctggcgcggattggcgtcaaagcggtaacccacgtcgccagcctgaccaataccgaccagcactatccgcagctgatcgccgctctcgcaccgcagggcaagctggcgctaatcgacgatccgcaaaccctcgacgtggtgccgctgaaggcgaaaagcatctccctgcactgggaatttatgtttacccgctcaatgttcgaaacgccggacatgatcgcccagcatcagctgctgacccgcgtggcgtcgctgattgacgacaacaccattaagaccaccctcggcgagcactacggcgccatcaccgccgccaacctgcaaaaagcgcacgcgcagctggaaaccgggcgttcggtgggcaaaatcgtgctggagggcttttaa

SEQ ID NO: 174083 - DNA, 468 bp, Klebsiella oxytoca
atgacacccgaactcaaacacagcttctctatcaccattcaggtcgacaaaccggtcatcgtctcccgcagcccgcagagcgggaaacgtcagctgatccctatcctcagcggaatcgtacgcggtgagctcaacggccacgtcttacccggcggcgtcgacagccagatcatcgagcctgacggcacctgccgcctctccgcgcgctatgccttacacgtggaaggaggcacggtatatattgaaaacaacggcattcgccgcctacccgaagagtataaagaacgtctttttggcgacgatatgcgcttttttagcgatataccgccggaagcgatctattttcgtaccgtaccgactttcgaagtggatgcgccggcgctgcgctggctcaccacctcgctgtttatctgttccggcggccgctcccaggacggcgtaacgctcgatttttatcgcgtccgctga

SEQ ID NO: 174084 - DNA, 606 bp, Klebsiella oxytoca
atgaatacgctatttctgattggccccggcggggtgggaaaaagcacggttggagcgctgctggcgcaggcgatgagctaccggcttatcgatctcgatagcgaattttgcgaacggattttaaatattcgacaatatattcagtgtaatggatacgaacgctatgtacgtgataacgccgcgctatgctctcgcctgctggcggagaatccgcatgaaaaacgagtggtggtgctctcctcgggatttcttgccaccgatgtctgcccggagattgtcgccgggaatcgacagcttgtgcggcagtccgggtattccatcctgctattgccttcagaggatattgatatcgctacgcgcatagtggtcgcgcgccagctgatgcgcggctttggtctggtcggagaaaaagaagagataaagttccgccagcgctttagggaatattgtgcattatgcgattgccgggtgatttcgtctgaggagccggagagggtggcggagctggtgcgggagaaggtggctgcggaacagcggaaacaaaaaagcctggaggcgatgcgtgagctgagtgaactatcacagaagttgggattgtataactaa

SEQ ID NO: 174085 - DNA, 561 bp, Klebsiella oxytoca
atggcaaataaacatttaacttcgcccccaataggtgaattcgttatgtttgccagcggtgatgggaaagtacgtgttgaatgccgctttgaaagcgatacgctttggctccctcaggcatccatcgcaaatctttatcagatcactccccaggcagttacacagcacattaaagcgatctatgaagaagaggaacttgatcaaaacgcaacctgtaagtcttacttacaagttcaacaggaaggtcgtcgccaggtaagccgcaaccggcttcactacagcctgcaagtcatccttgccgttggctatcgcgttcgctcccctcgcggcactcagttccgccagtgggcaacccagacgctccaggaatacctgatcaaaggttttgtgatggatgatgagcggttaaaaaatccgcctgttggttcatcggctgtacccaactatttcgatgagatgctggagcgcgtacgagtgatatttgcctgctgtgctcacctttctgccgggcggcgacttgcccggcctacgcgatctgagattatctttgggcctgtgtaa

SEQ ID NO: 174086 - DNA, 288 bp, Klebsiella oxytoca
atggctgattcgcattctacctcagactttgccgtttccggaaccgagcgtcacctgattgtgggatatcgtccgcaaggtcgggacaccagtacaccaagtcttaccctttccggcaagtggttacgcgcagcggggttcgataccggaaagcgcttcacggttaaggtaatggatggctgtattgttctgctgccacagagcgataaggaagaaatgcttaaagcggagctactgcaaattcagcaatcctttaaaagcgtcaacaatacgcttcatctcgtctga

SEQ ID NO: 174087 - DNA, 192 bp, Klebsiella oxytoca
atgtcaatcatagcgcgcgaaaaaaaaccaaagggcggcggtcagtctccgcagttcaaaatgcgcattgatccggcattaaaggagcagctggatgctgttgcagcggaagagggggtgagtctcgcgagctggttgaaggaactcgcgagggaggctttgcggacgaggggtattgaacctaagggataa

SEQ ID NO: 174088 - DNA, 729 bp, Klebsiella oxytoca
atgaaaattaataatctcagtatgattgtttctatgataacaggaataatcactactattataacaatatatagcattaacaaaccggcatcacaccttacagcatacgttactgataatatattttatactccacctcaatataacgaaattatgagccttactcttgatgaagcggattataataatatttatgatcgcattgatagtgttgcacaaaatgccagatttgaagaaaaatcaaaatttgttaaggaaattattaattctattttaactccatttaaacctccatttcaaaatggtttagaggaatataaaaaattgatctttattaatgtacataactcaggtgatgcgtcagcaaaagatttatatattgactatcctgagaaggttttagttatggttatagacgacaaaaaagaacaaattaaaaaaccagatgcgcttactcgcttatcaataccatcaataagacaaggtggaaattataaggtttgggcttgggctaaaaataataaatttaaaaaaagcgatattagaattggaaatgaaaaccaaattgccaagattaaatacggtgaactacattttggaacttcatcaaatatagcttctttttatgaaaatcatgaaacaataataaaaacaatttttacgatagtaatgtccttgggaagtctgacaatttgctttctgctattccacttaagaaaaaaatattaa

SEQ ID NO: 174089 - DNA, 1395 bp, Klebsiella oxytoca
atgaaagatcatattttgtccgtcaaagagaagattggctatggcatgggcgatgccgctagccacatcattttcgataacgtcatgttgtatatgatgtttttctataccgatatctttggtatccctgccggctatgtcggtaccatgttcctgctggcccgcgcgctggacgcgatatccgacccttgcatggggctgctggccgaccgtacccgcagccgctggggaaaattccgcccgtggatactgtttggagcgattccgttcggtctcgtgtgcgtactggcctacagctcgccggacctgagtcataacggcaagctgatatacgccgcggtaacctacacgctgctgaccctgctctacaccgtggtcaacatcccttactgcgcgctgggcggagtcattaccgacaatccgacgcagcgcatctcactgcagtcctggcgctttgtgctggcgacggcgggcggtatgctctccaccgtcctgatgatgccgttggtgaactttatcggcggcgaagataaagcgtttggcttccagggcggcatcgcggtgctctcggtgatcgcgttcctgatgctggcgttttgcttcttcactaccaaagagcgcgtcgaagcgccgccgagctctacctcgatgcgggaagacctgcgtgatatctggcgcaacgatcagtggcgagtggttggcctgctgaccattctcaatattctcgcggtctgcgttcgcggcggcgcgatgatgtactacaccacctggattatgggatccgcgggtctgttcaccgccttcctcaccacctactgcgtcggcaacctgattggctcggcgctggcgaagccgcttaccgactggaaatgcaaagtcagcgttttctggtggaccaatgctctgctggcggcgctgagcgtggcgatgttcttcgtgccgatggacgcagaaatcaccatgttcgcctttatcttcgtaattggcgtgcttcatcagctggtgacgccgattcagtgggtgatgatgtccgacaccgtcgactacggcgaatggtgtaacggcaaacgcctgaccggcatcagctttgcgggcaccctgttcgtgctcaagctgggcctggcgctgggcggcgcgctgattggctggatgctggcgggcggcggttacgatgccgcggccaaaacccagaacagcgccactatcaccatcatcatctcattgttcacccttgctccggcggtctgctacctgctgagcgcggttatcgcgaaacgctactacaccctgaaaacgccgttcctgaaaaagatgatggcggaactggctcagggcgcgcgccgcaacgaacacgacttcacttcagcgccgacaggcaaagaattgcaaaactaa

SEQ ID NO: 174090 - DNA, 2319 bp, Klebsiella oxytoca
atgaaaatcagtgatggaaactggcttattcaaccagggctcaatctgatccaacccgtgcaggtctatgaggttgagcaggaaggtaacgagatggtcgtctatgtggcgtctcgcgaagttcgcgaacgcgccgcccaactggacgttccgctctttaccgtgcgcttcttctccccacaggaaggagtgatcggcgtacgcatggagcacttccagggcgcgttgaacaacggcccgcattacccgctgaacgtgctgaaagacgtgaacgtggagattaataatggcgctgaatatgccgagctgaaaagcggcaatttgaccgcacgcgtcacgaaaggcgatttctggtcgctggattttctgcgtgacggcgtgcgtattaccggtagccagctgaaaaatgacggctacgtgcaggataccaaaacgaatcgcaactatatgttcgagcgtctggatctcggcgtcggcgacaccgtttatggcctcggcgagcgctttaccgcgctggtgcgtaacggccagacggtcgaaacctggaacgaagacggcggcaccagtaccgaacagtcgtataaaaatatcccgttctacctgactaaccgcggctacggcgtgctggtgaatcatcctgagcgcgtctctttcgaaatcggctccgaaaaagtctcgaaggtgcagttcagcgtcgaaggggaatacctggagtacttcgtcatcgacggcccgactccgaaagaggtgctgaaccgctatacccggtttaccgggcgtccggcgctgccgccagcctggtccttcggcctgtggctgaccacctcgtttaccaccaactacgatgaagcgacggttaacagctttattgacggtatggcagagcgcaacctgccgttgcacgtgttccatttcgactgtttctggatgaaagccttccagtggtgcgattttgagtgggatccggtgaccttccctgacccggaagggatgattaaacgcctgaaagagaaaggactgaaggtctgcgtgtggatcaacccgtatatcggccagcgttcaccggtgtttaaagagctccaggagaaaggctatctgttgaaacgtccggatggttcattgtggcagtgggataaatggcagccgggcctggcgatttatgacttcaccaatccgcaagcctgccagtggtatgccgacaagctgaaaggcctggtggcgatgggcgtagactgcttcaaaaccgacttcggcgagcgtattccgaccgacgtgcagtggtttgatggttccgatccgcagaaaatgcacaaccactacgccttcatctataacgagctggtgtggaacgtgctgaaagagaccgttggcgagaaagaagcggtgctgtttgctcgttccgcctcggtgggcgcgcaacagttcccggtgcactggggcggcgactgctacgccaactatgaatcgatggcggaaagcctgcgcggcggcctgtcgatcggtatgtccggttttgggttctggagccacgatatcggcggcttcgaaaacaccgcgcccgcccacgtctacaagcgctggtgcgccttcggcctgctgtcgagccacagccgtctgcacggcagcaaatcctatcgtgtgccatgggcctacgatgacgagtcctgcgacgtggtgcgccacttcacgcagctgaaatgccgcatgatgccgtatctgtaccgtcaggcggcgctggccaacgagttcggtacgccgatgctgcgttcgatgatgctggagttcccgcacgacccggcctgcgactatctggaccggcagtacatgctgggggattcggtgctggtggcgccggtgtttagcgaaacgggcgacgtccagttctggctgccggaaggccgctggacccatctgtggcacaacgatgaagcgcagggcagccgctggcataagcagaatcatgatgtgctgagcctaccggtgtacgtgcgtgacaacaccctgctggcgttgggcaacaatgaccagaaaccggactacgcgtggaatgaaggcaccgccttccagctgtttaatctcgaagatgggcgcgaagcggtcagccaggtgccggcagcggacgggtcggtggtctttaccctgaaggcgaaacgccagggcaatgtcattaccgtcagcggtgacggcgaggccagcggctggacgctgtgcctgcgcaatatccagcaggtagcgagcgtgcagggcggtgctcaggcaggcagtgagctgggcgtggtggtgaccgcgcagggcaatgcgttgaccatcacgctgtaa

SEQ ID NO: 174091 - DNA, 732 bp, Klebsiella oxytoca
atggatttagaaaacatctttcgtgacgttaagctaagcaaaaccgaaatgaccgtgctgcgttttattcagaatgaccctgagcaatgcgtacgcgagggcatccgcgccgtcgcggaacactgttatagcaacccttcctcgctagtgcggctggcgaagaaactgaaattcagcggctggctggagctggtctattttattaaattcaatatcaccatgccgaaactcgatgtcaccaacgatatcgactacatgagcattcagccgatagagcggataactcctctactggaaagcctgcaacatcatcgcattttgattcacggcagcggcttttcgcagctgatcgcccagtatatttacaataaatttttggtgaccggggtaaacgccagcctggcgctgtggccggattacgaaattcttgagcagaagaacgccgccaaatttgattcgatctggattatttccaaatccgggcgcagcagttcggcgctgaactgggtgaaggcgctggaagggaagaagattaatctggtttgcttcaccggggattatcaaagcccgctggcgcaggcggcggatacggcgtttattattcacgacccgcagaaattcgatgatgatatttactggagcaacccgttttttggctactgcatactcgggtttgagcggctgctgaagatgtggtttacacacacggggagccccggaggcggcgcctga

SEQ ID NO: 174092 - DNA, 1380 bp, Klebsiella oxytoca
atgaaattaaccgtattaggcgggggcggcgttcgctctgcgttcctggcaaaatctctggcatataacgcgcaccgcattggtttaacggaagttgtatttctcgacagctccgctgagaatctggcaatttttggcgaaatcgcccgctatgtgtttaatacgattcgcccggatattcacttcagcgtaaccagcgacccggtgccggcactcaaaaatagccactatgtcatcaccaccctgcgggtaggcggcgatgagagtcgcattcgcgacgagcgtatcgccctgcagcacaacaccctgggccaggagaccaccggcgctggcggtttcgccatggcgatgcgttccattccggcgattcttcactactgccgcctgattgaagagcacgccgccgaagacgctattctttttaacttcaccaacccgtcagggctggtcaccgaggcgattatcaaatccggctttaagcgccgggtgtacggcatctgcgacgcgccgtcggagctgattcgcgagctgccggcaatcctcggctgcgacgagcgcgatctcggcgttgagtgctacgggttgaaccacttctcctggtttacccacttcaccgtaagcggcgaggatgtcaccgagcgcctgattaccagtcctgagctgtatcgtaagacggcgatgcagtatttttcgccggagctggttcagctatgcgataagcaactgcttaatgaatatctttactactactactatcgagaagtggctttaaaagcgattcagaacgcagcggaaacccgcggcgagcagattgcccgtatcaatcacgatatgcgcgaagagctgcggaccgtggatgtgaaagccaacccggaagcggcgtttaccatctggatgaagcactatctgcgccgggaaaatagctatatgcagaacgagtcgcagcaggaaaaattccatacccgcgagccgttaaccttaaagcagtttatcgaggagccggataccggcggctacgcaggggtggcgctggatattctggaggcggtcaacagcaccaccaccaagcgtattgtggtgtcgatgcccaacaacggcacgctggacttcctgcgcccggacgacgtgattgaaatcagctgcgatctcagtaaagagggcctgaagccggtgacgccgaagcatatgccgacagcgcagaaaaacatgatcgccagcgtaaaggagtatgagcggctggcggtggcggcgattctgcagcgggataagtcactggcggtacgggcgctgatggcgcatccgctggtcggctcttattcgctggcaaaagcgcttgttgaagcttatctcgatgataagcagttcgccgactggcaataa

SEQ ID NO: 174093 - DNA, 1560 bp, Klebsiella oxytoca
atgtccgtaatacgtcaacgtattctggagaatatgcaaaaattctccagagcaatgatcggtgcagtattgttcttgccggtcatcggcttaattttggcactcagctcagtcttaaccaacccaacattaatttcggagaccagctttttacaccagcttggacagctactcggcgataccttctggcctttattcggcaatctgggattactcttttgcgtcggcatcagctatggcctggcaaaagataaaaaaaccgaagtcgcgctggtttcagtgatgtgttttattatgtttcttggcgccaaccactcctggctggagcatactcacggcctggcggaaaaaattaacggcgaatattacggcaccgggcaaacccaactgctgggctttgtggtggtcgatatgggggttttcctcggcattattctcggctgcaccatcgcctgggtgcataacaaagtatcgactattgagctacccggcgcgctctccatgtacggcggggccaagctgacgctggtggcgatgacgccggtcatcattttctacgccatcgcttttacctggatctggccgtttatgacccacggcatcgcggcgctgaccggctttatgaaaaacgccggcgtggcgggggtcttcgtttacggcttctttgaaaaattcctcatccccaccggcctgcaccacttcgtctggtcgccgttccagctcacgcaaatcggcggcacgctgaacgtcgacgggcagatagtctccggaacccaggcgattttcctcgcctatatgcgtcacccggatctgacgccggtgatgaacgaggcgctgcgtttctcacagcaggggatgaccaccatcttcggcctggccggcgcctcgctggcgttctaccatacggcgaaaccggagaaaaaaatgatggctaaagcgattctgctaccggccattatcacctccatgctcaccggtatcaccgagccgattgagtttacctttctgttcgtttccccgctgctgtgggtgatccatgctaccttaaccgcagcttcgcaggcgatttgcgacatctttaccgtccgtccgtggggcgcctcggggctgattgagtttctgatttacaacctgccgctgccggtcgccctgacccgctggcccggctacgtgctcatcgggatcggccagttcgccgtctactacgttatcttccgcacgctggtcgttaagttgaatctcaaaacaccgggccgtgaagacgatgaaaacgtgaagttatatagcaaagctgattatcgtaaaaaaatgggcgaaccgcagtcggtgaccaacgagattattaatggcttaggcggcaaagcgaatattatttccgtcgacaactgttttacccgcctgcgcgtcgctattcacaatatggatttagttgatgatgcaatattaaaaagcaccggtgcaaacggcgtagtacgaaatcgaaatgaagttcaggttatttacggcgtcaaagtgggacaggtccgttcccgggttgatagctggctagcagaaaattaa

SEQ ID NO: 174094 - DNA, 1716 bp, Klebsiella oxytoca
atgaaatttctcagaaagctgattctctggctgctgattgctctgctggtggtgattattgccgcttatttcctgctgcaaacccagtggggagggcgtcaggccagcgcctggctaagcgacggtaccggctggaaggtctctttcaacaaaatggaccataatttctcttcgccactgcacctgcagctgcaaaacgtcaccctcggtcgcgacggcaaacccgccacgctggtggcgcaaaccgtggatatcggatttagcagccgccagtttagcgacccgctgcatgctgacgaaatcattctcagcgacggtacgctaaacttctccccttcttccgcagcgctgccgttcgccgccgatcgtctccggttgcgcaatatggcgttcaacagcccggagagcgactgggatctgagcgcgcagcgcgtcaccggcggcgtcagcccgtgggcgccggaagcgggtaatgtgctgggcaagaaaacgcaaattcagatgagcgccgggtcgatgacgctcaacggtattgaagccagcaacgtgctgattcaggggaatatcgataacggcgaagtgacgctctcaaccctcggggcggacgtcgctcgcggcacgctcaccggcacggcgaaacgcagcgccgacggcggctggcaggtcgataatttgcgcctcaacgagatccgtctgcaaagcgataaatcactcgccgactttttcacgccgctgaccaccctgccctcgctgcagattggccgccttgacgtgaccgacgccagcctgcaggggcctgactgggcgatcgctggcctcgaccttaatctgcgcaacctgaccctgagccgcggcgactggcaaagccaggatggcacgctgtcgatgaacgccaacgagtttatttacggttcgctgcacttcctcgacccaatccttaacgccggattctccccgcagggtatcgcgctgcgccagttcacctcacgctgggagggcgggatggtgcgcacgtccggcaactggctgcgcgccggccatgccctggtgctggacgacaccgcgttcgccggactggaatatacgctgccgaccaactggaagcagctatggatggcgccgcttcccgagtggctgcaaagcctgacgctgagaaagttcagcgccagccgcaacctcattatcgatgttgaaccggcgttcccgtggcaaatcaccgcgctcgacggctacggcggcgagctgcagctggtgaaaaaccgcagctggggcgtgtggaacggtagcgcgacgctgaacgccgccgccgcgacctttaatcgtattgatgtccgccgcccgtcgctgaagctgagcgccaatgcctcaacggtgaacgttaacgagctcagcgcctttaccgagcgtgggatcctgcaagccaccgcggcggtgtcgcagcttccgcagcgtcaggtcaacctgagcctgagcggtcgcggcgtgccgctaaatattttgcaggcctggggctggccagcgctgccgatatccggcgatggtaatctccagctaacggcgaccggcagcgtgctgccagatgcgccgctgaagccaaccgttaacggtcagctcagcgcagtcaatatggagaaacagcaggtagcgcaggtcatgcgcaacggtgaagttaccagcgctcaggctccttctgctccgataatgtctaccccttaa

SEQ ID NO: 174095 - DNA, 1392 bp, Klebsiella oxytoca
atgtccgttaacaccgcagaatcagaaaatgcgcaaccggttgcgcataagcaaaccagcgaattaatctaccgccttgaagaccgcccgccgctaccgcaaacgctgttcgccgcgttccagcacctgctggcgatgtttgtcgcggttatcactccggcgctgttaatttgtcaggctctgggcctcccggctcaggatacacaacacatcatcagcatgtccctgttcgcctccggcgtggcatccatcattcaaattaaagcctggggcccggtgggttctggtctgctttcgattcagggcaccagctttaacttcgtcgctccgctgattatgggcggaaccgcgctgaaaaccggcggcgccgatgttccgaccatgatggccgcgctgttcggcaccctgatgctggccagctgcacggagatggttctctcgcgcgttctgcatctcgcccgccgcataatcactccgctggtctccggcgtagtggtaatgattatcggcctgtcgctgattcaggttggcctgacctccatcggcgggggctatgccgccatggccgaccacactttcggcgcgccaaaaaacctgctgctggcggggatcgtgctggcgctgattattatccttaaccgccagcgcaacccgtatctgcgcatcgcttcgctggttatcgcgatggcggccggatacctggcggcatggctactcgatatgctgccgaccaataccgcaccgacggaaagcagcctgattatggttcccacgccgctgtactacggactgggcatcgactggaatctgctgctgccgctgatgctggtgtttatgattacctcgctggaaaccatcggcgatatcaccgccacctctgacgtttccgagcagccggtttccggcccgctatatatgaagcgtctgaagggcggcgtgctggccaacggtctgaactcgtttgtttcggcagtattcaacaccttcccgaactcctgctttggccagaacaacggcgtgattcagttgaccggcgtcgccagccgctatgttggttttgtggtcgcgctgatgctgatcgtgctcggcctgttcccggcggtgagcggcttcgtgcagcatattcctgagccggtgctcggcggcgcaacgctggtgatgttcggcaccattgccgcctccggcgtgcgtatcgtctcccgcgagccgctgaaccgccgcgcgatcctgattatcgccctgtcgctggccgtcggccttggcgtttcccagcagccgctgatcctgcagttcgcccctgactggctgaagaatctgctctcctccggtatcgccgccggcggtatcacggcgattgttctgaatctgattttcccgccagagaaaaactga

SEQ ID NO: 174096 - DNA, 1203 bp, Klebsiella oxytoca
atgtttcatctcgataccttatcgacgctcgttgccgcaacattagtgttgctactaggtagaaaactcgttcaaaccgtccctttcctgaagaaatacaccattcctgagcccgttgcgggcggtctgctggtcgctctggcgctgctggtattaaagaaaagcatggatatcgaaattgatttcgatatgagcctgaaagacccgctgatgctggctttcttcgccactatcggcctgaatgccaacctcgccagcctgcgctctggcggcaaagtggtggggacattcctgatcgtggtggtggggctgctgctgctgcaaaacgccctcggtatcggcatggcgaagctgctgggcctcgacccgctgatggggctgctggccggttcgattaccctttccggcggccacggtaccggcgcggcgtggagtaaactgtttattgagcgctatggctttgtcaacgccaccgaagtggctatggcttgcgcaaccttcggtctcgttcttggcggcctgatcggcgggccggtggcgcgctatctggtcaaacactcttcatcaccggacggcacgccggacgatcagctcgcgccgaccgcgtttgaaaagccggatatggggcgcatgatcacgtcgctggtgctgattgagagcatcgcgctgatcgccatctgtttgacggtagggaagatcgttgcgcaactgttggcggggaccgtattcgaactgcctaccttcgtttgcgtgctgtttatcggcgttatcctcagcaatagcctgtcagcacttggcctgtaccgcgtattcgaccgcgcggtgtcggtgctgggtaacgtcagcctgtcgctattcctggcgatggccctgatgagcctcaagctgtgggagctggcgtcgctggcgctgccgatgattgccattctggcggtgcagacgatagcaatggcgctgtatgcggtgtttgtgacctatcgaatgatgggtaaaaactacgatgccgcggtgctggccgccggccactgtggtttcggcctcggcgcgacgccgacggcgattgccaatatgcaggcgattaccgatcgtttcggtccgtcgcatatggcgtttctggtggtgccgatggtgggggcgttctttatcgatatcgttaacgcgctggtgattaagctctatctgctgctgccggtatttggctga

SEQ ID NO: 174097 - DNA, 1512 bp, Klebsiella oxytoca
atgaccgacaaaaaatatatcgtagcgctcgaccagggcaccaccagctcccgcgccgtggtaatggatcacgatgccaatatcgtcagcgtctctcagcgagaattcgaacaaatttatccgcgtccaggctgggttgagcacgacccgatggaaatctgggcatcgcaaagctctacgctggttgaagtgctggcaaaggccgatatcagttccgatgaaatcgccgcgatcggcattaccaaccagcgtgaaaccgccatcgtgtgggagcgcgaaaccggtaagccgatttataacgccatcgtctggcagtgccgccgtaccgccgagatctgcgaacagctcaagcgcgacggcatggaagagtacatccgtaaggcaactggcctggtggttgacccctacttctccggaaccaaagtgaagtggatccttgaccacgtcgaaggtgcgcgcgagcgcgcaaaacgcggcgagctgctgttcggcaccgtagacacctggcttatctggaaaatgacccagggacgcgttcacgttaccgactacaccaacgcctcgcgtaccatgctgttcaatatccacgaactggactgggacgacaaaatgctcgacgcgctggatattccgcgcgccatgctgccggaagtgcgcaaatcttccgaagtgtacggccagaccaacatcggcggtaagggcggcacgcgtattccgatcgccggcatcgcgggcgaccagcaggcggcgctattcggccagctgtgcgttaaagaggggatggcgaaaaacacctacggcaccggctgctttatgctgatgaataccggcgagaaagcggtggcatcaacgcacggcctgctgacgactatcgcctgcggcccgcgcggtgaagtgaactatgcgctggaaggcgcggtatttatggcgggcgcctccattcagtggctgcgcgatgagatgaagctgattagcgacgcgttcgattccgaatatttcgccaccaaagtgaaggataccaacggcgtgtacgtggttccggcgtttaccgggctcggcgcgccttactgggacccgtatgcccgcggggcgatcttcggcctgacccgcggcgtcaattccaaccatattattcgcgccacgctggaatcgatcgcctatcagacccgcgacgtgctggaagcgatgcaggctgactccgggatccgtctgcacgccctgcgcgttgacggcggcgcggtcgccaacaacttcctgatgcagttccagtccgatattctcggcacccgcgtagaacgcccggaagtccgcgaagtcacggcgctgggcgcagcctatctggccggtctggcggtgggcttctggcagaatctggatgagctgcaggagaaagccgttatcgagcgcgagttccgtccgggaattgaaaccaccgagcgtaactatcgctacagcggctggaagaaggcggtaaaacgcgcgctggcgtgggaagagcacgacgaagcgtaa

SEQ ID NO: 174098 - DNA, 852 bp, Klebsiella oxytoca
atgagccaaacatcaacactaaaaggccagtgcatcgcagagttcctcggtaccgggttgttgatctttttcggcgttgggtgcgtcgctgcgcttaaggtcgcgggagccagcttcggtcagtgggaaatcagcatcatctggggtctgggcgtcgccatggcgatttacctgaccgcaggggtttccggtgcgcaccttaacccggcggtgaccatcgcgctgtggctgttcgcctgctttgacggtcgtaaagttgttccttttatcattgcgcaattcgctggcgccttttgcgctgcggctttagtttacgggctttattacaatcttttcttcgatttcgaacatacccacaatatggtgcgcggtagcgtcgaaagtcttgagctggcgggtattttctctacctatccaaacccgcatatcaattttgtgcaggccttcgcggtagaaatggtgattaccgctatcctgatgggcgtcattctggcgctgaccgatgatggcaacggcgtgccgcgcggcccgctggcgccgctgctgattggtctgctgatcgccgtcattggcgcatccatgggcccgctgaccggcttcgccatgaacccggcgcgtgatatcggaccgaaagccttcgcctggctggcaggctggggcaacgtcgccttcaccggcggtaaagatattccttattttctggtgccgctgtgtgcgccaatcgtcggtgctgcgctgggcgcattctgctaccgcaagctgattggccgccacctgccttgcgacacctgcgtcgttgaagagaaagaagccgcatctccctctacgacacaacacaaagcttcgctgtaa

SEQ ID NO: 174099 - DNA, 240 bp, Klebsiella oxytoca
atgtcattagaagtgtttgagaaattagaatctaaagttcagcaggcgattgataccatcactctgttacagatggaaatcgaagagctgaaagaaaagaacaatacgctggcgcaggaagtacaaagcgcccagcatagccgtgaagagcttgagcgtgaaaacggtcagcttaaagaacagcagcagggctggcaggatcgtctgcaggcgctgctgggccgtatggaagaagtctaa

SEQ ID NO: 174100 - DNA, 990 bp, Klebsiella oxytoca
atgaataagtggggcgtggggttaactctgttgctggcatccgccagcgttctggcaaaagacattcagctattaaacgtttcttacgatccgacgcgcgagctgtacgaacagtacaacaaagcctttagcgcgcactggaagcaagaaaccggcgacaacgtggtgattcgtcagtcacacggcggctccggcaaacaggcgacctcggtgatcaacggcattgaagccgatgttgtgacccttgcgctggcctatgacgtcgatgcgatcgccgagcgtggacgaatcgacaaaaactggctgaagcgtctgccggataactccgcgccgtatacctcaaccatcgtgttcctcgtacgtaaaggtaacccgaagcagattcatgactggaacgacctgatcaaaccgggcgtgtcggtgattaccccgaacccgaaaagctccggcggcgcgcgctggaactatctggcggcctggggctatgccctgcaccagaacaacggtgaccaggctaaggcgcaggagttcgtaaaagcgctgtttaagaacgtcgaagtactggattccggcgcccgcggttcgaccaacacctttgtggaacgcgggatcggcgatgtgctgattgcctgggaaaacgaagccctgctggcgaccaacgaactgggtaaagacaaattcgagatcgtcaccccgagcgaatcgattctggccgagccgaccgtttccgtggtggataaagtggtcgacaaaaagggcactcgccaggtggcggaagcgtatctgaagtatctctactcgccggaaggccaggagattgcggcgaagaacttctatcgtccgcgtgaccctgaaatcgcgaaaaaatacgcggatgagttcccgaaactgaagctgttcaccatcgatgacgtgtttggcggctggactaaagcgcagaaagagcacttctccaacggcggcacctttgaccagatcaaccagcgttaa

SEQ ID NO: 174101 - DNA, 762 bp, Klebsiella oxytoca
atgcgaagagtacgacacctttttttagcgctggtggtggtggttgtggcggcgatggctggcggctactactggcttcattccggcaaccgtgacgcgttgcgtcacattgttctgcaacagtgcgtccctcatcaacagcagaatcacaatcccgcgccctgcgcggaagtgaacctgaagggcggctatgtcctgtttaaggaccgcaatggcccgctgcagtatttgctgatgccaacctaccgtatcaacggcactgaaagcccgctgctgcttgaaccgctgacgccgaacttcttctggcaagcctggcagggacgcgaaatcatgagccagcaccgtggctctgccgtaccggatgaggcggtctcgctggccatcaactcgcgcagcggacgcacgcaaaatcatttccatattcatatctcctgcctgcgacctgatgtgcgccatcagctggatagccaggctgccgctatcagcagccgctggttaccgctgcccggtgggctcatgggccatgaatatctggcgcgccgcgtaaccgaaaccgaactggcgcagcgcagtccgttcctgatgctggctgaagaggtgccggaagcgcgagaccatatgggccgtttcgcgctggcgatggcgaagcagagcgacggctcgctgctgctgctggcaaccgagcgtaacctgctgacgctgaatcgcgcatcggcagaagaggttcaggaccatagctgcgccattctcgcatcccgttaa

SEQ ID NO: 174102 - DNA, 1335 bp, Klebsiella oxytoca
atgaaactttctatcgtggaaaaaatcggcttcggcgcaggagatatggcgataaacgttgtgatcatcgccatgcagctgcttctcgcctatttttataccgatatctacggcctgagcgccgctgatgttggcgtacttttcgtggttgtgcggatgatcgatgccattatcgatccggccatgggcgtccttaccgataagctgaatacgcgctggggacgctatcgcccgtggctgctgtggtttgccatcccttttggcttcgccgtttatttaatgtttatcacgcctgatatggtttatatggctaagctggcgtgggcctatggcacctatattctgatgaccctggtctataccgctatcactattccctatatctcgatgattggcgtgattaccagcgatcccgtggaacggctaagcgcaaacggctatcgctttgtgatgaccaaaattgccgcttttctggtgactattgtcgtcccgatgcttgccgtctggcttgggcagggcaacaaggccctgggttaccagttttctatggggctaatgggcgcgatgggggccctgctgtttatcttctgttttctcaccactcgtgaacgtagcgagccggaaattacttcgctatcggtagggaagcagtttaagtatctgttacgtaacgatcagtggattattcttggggttgttattttattgctgatgtgtggttacgttattcgcggttccgtcgcggcctattatgccaagtattatcttaatggcggcgatagcctgatttcaccttttctgactaccggtgttgtcgcctctattctggcgatgatcgccaccacctggataactaaattctgggataaaattaagatgttccgctacacccagattattacctttgtactaagcgcgctgatgtatttcttcgtcgggcgtgaaaatcttatcctggcatttacgttctattttcttattaatttcttctgcgatatgcaaatgccggtgttctggtcctctatcgccgaagcggtggattatggcgaaaagaaaaccgggctgcgggtatccggcctcgcgtttggcggcattctcttcttccagaagtttggtatggggatcgcggggggcgtactgggattcctgctgagccactttggctatcaggccgacgttgaacagagcgcgcgttcgctcaccggtattgcgctgatgatgacgctcattccggcccttttccatcttgcggttgggttgcttatgaaaaagtatctgattaataacgaatattatcgtgatattcagctagcccttgcgcaaaaacaggcataa

SEQ ID NO: 174103 - DNA, 960 bp, Klebsiella oxytoca
atgaatgccatgaataaggtttgggcgatcggcgacgcctccgtagacctcgtaccggaaaaacagaacagctacctgaaatgtcccggaggcgcttcggcgaacgtgggggtctgcgttgccaggctgggcggaacgtgcggttttatcggctgccttggcgacgatgacgccgggcgtttcctgcgccaggtttttcaggataacggcgtcgatgtctcttcgctgcggctggatgcgagcctgaccagcgcggtactgatcgtcaatctgacggctgacggcgagcgcagctttacctatctggtacatccgggggctgatacctacgtttcacctcaggatctgccgacgttcagaaaatacgaatggttttactttagctccattggtctcaccgacagccccgctcgcgaggcatgccttgagggcgcgcgaagaatgcgggaggccggcggctacgttctgtttgatgtcaacttgcgcagcaagatgtggcgcaatgccgctgagatccctgacctgatcgcccgctccgctgcgctggcgtctatctgcaaagtctcggcagatgagctgtgtcagctgagcggcgccagccactggcaggatgcgcggtattacatgcgcgatctgggctgcgagaccaccatcatttcgttgggggccgaaggagcgttgcttatcaccgccgagggagagttcctttttcctgccccgcgcgtggaggtcgtcgataccaccggagccggtgatgcctttgttggcggcctgctgttcacgctttcccgcgaaaaccactggaatcatgccctgctggcggaggcgatcagcaatgccaacgcctgcggagcgatggcggtgacggcaaaaggggcaatgactgctctgccgtttcccgaccagctcaatacttttctgtccagccgttcgctggcacaagccatgaccgtgaaataa

SEQ ID NO: 174104 - DNA, 1041 bp, Klebsiella oxytoca
atgcacgttgatcaaaacaaaatactgggatgcctggtgggtgccgccgccgcggacgcgatgggcgcggcgacggaagtacggactcagcagcaaattaaggactatttcggcggctgggtgacgacctttcaaaaaccgccagcggatacgtttggccgctgtaacgaagcgggtatgtgcacggatgattttattcaggcgaaatacattatggaagcgctgctgcgccaccagcgccaggtcagcgatgaggcgatgcgcgaggccttccagcagtggctggattacccttactacgccaactttaccggcccgacaacgcgtgcggcaatgaaagcgatattcaatgaccatcgcgcctccttgcagggtgatcttgaaggcgaaaagcagtcggtacagattattaataagggaaacgcggaagccaccaacggcgccgccatgaagatttggcctgcggcggtactgcatccgggagatattgatgcggcgattcactgcgcgctgcagatttgccgctttacgcataataacgtgctggcgatgtccggcgcagcggcgatggcggcggcaaccagcgaagcgttacgatcgcagaccaatgcggacaccattattgccgccggtatttatggcgcgcaaagaggctatctgctggcgcaggatcaaggggcgatgatggtggcaggcccatccgttgcccgacgcatcgaactggccgtggctatcggtcaacggcatcgtcattgggaaacggcggtggtggaacttgccgatattattggttccgggctgcacgtcagcgaagccgtaccggcggcctttggcctgttcgcgtgttgtccgaattctgccgtagatgctattatctccggcgttaatatcggcaatgatactgatactgtcgctaccatggttggagcgatttccggcgcattccatggcgtggaggcttttcccgccgattatttaacgaccgtggatcgtatgaatcatttcgatttggcacaactggccaggcaaatcgcagggtag

SEQ ID NO: 174105 - DNA, 723 bp, Klebsiella oxytoca
ttgcaggttgataaaacgagctttactccgctttataagcaactattttttatcatctgtcagcagattcagaatgggtccttgccgttaggcagccagctgccgacgcaaaaagaggttgccagagcctataacgtctcgctcatcgtggttaaacaggcctggagcgaattaatcaatgcgggcattatttcgtcccagcgcggaagcggatcggtagtgtgctctgtgccggagggagtaagctacggccacacgtttcgcggcattaccagcgatcttcaggatgccagcgtcgagatagagaaccgtattcttgagatcgcgccgcgtcgcgcgcgtgacgctcaggcagatggtttgagcctgcccgcccatcatcattatctctatatctcgcgtattcgttgcctgaacaatcgcccgtttaaccatgaaaagatctatctcgatcttagcttctttcccaatctgcagctcacgccagaggcgctggagcatacgtcgctttattcgctattaaacgtcaccagtgactcggcgactgaaaaggtggaggcgatcttaccttccgccgacctgtgcgaaaagctgcagattgcggcgaataaaccactattatccgtcgccagacagacgtttcaggccgggcataacagccctttcgaatattgccgctattacgtgctgtcggaatactttggcgaaattcattatcactaa

SEQ ID NO: 174106 - DNA, 1305 bp, Klebsiella oxytoca
atgtcgctctggttgtcccatcctctgttccttccttcaattatcgttggcctcactatcctgctttgggcgacatcgctcctgccggagtttatgaccgcgctgctgttttttgccgcagcgatgatcgctaaaatcgcgccgccggaggtgattttcggcggcttcgcgtcgtcggcattctggctggtgttcagcggctttgtgctggggattgctatccgcaaaaccgggctggcggacagggcggcacgggcgctttcgtcgcgtctgacggattcctggccgctgatggtcggcatcgtggtgctgctcagctatgcgctggcgtttgtgatgccgtccaatatggggcgcatcgcgctgctgatgccgattgtggcggcaatggccaggcgtgccggtattgaagagggaacgcgcccctggtttggcctggcgctggcggtggggttcggtaccttccagctgtctgccactattttaccggcgaacgtcccgaatctggtgatgagcggcgcggcggagggatcgtacggtatccatctgaattatctgccctatttactgctgcatacgccggtgctcggctggctcaagggggcggcgctgatcgcgctgatatgttggctgttcccggggaaaccgcatccgccgcgcgatctgtcgccgctgccgccgatgagccgcgatgagaagcgccttgcctggctgctggtcgtggtgctgacgctctgggtgacggagagctggcacggcatagggccagcctggacggggctggcggcggcggtgataacgctgctgccgcgagtcggttttatccgcggcgaggagttttccagcggcgtgaacatccgcacctgtatttacgtcgccggaattttggggctggcaatcaccgtgacccagaccgggatcggcggtgtggtggggaatgccctgctgcagattatgccgctggataaagagagcccgtttaccagctttctcgcgctgaccggtattaccagcgcgctaaactttattatgaccgcgaacggcgtaccggcgctgtataccactttcgcacagagcttctccgatgcgaccggcttcccgctgctgagcgtgattatgattcaggtgctgggatactccacgccgctgttgccgtatcaggcgtcaccgattgtagtggcgatggggctagggaaagtacctgcacgggcgggaatgctgctgtgtattgcgctggcggcggtgagctatttaattctgctgccgctggactatctgtggtatcaggcgttgggcaaactgtag

SEQ ID NO: 174107 - DNA, 768 bp, Klebsiella oxytoca
atgcgacatcctttagtgatgggtaactggaaactgaacggcagccgccacatggtaaacgaactggtcgcgaacctgcgtaccgaactggcaggcgttaccggctgtgcagttgccattgctccgcctgagatgtacatcgacctggctaaacaagccgctgccggcagccacattcacctgggcgcgcagaacgttgatctgaacctgtccggcgcattcaccggcgaaacctctgccgaaatgctgaaagacatcggcgctgaatacatcatcatcggccactccgagcgtcgtacctaccacaaagagtccgacgagtttatcgctaagaaattcgcggtactgaaagagcagggcctgatcccggtactgtgcatcggtgaaaccgaagcggaaaacgaagcgggcaaaaccgaagaagtgtgcgcacgtcagatcgacgccgttctgaaaacccagggcgcggcggcgttcgaaggcgcggttatcgcttacgaaccggtatgggcgatcggtaccggcaaatccgctaccccggctcaggctcaggcagtacacaaattcatccgcgatcacatcgcgaaagccgatgcgaaagtggctgaacaagtcattatccagtacggcggttccgttaacgcgggcaacgcagcagaactgttcacccagccggacatcgacggcgcgctggttggcggcgcatccctgaaagcggacgctttcgcggtaatcgttaaagcagcagaagccgcgaaaaaagcgtaa

SEQ ID NO: 174108 - DNA, 600 bp, Klebsiella oxytoca
atgaagaagtgggcaactttatatttaattgggctgacggcgatatccgtcggccaaaatgcgttgtccgccgagcctgactccgccgctacggcgccctatcttctctccggcgcgccggtgtttgatatctccatcagcgcgtttcgggaaaaattcaataccgataacccgaagcttttgctcaatgagtttcgcgccgtcacctccagtaaagaccaggcgaatttgacccgcgccgccaccaggatcaacgacaatctttatgcctcgaccgcgcttgagcgcggtacgcttaaaattaaatcgatgcagataacctggctgccgattcaggggccgcagcagaaagcggcgaaagcccgggccctcgagtatatgagcgccgtcatgcgcgcgttcgtgccgacgctcagccaggcgcagagccaacagaagctacaaaagctgctggccgccggaaaaggcaaacggtacttttcggaaaccgaaggcgcggtacgctatgtggtggcggacaacggcgaaaaggggctgaccttcgctgttgaaccgattaagctggcgctatctgaaacgctggaaaacaacaataaatga

SEQ ID NO: 174109 - DNA, 429 bp, Klebsiella oxytoca
atgaccctacagcagtggctattatcaattaaagggcggattggacgtcgcgacttctggatctggattgctatctggattgcgaccatgagcgcgctgttcacgctggctggcagcaacctactcaacttacagaccgcggcgtttattctggtatgcctgctgtggccgacggcggcggtgaccattaaacgtctgcacgaccgggggaaatccggcctctgggcgctgctgatgattctggcgtggatgctgctggcgggtaactggtcgatgctgccgggcgtctggcagtggggcgtcgggcggtttataccgacgctgattatcgtgatgatgcttatcgacctgggggcgtttatcggcacccagggggcaaataagtttggcaaagagacgctggacgtgcgctggaaagcggagccctga

SEQ ID NO: 174110 - DNA, 747 bp, Klebsiella oxytoca
atggcaaactgggttacaggcaaagtcgtaaaagttcaaaactggacggatgcactgtttagcctcatcgttcacgcaccggttgaaccgtttaccgcagggcagtttgccaaactggggctggatgtcgacggtgaacgcgtgcagcgcgcctattcctacgtcaatgcccccagtaatcccgatcttgagttctacctggtgacggttccggaaggcaaacttagcccacggctggcggcgctgaagccgggcgatgaagtgcaggtggtcagcgaagcggccggcttcttcgtgctcgaagaggtgccggattgcgacaccctgtggatgctcgccaccggcacggcgattggcccgtatctgtcaattctcgaagaagggaaggacctggatcgttttaaaaatctcgtactggtgcacgccgcgcgctatgccgcggatctcagctatctgccgcagatgcaggcgctggaagcgcgctatgcgggcaagctgcgcatccagtcggtcgtcagtcgggaaaccgcgccgggcatgctcacgggacgtatcccgttcctgattgaaaccggcgcgctggaagaggccgtcggcctgccaatgaacgccgagagtagccacgtcatgctgtgcggtaacccgcagatggtgcgcgacactcagcagctgctgaaagagacccggcagatgagcaagcatctgcgccgccgaccgggtcatatgaccgccgaacactactggtaa

SEQ ID NO: 174111 - DNA, 1011 bp, Klebsiella oxytoca
atgaaacgagaactggccatcgaattttcgcgcgtcaccgaagccgccgcgctggcaggctataaatggttaggccgtggtgataaaaacaccgccgacggcgccgccgtcaacgccatgcgcattatgctcaacctgatcaatatcgacggtactatcgtgattggcgaaggcgaaatcgacgaagcgccgatgctgtatataggcgaacgcgtcggtaccggcaacggtgatgcggtagacatcgccgtcgatcccattgaaggcacccgcatgacggcgatgggccaggccaacgcgctggcggtgatggcggtaggcgataaaggctgtttcctgaacgcgccggatatgtacatggaaaagctgattgtcggtccgggcgcgaaaggcaccatcgatctgaacctgccgctggcggaaaacttgcaaaacatcgcccgcgcgctgaataagccgctaagtgaattaaccgttaccatcttagccaagccgcgccatgacgaggtcatcgttgagttgcaaaaactgggcgtgcgcgtatttgctattcccgacggcgacgttgccgcctctattctgacctgcatgccggatagcgaagttgacgttatgtacggtatcggcggtgccccggaaggggtcgtttcagcggcggtgatccgcgcgctggacggcgatatgcacggtcgtctgctggcgcgccaccacgttaagggcgacagtgaagagaaccgccgcatcggcgagaacgagttggcacgctgtcaggccatgggcatcgaagcaggcaaagtgctgcgtctggacgatatggcgcgcagcgacaacgtcgttttctcggcgacgggcatcaccaaaggcgatctgctggacggtattacccgtaaaggtaatatggccaccaccgaaaccctactgatccgcggtaaatcccgcactatccgccgaattcagtcgattcattatctcgatcgcaaagacccggatatccagctacacatcctgtaa

SEQ ID NO: 174112 - DNA, 2082 bp, Klebsiella oxytoca
atgcaaggtcgcctgttagatgccgtcccccttaataccctaaccggcgttggcgcggcacagagcagccgactggcgaaaatcggcctgcacacggtgcaggatctgcttctgcacctgccgctacgctacgaagaccgcacccatctgtatcaaatcggtgaactgctgcccggcgtttacgccaccgttgaaggcgaagttcttaactgcaatatcactttcggcggccgccggatgatgacctgccagataagcgacggctccggcatcctcaccatgcgcttttttaacttcagcgcagcgatgaaaaatagcctggcaaccgggcgtcgcgtgctggcctacggagaggctaagcgcggtaagcacggggcggagatgatccacccggaatatcgggttcagggtgatatgagtacccctgatttacaggaaacgctgaccccggtttatcccaccaccgaaggcatcaagcaggctacgctgcgtaagctcaccgaccaggcgctggagctgcttgaaacctgcgctatcgccgagctgctgccgccggagctggcgcaggggatgatgagcctgcctgacgccttgcgcacgctgcatcgcccgccgccctctttacagcttagcgagctggaaagcggcaaacatccggctcagcgacgcttaatcctggaagagctgctggcgcataacctcagcatgctggcgctgcgggcaggcgctcagcgctaccacgctctctcgctcagcgctaacgacacgctaaaagacaagctgctggcctctctcccctttacgccgaccggcgcgcaggcgcgcgtcacggctgaaatcgagcgcgatatggcgctggacgtgccaatgatgcgtctggtgcagggggatgttggctccggtaaaaccctggttgccgcgctggccgccctgcgcgccatcgcgcacggcaagcaggtggcgctgatggcgccgacagaactgctggctgagcagcatgctaataacttccgcagctggtttgaaccgctgggcgttgaagtaggctggctggcgggcaaacaaaaaggcaaagcgcgcctggcgcagcaggaggctatcgccagcggacaggtgcagatggtggtcggtacccacgccatctttcaggaacaggtccagtttaacggcctcgcgttggtgattatcgacgaacagcatcgtttcggcgtccatcagcggctggcgctatgggagaaaggccaacagcagggctttcatccgcaccagctgattatgaccgcgacgccgattccgcggaccctggcgatgaccgcttatgccgatctcgacacctcggtcatcgatgaactgccgccgggccgtacgccggttacgacggtagccatcccggatacccgccgcagcgatattattgaccgggtacggaacgcctgtactcacgagggtcgccaggcctactgggtttgtacgctgattgaagagtcggatctgctggaggcccaggcggcggaagccacctgggaagagctgaagcttgcgctgccggagctgaatatcggcctggtgcacgggcgcatgaaatctgccgagaaacaggcggtcatgagcgcgttcaagcagggcgagctgcatctactggtcgccaccacggtaattgaggtcggcgtggacgtgcctaattccagcctgatgatcatcgaaaaccctgagcgtctggggctggctcagctgcaccagctcagagggcgcgtcgggcgcggtgcggtggcctcacactgcgtgctgctctataaatcgccgctttctaaaaccgcgcagaagcgcctgcaggttctgcgcgatagcaacgacggcttcgtcattgcccagaaagacctggaaattcgcggtcccggcgagctgctcggcacgcgccagaccggcaacgctgaattcaaagtcgcagatttaatgcgcgatcaggccatgatccccgaagttcagcgcatcgcccgtcatatacacgaaagatatcctcagcaggcccaggcgcttatcgagcgctggatgccggaaaccgaacgctattccaacgcgtag

SEQ ID NO: 174113 - DNA, 690 bp, Klebsiella oxytoca
atgaatttacagcgttatgcgcgtatctgcgagatgctcgccaggcgtcagcctgacctgacggtctgcatggagcaggtccataagcctcataacgtctctgcgattattcgtaccgcagacgccgttggcgtgcatgaagtgcacgccatctggcccggtagccgtatgcgtaccatggcctccgcagccgcaggcagcaatagctgggtgcaggtgaaaacccatcgtactattggcgatgccgtcacgcatttaaaaggccagggcatgcagattctggcaacccatctctctgataacgccgttgattttcgtgaaatcgactatacccgccccacctgtatcctgatgggccaggagaaaaccggcattactcaggaagcgctggacctggcggatcaggacatcattattccgatgattggcatggtgcagtcgctgaacgtttccgtcgcctcggcgcttattctgtatgaagcccagcgccagcggcagaacgccggcatgtatctgcgcgacaacagcatgctgccgaaagaagaccagcagcgtctgctgtttgaaggcggctatccggtgctggcgaaggtcgcaaaacgtaaaggtctaccctacccccacgtcaacgagctgggcgaagtcgaagccgatgccacgtggtgggccactatgcaggctgcaggataa

SEQ ID NO: 174114 - DNA, 2121 bp, Klebsiella oxytoca
ttgtatctgtttgaaagcctgaatcagctgattcaaaactacctgcccgaagagcaaatcaaacgccttcggcaggcttatctcgttgcacgtgacgctcacgagggccagacacgttcaagcggtgaaccctatatcacgcacccggtagcggtagcctgtatcctggccgagatgaagctcgaccatgaaacgctgatggctgccctgctgcacgacgtgatagaagatacccccgccacctatcaggatatggagcagctttttggcaaaagcgttgcagaactggtagagggggtgtcaaaacttgataagctaaagtttcgcgacaagaaagaggctcaggccgaaaactttcgcaaaatgattatggcgatggtgcaggatattcgcgtcatccttatcaagcttgctgaccgcacccacaacatgcgcacgctgggctcattgcgcccggataagcgccgccgcatcgcccgcgaaacgctggaaatctacagccctctggcgcaccgtttaggtattcatcacatcaaaaccgagctcgaagagctgggctttgaggcgctgtatcctaaccgctaccgcgttattaaagaggtagttaaagcagcgcgcggcaaccgtaaagagatgattcaaaaaatcctctccgaaatcgaagggcgtttgcaggaagcgggaataccctgtcgcgttagcggtcgcgaaaagcatttgtactccatctactgcaagatggtgctcaaagagcagcgttttcactcgattatggatatctacgccttccgcgtgattgtccatgattctgacacctgctatcgcgtgctaggccagatgcacagcctttacaagccgcgtccaggccgcgtcaaagactacattgccattccaaaggcgaacggctatcaatctttgcacacctcgatgatcggcccgcacggcgtcccggttgaggtacaaattcgtaccgaagacatggaccagatggcggaaatgggggttgcggcgcactgggcttataaagagcacggcggcgaaagcagtaccacggcgcaaatccgcgctcagcgctggatgcagagcctgctggagctccagcagagcgccggtagctcatttgaatttattgagagcgtgaaatccgatctgttcccggatgagatttacgttttcaccccggaagggcgcatcgtcgaactgcccgctggcgcgacgccggtggacttcgcctacgcggtgcataccgatatcggccatgcctgcgtcggcgcgcgcgtcgaccgccagccatatcccctgtcgcagtcgctctccagcggccagacggtggagatcatcaccgcgccgggcgctcgtccgaacgccgcgtggctaaactttgtcgtcagctccaaagcgcgcgccaaaattcgccaactgctgaaaaacctcaagcgcgacgattccgttagcctcgggcgacgcctgcttaatcacgcgctcggcggcagccgcaagctggccgaaattccgccagagaacattcagcgcgaacttgaccgtatgaagctggcaacgcttgacgatctgctggccgaaattggcctcggtaacgccatgagcgtcgtcgtagcaaaaaacctgcagcagggtgaaaccacagccgtgcctgtacagccggcgcctgtcggccataaccatctgccgattaaaggcgcggatggcgtgctgatcacctttgccaagtgctgccgtccgattcccggcgacccgattattgcgcacgtcagcccgggcaaaggcctggttattcaccacgagtcctgtcgtaacattcgcggctaccagaaagagccggagaaatttatggcggttgagtgggacaaagagacggcgcaggaatttatcaccgaaattaaggtggatatgttcaaccatcagggtgccctggcgaatcttaccgccgcaatcaacaccgcctcttccaatattcaaagcctgaatacggaagagaaagatggccgcgtttacagcgcctttattcgcctcaccgcgcgcgaccgcgtgcatctggcgaatattatgcgcaaaattcgcgtcatgccggatgtgataaaagtcacccgtaaccgaaattag

SEQ ID NO: 174115 - DNA, 276 bp, Klebsiella oxytoca
atggcacgcgtaactgttcaggacgctgtagagaaaattggtaaccgttttgacctggtactggtcgccgcgcgtcgcgctcgtcagatgcaggtaggcggaaaggatccgctggtaccggaagaaaacgataaaactaccgttatcgcactgcgcgaaatcgaagaaggtctgatcaacaacaagatcctcgacgttcgcgagcgccaggaacagcaagagcaggaagccgctgaattacaagccgttaccgctattgctgaaggtcgtcgttaa

SEQ ID NO: 174116 - DNA, 624 bp, Klebsiella oxytoca
atggctcaaggcacgctttatattgtttccgcccctagcggcgcgggtaaatccagcctgattcaggctttattaaaaacccaaccgttgtacgactctcaggtttctgtttcgcataccacacgcgctccgcgcccgggtgaagtgcacggtgaacactatttctttgtcaatcacgacgaattcaggacgatgattggcgaagacgcttttcttgaacatgcagaagtctttggcaactattacggcacctcgcgcgaagctatcgagcaggtactggcgaccggcgtcgacgtcttccttgatatcgactggcagggcgcacagcaaatccgcaacagaatgcccggcgcacgcagcatttttattctgccgccgtcaaaagatgagcttgatcgtcgcctgcgcggccgcggtcaggatagcgaagaggttatcgcgaaacgtatggcacaggcagttgcagaaatgagccattacgcggaatatgattacctgattgtgaatgatgattttgataccgcgctgagcgatctgaaaattattattcgcgccgaacgtctgcgcatgagccgccaaaagcagcgacatggcgctttaatcaccaaactgttggcagactga

SEQ ID NO: 174117 - DNA, 1677 bp, Klebsiella oxytoca
atgcaaaaaggaatccaggcgctggtgctgtggatgctggtgggatacgcgcaggcagcctgccccgcgtggccgcaggcgagggccgaacaggaaatggaacgcctcagccagcagataacggaatggaaaaacgcctactggcagcaggggaatagtgcggtaagcgatgaagtctatgaccagctggcggagcggctggcgttctggcggcgctgcttcaccggcgaggctcccgctcacgatgctcttccgccgctgaggggggatgtcaggcatccggtcgcgcacaccggcgtgcgtaaactgccggaccgcgctgcggtggcgcgctggatgcgcggtcaatccggcttgtgggtacagcctaaagtcgatggcgtcgcagtgactctggtctatcgacaggggcgcctggtgcaggcaataagccgggggaatggtctggccggagaagactggacggccagggttttacagatcccctccgtgcctaaagtctctgacggtgcactggccaatagcgttctgcagggagaactgttcctgcttcgcgcggggcatgtgcaaaagcagatggggggcatgaacgcgcgcgcaaaggtggccggcatgatgatgcgccagcaggctgcggcggaacttaatcaactgggcatctttatctgggcatggcccgatggtccgcaggagatgcaacagcggctggcgctgctgcggcagggcggctttgtttacagcgcgcgcttttcgcatcctgtcgcgaatgcgcagcaggtggaacagtggcgccagcgttggtttacttcgccgctgccttttgccagcgatggcgtagtggtgcggcggggaaaagagtcagccgggcgcttctgggtaccgggacagggtgattgggttatcgcctggaaatatcctcctgcctcacgggttatggaggttcgcggtatcagcttcagcatcgggcgtagcggtaaaatagcggtggtggcgcatctggagccgcagctgctggacgataagcgcgtgcagcgggtgaacgtcggctcggtatcccgctggtccactctggatatcggtattggcgatcagctgcaaatcagccttgccgggcagggaattccgcgcatcgattcggtcgtctggcgcacggcggagcgtaataaaccccagccgccggcggcacggtacaatgccttaacctgctatttcgccacgccagagtgcgcggagcagtttctctcgcggctggtctggctctcatcccgctcgattctcaatattgacggcgcgggagagacgctgtggcggacactgcacgatgcccgcggcatggagcatctcttttcatggctggcttttacgccggaacagctgcaagccataccaggtatctccgcgcagcgcgggcagcggctgtggcatcagttcaatcttgcgcgcgaacggccttttctacgctggatccaggcgatgggagtgcccataccgaagacggcttttgtccgactggaggaggacagctggcggcagatgcaggatcgaaacgaagagcagtggcaacggctgccgggcgtcggggctgaaagggcgcggcagctggtgacgttcttacatcacccggatgttgccgcgctggcgaagtggctgagcgggcaacgcattccggggttctga

SEQ ID NO: 174118 - DNA, 618 bp, Klebsiella oxytoca
atgctgcttcatattctttatctgattgggatcacggcggaagccatgaccggcgcgctggctgccgggcgccgccgtatggatacgtttggcgtgattatcattgcgacagcgaccgccctcggaggcggttcggtgcgcgatattctgcttggtcactatccgcttggctgggtacaacaccccgagtacgtcattattgttgccgttgctgcggtcctcaccacgattgccgcgccggtcatgccgcacctgcgccgtctgtttctggtacttgatgcgctcggcctggtggtgttctcaattattggcgcccagatcgcgctggatatgggccagggcccggtaatcgcctccattgccgcggtcatcaccggcgtctttggcggcgtgctgcgtgatatgttctgcaagcgtatcccgctggtgttccagaaagagctgtacgccggagtatcgttcgctgccgcgattttatatatcgcgcttcagcattacgtcagcagtcacgatgtagtcgtcatttccaccctgctgttcggctttactgctcgtatgctggcgctgcgctggaagctgggcctgccggtatttaactacaaccacagcgcgcattaa

SEQ ID NO: 174119 - DNA, 1260 bp, Klebsiella oxytoca
atgactgccgccgctgacaataaaaactatctcatccgcctgcttgccgttgtgctgacggggatactggctggcctgtcaggcatggttctggcgctgattttacacgcgattcagcacctggcgtttggctacagccacggccagctcgttggctcagagtcatttttacagggcgtcacggattcgtcctggtcgcgtcggatcatggcaatcgtcgccggcggtgcagtcgccgggttcggctggtggctgcttgggcgatatgggcagaagcgggtttcaattgcgtcagcggtggccaatccttccgtgccaatgcctgcgggtaccaccacgattcatgccctgttgcagatcgtcaccgtggcgctgggctcaccccttggtcgcgaagtcgcgccgcgggaaatgggcgcgctgggggcagggatggtggcgcgtaagctgggtctgctggaagatgaaagccgaacgctgattgcctgcggcgcaggtgcgggtctggcggcggtgtataacgtcccgctggccggcgcgttattcagccttgaggtgatgctgctgtcgtttagctgggaaaaaacgctggcggctatcatcacatcggcgattgccgcgtggacggccaccctcggcttaggcgatgagtcgcaataccattttacttccgacatcctgccgcattcatttctctggtgggcgattatctctggccccattctcggcgccggggcctggctctttcgcaaagcgaccagtaccgctcgttcgcacgtccaaagcaactggcagatgccggttttctgtctgctggcattttctctgcttgccgccctcagcctctatttcccccagcttccgggaaacggtaaaggacctatgcagctggctctcagcgatgcactgggtttccccggggcggcgatgctgctggtgctgaagatggtggtgattctggcggtgctgcgcggcggtgcggaaggcggcctgctgacgccggggctggcggtaggcggcttggccagcctgctgctgtgtatgctctggcaacagctgcttcccggcggcgattacggcagttttgcgctggttggcgcggcggcgtttctcgccgcatccatgcagatgccgataacggcggtggcgctggtgatggaattcacccatatggatcacagctatctggcccccacgctgctgtgcgcggcaggggcatttttaacctgccggatattggataagaacgattccttctga

SEQ ID NO: 174120 - DNA, 864 bp, Klebsiella oxytoca
atgatccgcagtatgaccgcctacgcccggcgtgaaatcaagggtgaatggggtagcgccgcgtgggaactgcgctcggtaaaccaacgatatctggaaacttacttccgcctgccggagcagttccgtagcctggagcccgtggtgcgtgaacgtattcgctcccgtctgacccgcggtaaagtcgaatgcaccctgcgttttgagcaggacccgagcgcacagggcgagctgattctcaacgaaaagctggcaaagcagctggttaatgccgccaactgggtaaaaatgcagagcgacgagggcgaaattaatccggtggatattctgcgctggcccggcgtaatgtcggctcatgagcaggatctggacgccattgccgccgaaatcctgggcgcgttgaacggcgcgctggacgactttatcgtcgcccgtgaaaccgaaggccaggcgttgaaagcgcttattgagcagcgcctggacggggtcaccgccgaagtggctaaagtacgcgcccacatgccggaaattctacagtggcagcgcgagcgtctggtttccaaactggaagacgccgaagtgcagctggaaaataaccgccttgagcaggagctggtgctgatggcgcagcgtattgacgttgccgaggagctggatcgcctggaagcgcatgtgaaagagacgtggaatatcctgaagaagaaagaagcggtcggtcgccgcctcgactttatgatgcaggagttcaaccgcgagtcgaacacgctggcgtctaaatcgattaatgccgaagtgacgaactccgccattgaactgaaagtgctaatcgaacaaatgcgcgagcagatccaaaacatcgagtaa

SEQ ID NO: 174121 - DNA, 717 bp, Klebsiella oxytoca
atgcgtccagcaggccgtagcgctaatcaagtgcgtccagtaaccctgacccgtaactacacaaaacacgcagaaggctccgtgctggtcgaatttggtgacacgaaagtattgtgcaccgcttctattgatgaaggcgtgccgcgctttctgaaaggccaggggcagggatggatcactgccgaatacggcatgctgccgcgttctacccacacgcgtaacgcgcgtgaagccgccaaaggtaaacagggcggccgcaccatggaaatccagcgcctgatcgcgcgtgcgctgcgcgcggcagttgacctgaaagcgctgggcgaattcaccattactctggactgcgacgtgctgcaggccgacggcggcacccgtactgcatcgattaccggagcctgcgtggcgctggcggatgcgctgaataagctggttgcggccggtaagctgaaaactaacccgatgaaaggaatggtggcggcagtctccgtagggatcgtgaatggcgaagcgatttgcgatctggaatacgttgaggattccgcggcggaaaccgatatgaatgtggtgatgaccgaagatggtcgcatcattgaggtgcagggtacggcagaaggcgaaccgttcacccatgaagagctccttaccctgctggcattggcccgagggggcatcgaatccattgtcacgacgcagaaggcggcgttgcaaaactag

SEQ ID NO: 174122 - DNA, 642 bp, Klebsiella oxytoca
atgaaaccgtatcagcgccagtttattgagtttgcgcttaacaagcaggtacttaagtttggcgagtttacgctgaaatccgggcgcaagagtccctatttcttcaacgccggcctgtttaataccgggcgcgatctggcactgttaggccgtttttatgccgaagcgctggtggattccgggattgattttgacctgctgtttggcccggcctacaaaggcatccctatcgccactaccacggcggtcgcgctggcggaacatcatgaccgcgatctgccttactgctttaaccgcaaagaggcaaagacccacggcgaaggtggaaatctggtggggagcgcgctgcagggccgcgtgatgctggtagatgatgttatcaccgcaggcaccgcgattcgggaatcgatggaaattattcaggccaacggcgccgagttagccggcgtactgatctctctggatcgtcaggaacgcggacgcggcgaaatctcagcgattcaggaagttgagcgcgactacagctgtaaagtgatttccatcgtgacgctgaaagacctgatcagctatctggaagagaagccggaaatggctgaacatctggcagccgttcgcgcctatcgcgaagcgtacggggtgtaa

SEQ ID NO: 174123 - DNA, 1017 bp, Klebsiella oxytoca
atggcgacatcacgacgggaattgctcaaactgggcggtctggcaaccgcatcactcgtgcttagtcaaaaaagcttcgcggcctgggcgccatctgcacgttatcccgatccgcgtattatggcggtggatgatagctttcgccgctatatgcttgccagcgcaaaagtggagcagatcgccaccggctttcgttgggcggaagggccggtatggtttggcgatacgcgcatgctgctctggagcgatattcctgacaacgtcattatgcgctgggatgaggccaccggcgttaccagcgtatttcgccaaccggcaaactacgcgaatggccacgcccgcgatcggcagggacgactcatcagctgcgaacacgatacccgacgaattacccgcaccgaatatgacggtagcatcaccgtactggcggataacttcgaaggcaaaccgctgaactcgccaaacgacatcgtcgtgaggtcagacggcagcatttggttcaccgatccgcctttcggtatcagcggattctatgaagggcataaggccacgccgcagctgccgcaaaacgtttatcgactggacccggaaagccgtaaactgagcgtcgtgctgggcgacgtcaaggggccaaacggcctctgtttttccgccgatgaaaaaacgctctacgtggtggaaagccgcgctaccccaaaccggcttatcctggcgtgggatgttgtcgataacacattgaaaaacaaaagagtgcatattgactgcggtaacggaaccgctgacggcatcgcctgcgacatggacgggaacctgtggtgcgggtggggtacgggcagcgaagagctggacggcgtccgcgtcttcaatccgcaggggaaaaacatcggtattattcagttaccggaacgctgcgccaacctgtgcttcggcggtgaacagcgcaaccgcctgtttatggcatccagcacgtccatctattcgctctacgtcaatgcgcaaggcgcaaagctggtctga

SEQ ID NO: 174124 - DNA, 597 bp, Klebsiella oxytoca
atggcagaaaaacaaactgcgaaaaggaatcgtcgcgaagaaatacttcaatctctggcgctaatgctcgaatccagcgacgggagtcagcgtatcaccacggcgaagctggcggcctccgttggcgtatccgaagcggctctgtatcggcatttcccgagcaagacccgcatgtttgatagcctgattgagtttatcgaagacagcctgattacgcgcatcaatttgattttaaaagatgaaaaagacaccaccgcgcgcctgcgtctgattgtgttgttgattctggggtttggcgagcgtaatcctgggctgacaagaattctgaccggccacgcgctgatgtttgaacaggaccggcttcaggatcgcataaaccagcttttcgagcgtattgaagtccagctgcgtcaggtgatgcgtgaaaagaaaatgcgtgaaggtgaaggctactccgtcgatgaagccctgctggccagccagctgttggcattctgcgaagggatgctgtcgcgctttgtgcgcagcgagtttaaatatcgcccgacggacgattttgacgcccgctggccgctggtcgccgcccagctgaagtaa

SEQ ID NO: 174125 - DNA, 459 bp, Klebsiella oxytoca
atgatgaaaaaaatcgacgttaagattctggacccgcgcgttggtcagcaatttccgctgccgacctatgccacctccggttccgccggacttgacctgcgagcctgtctcgatgacgccgtagagctggcgcctggcgctacgctcctcgtgccaactggcctggcgattcatattgccgatccgtctctggcagcagtgattctcccgcgctccgggctgggtcataaacacggcgtcgtcctgggtaacctggtcggcctgattgattccgactatcagggtcagctgatggtttccgtctggaaccgcggtcagcagagcttcaccatcgaacccggcgagcgtctcgcgcaaatggtgttcgtgcccgttgtacaggcggaatttaacctggtggaagagtttgacgccaccgatcgcggcgaaggcggcttcggtcactcagggcgtaaataa

SEQ ID NO: 174126 - DNA, 1215 bp, Klebsiella oxytoca
atgatgagtctggctggtaaaaagatcgttctcggcgtgagcggcggcattgctgcctataaaacgccggaactggtgcgccgcctgcgcgaccgcggtgcggatgtccgcgtcgccatgacggaagccgctaaagccttcattacgccattaagtttacaggcggtatcgggttatccggtttccgacagcctgctcgacccggccgccgaagccgcaatgggccacattgagctggggaaatgggccgatctggttattctcgctccggcgaccgccgatttaatcgcccgagtcgcggcaggcatggctaacgatctcgtctcgacgatttgcctggcgacgccgtcgcccgtcgcggtcgtgcccgccatgaatcagcaaatgtatcgcgccgccgccacccagcataatcttgaggtgattgcctcgcgcggtttgctggtctggggcccggacagcggcagccaggcctgcggcgatgttgggccggggcggatgctggacccgctgaccattgtggatatggccgcgcagcacttctctcctgtcaaagatttgcaacatctcagcatcatgattaccgcgggcccaacccgcgagccgctggatccggtgcgttatatcactaaccacagttctggtaagatgggcttcgcgattgccgccgccgccgcgcgtcgcggggcaaacgtcacgctggtaagcggcccggtttctctacctacgccgccgtttgtacaaagaattgatgtcaccacggcgctggaaatggaagccgcggtgcaaaacggcgcctcacggcagcatatttttattggctgcgcagcggtcgccgactaccgtgcggtcaccattgccgaagaaaaaatcaaaaaacaaggtgatgaactcaccctgaaaatggttaaaaatccggatatcgtcgcaggggtcgccgcgcttaaggccaaccgcccttacgtcgttgggtttgccgccgaaacgaataatgtggaagaatacgcacggcaaaagcgagcccgcaaaaatcttgatctgatctgcgctaatgatgtttcacagccaaatcagggatttaacagcgacagcaatgcattacaccttttctggcaggagggagataagcgcttaccacttgagcgcaaggaactcctgggccaattattactcgacgagatcgtgacccgttatgatgaaaaaaatcgacgttaa

SEQ ID NO: 174127 - DNA, 666 bp, Klebsiella oxytoca
atggagatacaggaaaccctcatgccgagggaaaagatgcagcgttacggtatcgaagttttatcggatatcgagctgttagcgctgtttttacgtactggtacgcgcacgcaggacgtgatgacattttcgcgagagctgctgcagcgatttggctcgctgtacggcctgctttcggcggaagagtcacagttcgctgagattgaaggcattggtctggcgaaatatgcgcagctaaaagggattgctgaactggcgcgacgctatttcagcctgcggatgacggaagagccctcattggtcaccccgtcgatgacgcgggagtttctgcaaagccagctggccgacgaagagcgcgagatcttcatggtgatctttttagacaatcagaaccgggtattgaaacatagccgacttttttctggtactcttagccacgttgaggtgcatccgcgagaaatcgtacgcgaagccatcaaagtgaacgccgccgcggtgatcctggcacataatcatccatccggaagtcctgagccgagtaaggccgacagattgattaccgaaagagtgataaaatgttgtcgattcatggatatacgtgtgctcgatcaccttgttatcggccgcggagcgtacgtatcttttgctgaacgcggctggatttag

SEQ ID NO: 174128 - DNA, 237 bp, Klebsiella oxytoca
atgtcccgagtctgccaagttactggcaagcgtccggtgaccggtaacaaccgttcccacgcactgaacgcgactaaacgccgtttcctgccgaacctgcactctcaccgtttctgggttgagagcgagaagcgttttgtcaccctgcgcgtatctgctaaaggtatgcgtgttattgataagaaaggcattgatacagttctgtccgaactgcgtgcccgtggcgaaaagtactaa

SEQ ID NO: 174129 - DNA, 168 bp, Klebsiella oxytoca
atggctaaaggtattcgtgagaaaatcaagctggtttcttctgctggtactggtcacttctataccaccacgaagaacaagcgtactaagccggaaaaactggaactgaaaaagttcgatccagttgtccgtcagcacgttttatacaaagaagctaaaatcaaataa

SEQ ID NO: 174130 - DNA, 810 bp, Klebsiella oxytoca
atgcctgaattacctgaagtagaaaccagccgccgcggcattgagcctcacctggttggtgcgaccatcctgcacgccgttgtgcgcaacgggcgcctgcgctggccggtttccgaagagatctatcgcctgagcgacgttcctgtgctcagcgtgcgccgccgcgctaaatatctgctgctcgaactgcccgacggctggattatcgtccatctcggcatgtcgggaagcctgcgtatcctcagcggagatctgccggcggaaaaacacgaccacgtggacctggtgatgagtaacggcaaggtcctgcgctataccgatccgcgacgctttggcgcctggctgtggactaaagagctggaagggcatccggtgctggcgcatctgggaccggagccgctgagcgatgagttcaacgccgattatctccagcagaaatgcgcgaagaagaaaactgcgatcaagccctggctaatggataacaagctggtggtcggcgtgggtaatatctacgccagcgaatcgctattttcggcgggtattcaccccgacaggctggcctcttcgctgtcgcgcgaggagtgcgaacagctggtgaaagtgattaagctggtcctgctgcgctccatcgaacagggtgggacgacgctgaaagatttcctgcaaagcgacggtaaaccgggttattttgcccaggagctgcaggtgtatggccgcaagggcgagccgtgccgcatttgcgggacgccggttatcggcagtaaacacgcccagcgggcgacgttttattgtcgccagtgccagaaataa

SEQ ID NO: 174131 - DNA, 477 bp, Klebsiella oxytoca
atgagcacaaaagcgatctatccgggaaccttcgaccctatcaccaacggccatatcgatatcgtcactcgcgcggccagcatgttcgataaggtgctgttggctatcgccgccagcccgagcaaaaagccgatgttcactctcgacgagcgcatcgcactggccacccaggcaacggcgcatctggtcaacgttgaggttattggcttcagcgatttaatggccaattttgcccgcgcgcagcaggcgaacattttaattcgcggcctgcgggcggtggcggattttgaatatgagatgcagctggcccatatgaaccgtcatttaatgccgacgctggagagcgtgtttctgatgccgtgcaaagagtggtcgtttatctcctcttcgctggtaaaagaagtggcgcgccaccagggcgacgtctcccactttctgccggcaaacgttcaccaggcgctgctgaagaagctgtaa

SEQ ID NO: 174132 - DNA, 777 bp, Klebsiella oxytoca
atgtcgcctcgactctcggtcgtgatgatcgccaaaaacgcggcggatctgctgcctgattgtctggcgtcggtaagctgggccgatgagatagtgctgctggattccggcagcagcgacaacaccgtcgaattagcccgcagcatgggcgttcaggtgcatgtcaatcgcgactggcagggctacggtattcaacgccagcgcgcccaggactacgccaccggcgattacgtgctgatgatcgataccgacgagcgcgtcactccggagcttgcgcagtctatccgcagcgtgctggccgcgccgcaaaccggcgcaatatacagcattgcccggcgcaactattttcttggccgctttatgcgccacagcggctggtatcccgatcgcgtgatgcgcttgtacgaacgcggccgttaccgctataacgataatctggtccacgaatctctcgatgcccgaggcgcgccggttatcgagctcgcgggcgatctgctgcatctgacctgccgtgatttctccggctttcagcaaaagcagctggcctacgccgccgcctgggcgcaggagcgccatcagagaggcaaaaagacctcgctggccgctatcttcggccatacgctgggcgcctttgtgaaaacgctgctgctgcgcggcggcattctggatgggaaacaaggctggctactggcggtggtcaacgcgcaatacacgtttaataaatacaccgagctgtgggccctgagccgcggctactcggagaaagtgtcattatga

SEQ ID NO: 174133 - DNA, 1275 bp, Klebsiella oxytoca
ttggaattgctttataccgccctactttacctcattcagccgctggtgtggctgcgactgctgttacgcagccgtaaggcccctgcctatcgtaaacgctggaaggaacgttatggcttctgccagaacaaggtagaaccgggtggcatcctgctgcattccgtttccgtgggtgaaacgctggcggctatcccgctggtgcgtgcgctacgccaccgctacccctatctgccgatcaccgtcacgaccatgacgccaaccggctccgaacgcgcgatgtccgctttcggtaaagacgtccatcacgtctatctgccttacgatcttcccggcgcaatgaaccgcttcttcaataccgttcagccaaagctggttatcgtcatggaaaccgaactgtggccgaacatggtcgccacgctgcataaacgcaaaattccgctggttatcgccaacgcccggctgtccgaacgctcggcgaaaggctatgccaaactgggcaaatttatgcgtcggctgctgagccgcattacccttatcgccgcacagaatgaagaagacgccagccgctttatcgcccttggcctgaaacgcaatcaactggcggtcaccggcagcctgaagtttgatatttcagtcacgccggagctggccgctcgcgctatcaccctgcgtcgccagtgggcgccgcaccgccaggtatggattgccaccagcacccacgacggcgaagagcaaatcattcttcaggcgcataaaaagctgctggagcgcttccccaacctgctgctgatccttgtcccgcgccacccggagcgcttcggcgacgcccgcgagatggtgcagaaagcgggaatgagctacaccctgcgcagtaccggcgaaatcccgtcgaacagtacccaggtggtgattggcgataccatgggtgagctgatgctgctgtacggcattgccgacctcgcgtttgtcggcggtagcctggtggagcgcggcggtcataacccgctggagcccgctgctcatgcgataccggtactgatgggcccgcacacctttaacttcaaagatatctgcgccaagctgcagcaggacgatggactgattaccgtcaccgacgccgactcgctggtgacggaggtgtcaaacctgctgaccgatgaagattaccgtctgtggtatggtcgtcacgcggtggaagtcctgcatcaaaaccagggcgccctctcccgcctgctacagttactccaaccctatctgccgcagcggagccactaa

SEQ ID NO: 174134 - DNA, 990 bp, Klebsiella oxytoca
atgagtcaaacgcctttactaagcatcgtagccgccgtctataacggcgaaaaattccttgcgcaattctttgagtgccttgagcaacagcagctggaaagctatgaactgatcctggtgaacgacgggtcgacggacggtagccttgcggttatcgaccagtggaaagagcgcctgcaaaacgtgctcgtactggaacaggaaaaccagggcgtgtcggtggcgcgcaataccgggctcgccgcggcgaccggtaaatacctgacctttccggatatcgacgataagctttacccgggcatgtaccgtacgcttctggaaatggcggaaaagggcaatcttgacgtcgccacctgcaacggccgctacgtctacgagacaaaaaaagatatccatcctattttcccgctggaccggctacagtcgaccggcgttttgcccggccacgtctggttaaaacaggcgctggattctcgtaagttcctgcatgtcacctggctcaatatttaccgccgcgagtttatcgcggatcaccgcttccattttgagccgggcctgcgtcatcaggatattccctggaccacggaagtgctgctggcggcagaacgcgtgcagtacaccagcgagcagttctacgattactacatccattcggaatcggtgtcgcataagccggacaatgacgatacgctgatgcgttcagcgcgccactatatgaagattcttgagatgctggacgccatcaaccagcgctatccggacaaggttcgcaatatttccgcctgccgctggcagatcgctaaagaggggctgggaattattcataccttcgatagcatgaaagatgagtcaaaaaagcatattatcattaaagagttctttgaccgcggtatctggagcctgatctggaaaaatgcccatacgttccgtctacgctggcgtcttggacgccgctatctgcgcatcaagcgctatcgcgacgcggcttaa

SEQ ID NO: 174135 - DNA, 1095 bp, Klebsiella oxytoca
atgcgcatattgtttgttatcgacggtctgcccggcggcggcgcggaaaaagtcgtgctgacgctggcggcgcactttctcagccagggggaaacggtatcgcttttttccctgcgcgacgtctgcgattatccgctgccggaaggactggattatcaggtcatcgccgaccgctgccgcaaaccgtggcgcaaactgacggaactctcccggcgcgcgcgccagcttgatgcggccatcgatagcgcagaacggcagggccgcttcgatctggtgctctcgaatctgcataaaactgaccgcattgtctcccgcagccgcctgctgaacgggcgaaacgtctggtattgcctgcacggcgtattctctacttcctatctcggccatcgcaccggttttgaccgctggctgaagcagcagaagatcggacgcgtttaccagggacgcaacgtcgtcaccgtctccgatgcggtaggtcaagatctggtcgagcagttcgccattcgcccggcccagctgaaaaccatctataacccgtttgatatcgccgcgctgcgcgcagcggctgaagagcccagccagcgacccgacggcgactatattattcacgtgggccgctttcatcccggtaaacgccacgaccgcctgattgaggcgtatgcgcaaagcggtatcgatgcgccgctggtgctgctgggacagggaaaaccggaacaagagcagcgcctgcgccagctggcgcagcagctacaggttgccgatcgcgtcctgtttaaaggcttccagaaaaatccgctgccgtggatcaaaggcgcgcggatgctggtcctgagttccgatagcgaaggttttggcaacgtggtggttgaagcgctgctgctggatacgccggtcgccagcacccgctgcccgggcggcgtgaccgagatcctcaccggcgagctgtcgcgcggcctggcggatctcaacagcccggcgctggctcagacgatgcaaagcatttaccatagccccccagccatcgacgcctcggcgctggagaaattcagcgtggcatcgatttgtcagcagtatcgtcagctgcgcagcgcctga

SEQ ID NO: 174136 - DNA, 1128 bp, Klebsiella oxytoca
atgagtaaattcaggctggctctggtacgccagaagtatcgcccggacggcggcgcggaacgatttgtctcccgcgcgctggaggccctcgacgacagcgaccttgagctgaacgtcatcacccgcgagtggcaggggccggtgaagcccgagtggaacatccacatctgcaatccgcgtaaatgggggcggatcagccgcgagcgtgggtttgccgacgccgcccgccagctgtggcagcgcgaagccttcgatctggtgcaaagccatgagcgtatccccggctgcgacctgtaccgcgccggagacggcgtacaccgccgctggctgcagcagcgctcgcgcattttgcccggctggaaaagccgcctgctgtttgccgaccgctaccatcgctatgtgatgcaggccgagcgcgaaatgtaccaggactcgcacctgcgcggcgttatctgcaacgcggagatgattaaacgcgagattattgcagacttcggcctgccggcggaaaaaatccacgttatctataacgccatcgataaccagcgttttctgccgccgacggaagcggcctttgtcgcactgcgtaccaaatggaatctgccgctccaggcgacctgcctgatttacgtcggctccggctttgagcgcaaggggctggatgcggcgatccgcgccatcgcgccgaccaaccgctacctgctggtagtgggcaaagataaagagcaaagtcgttatcagcagctggcgaaaacgctgaactgcgaggagcgggtgcgctttttcggaatgcagtcggaaaccctgccgttctatcagatggccgacggcctgctgctgccgacgctgtacgacccgtttcccaacgttattctcgaagcgatggcctgcggcctgccggtcattaccactaccggctgcggcggcgcggagtttattgttcagggcagcaatggctacgtttgcgatgcgctggatatcccggccctgcaggagtcggttagcgcccttcccgcccgggcgttaggctccgcggaaggcgaacgcgcccgcgagcgcatcatggcctgcaccagcgaacgcctctcggcgcagctgctttccctttatcaggatttggtgaaataa

SEQ ID NO: 174137 - DNA, 1077 bp, Klebsiella oxytoca
atgacgcctgaaacccgcacttccggccgcgtgaacccggcgcgaatcctggttattaagcttcgccatcatggcgatatgttattgataacgccgcttattcactcgctaaaacagcaataccccgccgcctgcgtggatgtgctgctttatgaagaaacccgggatatgctcgcagcgaatactgagatccgccatatttatggtatcgatcggcgctggaaaaaacagggcaccggccatcagctcaagatggaatggcagctgatccgtacgctccgccagcagcgctacgatatggtgctcaatcttgccgatcagtggcccagcgcgattatcactaaactgaccggggcgaccacccgcatcggctttgactttccgaagcgtcgtcatccggcctggcgtttttgccataccgccctcgcctcaaccgagctgcacaaccagctgcataccgtacagcagaatctgtcgattctggcgccgcttgggctggatattgatgatgcgccggcaacgatgggctacagcgaacaggactggctcgccagccgcgcgctgctgccggaaggatttcaggacaactatatcgtcattcagccgacctcccgctggttctttaaatgctggcgcgaagcgcggatgagcgccctgataaacgcgctttctgaggcaggctatccggtcgtgctgacctccggccccgacgccaaagagaagcagatgatcgacacgattatgacgggctgtcccaatgctcgcctgtactccctcgccgggcagctcaccctgcgccagctggcgtctctcatcgaccatgcccgcctgtttatcggcgtcgactccgtgccgatgcatatggccgccgcgctgggcacaccgctggtggcgctattcggcccctccaagctcactttctggcgtccatggcaggcgcagggggaggtaatttgggcgggtgatttcggctcgattcccgaccctgacgacatagataccaacaccgaggaacgctatctcgatttaatccccaccgacgcggttatcgcggcggcgaaaaaggtactggcatga

SEQ ID NO: 174138 - DNA, 963 bp, Klebsiella oxytoca
gtgcacaaacccgcatttctcatcacgattgatacagagggcgataacctctggcaaaaacatgacagcatcaccaccgagaatgcgcgctatttaccgcgttttcagcagctttgcgaaaagtatggcttcaaaccggtttatttgaccaactatgaaatggccatcgacccggtttatatcgaattcgccaaagatgtgattgcccgggggacggcggaaatcggcatgcatctgcatgcctggaacagcccaccgaccgacccgcttaccgatgacgactggcggcataaaccgtatctgatcgagtacagcgatgcggcgatgcgtgccaaagtcgactatatgacccgtctgctggaggataccttccagactaaaatggtcagccatcgcgccggacgctgggcgtttgacgagcgctacgcgcgtctgctggtggagtatggctatctggtcgattgctcggttactcccagggtgaactggaaaacggcgaaaggcgcgccgcagggcgacggcggtaccgattatcgtcacttcccgcagcacgcctactttctcgacgagaacgatattcgtcgtgaaggccagtcgtcgctgctggaagtgccaatgagcattcagtacaagcattctgcgtggatgaatagcctgaagcagggttacgatcgcctgcgcggcaaagtccgctcgccgtcggtacactggctgcgtccgatgggcggcaacgtggagacgatgaaaaaagtggtcgaacaaacgttgactcagggtaatgactacgtcgaatatatgctccactcttctgagtatatgcctggcggcagcccgacgtttaaaaacgagcaggatattgagcgcttatatgccgatctggacgcttttttcagctggctggcaccgcaggtgaagggaatgacgttggcggaatattaccaacagaaacgcgcacagcgataa

SEQ ID NO: 174139 - DNA, 1083 bp, Klebsiella oxytoca
atgcgtatcgtgaagcagttcacgcggaagaaaaatgccttcttccgcgaaattaaatttaatttgattaactatcgttacagaaataaaagcgcacgccagccttttaatcccgcgaagattcagcatgttttattattgcgcctggatgacaaagtcggggatatggtcgtgacgaccggctgcgcaaagcttttggccgaccggggctataaggtgtctgttcttaccgggcctgtctgtaaacagatgcttgccggtgcggattttcttgagcaggtctatttatatcagccgcggatgcccttaaatgcgctgcgtgcggtgggatttgacgcggtcgttgattttgatgatgttaaaacctacgaacgttttaaactgctctctgatttgcggcctggctgcgttattggttttaataaacaagaatataagctttacgatcactccatccctttttttgacagcgccaggcatatttccgcccgctacaaagaagtggccaggctatttggtatagaacacgatcgttaccactatcatctgcccggcgatcttcacgaacgggaaagggttaagcttttacttaatcaggaaaaagcgcgcgcgctctgtattgcgatcaacccgtttaccgcttcaacggataaagacttttgtcatcaccaggtggcgactctgattgaccgcctgcatacgcttccgtatgccgtgagcgtcgtcatggttgggcatagcgaaaaaattcgccagctaaatctggataaagcgctatatctgcctgatagcaatattaattcagcggtagagatcgttcgccagtgcgatctggtgattacggcggataccgccatcgtgcatattgcccgcgcgttcgacaagcccatggtggcggtttacaacaaacgtaagctcaaagataccggtttgccgggctatactatttgggcgccgggttatgacaaggccagacagattgtctgtgaagagacccacgtcgccgacatgacgattgacgccgtctggccggtgattaaagcgcaggcggacgacctggttgcctctcgcgagcagacataa

SEQ ID NO: 174140 - DNA, 1167 bp, Klebsiella oxytoca
atgagtactttaaaaatcagtagttatgccagacagggttacaccattttctttcctttgtttctgttttttagtgctattttttgcgtatcaactcgcgcaaataaccttcttcatttatccattttgctgtttttgctttcacagctgaacacagacaaccgccgggcattagcggaaaacctgcgccagcagtggccggtctatggtctgctggtcgtattctgcgtgtactatgcgctgagcaatatttggggccagacgccgcagcatatcgattcccctctgacccacggcacctataccattttctatcttctgctgctgacaacgctacttggtcattctcgcacccggcatctgacgctgctgagcatcgtggccgggatcacggtgctgtctatctggacgatggttatcgacttcaccctggtcctcaaggagcgcctggtatcgccggataatcccggcccgaccaacgttatcgacctggcgggttattgcggtattggggttcttatttgcgccatgctgctgaaagaaaaaggcagccaccttctgtatgtgccgatggctatcatgctggtgatgctatttctgacccaaagccgcggcccgattatcgccctactggtggcgtttgtttgcaccctgcatctgcacgtctttacccgccgtaatatcttgattgtcgccgcgttagcgatgattctgggactgcttttcttcttcacccccaccggagacctgctgctggcgcgctttgaggagctggggacgcaaagcggtttgcgcatcagcatctggcatcatacgatcgaggaagtggccagccagccgtggctggggcgaggttttgactacgagctgaactttaccaactacagcggcgaacatatcaccaccacccacagcgtctatcttggcgccctgctgaaaggcggcatcattggtctggcgctgctgttggcggtgattgccggagggctatggcaggcatggcgcaaacagcaggatggccgctacggactggcgatttttatctatgcgctgatttttatggcttcgcagggcatgtttatcatcagcaatcctcgcgaaacctggccgctgttttggctaccgctgggtattgcgctgagcggcagcctgaaggcgaaacgctaa

SEQ ID NO: 174141 - DNA, 909 bp, Klebsiella oxytoca
atgggttcattatttaagcagatctatcgctacacgcatcgacgagcctttcgtcataacgaaaatctttggccgtttacccatatcacccgcgcggcaagcggtgaaatccgcaccctgaaatacaaagggaaagcggtcccgctggtcaacctcagcgaactaaaagatagcgctcagggcgaagtgctgctgacggcaaccggtccctctacgcgcagcatcgattttacgcggctgccgaaaagcatcccggtgatgggggtgaatggcgcgtggcatctctctgataaaattaaattttcgctctataccattgtggacatggagttttacgataaaaaaccggacattattcgtgcggtgattagccaaccggacatcgtactcttcaccaccatgcatggcattgccaaaatcctcgaccgccacggctcagcgcttcgctgtcgtttggcattaattgaagacgcctgttataaaatttaccagcctaaagtcccgagaagcgcgatacagcaggtctggcgcggcgtcaccgcgctacgctttcatccgcaaaggcaggatatttgctttagcaccgacatccgccatggcatttttgatgccggtaccgtggtctactgggctctgcaaattctgatgtggctgggatttaaaactattctgataagcgggctggatatgagcaatttcaaccagccgcgattctacgaaacggaacaggataaactcccctcctggctggcaaataaggtggatgacctggtcatgccgtccttttcgcacgctgccaacgtgctgcaacaaaaccatattcgggtcgttaacttctccttagaaagcgcggttccggaaacgattttcgaaaaggtttcatttgatgagtactttaaaaatcagtag

SEQ ID NO: 174142 - DNA, 972 bp, Klebsiella oxytoca
atgcgggtattgatcgtaaaaacctcgtccatgggcgacgtgctgcatacgctgcccgcgctgagcgacgccgcgctggcctttcccggcattcgtttcgattgggtggttgaagagggcttcgcacagatcccctcctggcatgagaccgtcgacagggtcattccggtggcgattcgtcgctggcgcaaggcgtggttttccgcgcccgttaaagccgagcgcaaggcatttcgcgacgccgtacaggcggaaaagtaccacgccatcattgatgcccaggggctggtgaagagcgccgcgctggtcacccgactggcccgcggcgttaagcacggtatggactggcagaccgctcgcgaaccgctggcgagcctgttctataaccgtcgccaccatatcgccaaacagcagcacgccgttgagcgcacccgcgagctgtttgctaaaagccttggctacgcgaagccggaaacccagggcgactacgctatcgctcgccattttttgcgccaggccgacgcctccgctgtgccctatctggtatttctccacgccacaacgcgggatgataaacactggccggaagagaactggcgagcgctaatcgctctgcttgccgacagcggcgtgcgtatcaaactgccgtggggcgccccccatgaagaagcgcgggccagacgcctggcggatgggcacgattttgtcgacgtcctgccgcgtatgagcctggagcaggtggcccaggtgctgggaggcgcgcgcggagtggtttccgtcgataccggactgagccatctcaccgccgcgctcgataaaccgaacttcacgctgtacggcccgacagatccggggctgattggcggctacggtaaaaaccagtatgtcgtgcgcccggaaagcggcaacagcacgggggatattgccgcctcccggattctgcaactgttgaaatctcaggaactggcttaa

SEQ ID NO: 174143 - DNA, 1059 bp, Klebsiella oxytoca
atgaagatactggtggtgggcccgtcatgggtgggcgacatgatgatgtcgcaaagtctctatcgtacgctcagggcgcgctatccccaggcgataatcgacgtgatggcgcccgcatggtgccgtccgctgctatcgcgcatgccggaagtcaacgaagcgatcccgatgccgctcggccacggcgcgctggaaatcggcgaacggcgcaagcttgggcacagcctgcgcgagcgtcgctacgatcgcgcttacgtgctgccgaactcgtttaaatcggcgctggtgccgtttttcgccggtatcccgcatcgcaccggctggctcggcgagatgcgctacggcctgctgaacgatgctcgtaagctggataaagcggcctggccgctgatggtcgaacgctacgtcggtctcgcatacgataaaggcgtgatgcgctgcgcgaaagatctgccgcagccgctgctctggccgcagctgcaggtgcatgaaggcgaaaaatcgcaggcctgtagcgcatttaatatttcagccgagcgcccgataatcggcttctgcccaggcgcagagttcggcccggcaaaacgctggccgcactatcactacgccgagctggcgaaacagctgatcgatgaaggctttcagatcgtgctgtttggttccgcaaaagatcatgaagcgggtaatgaaatccttgccgcgctcacgaccgagcagcaggcatggtgccgcaacctggccggggaaactcagcttgagcaggccgtcattctgatcgccgcctgtaaagcggtggttagcaacgattccggcctgatgcacgttgccgcggcgctggatcgtccgctggtggcgctctatgggccaagtagcccggacttcacccctccgctgtcgcacaaagcgcgcgttatccgcctgatcagcggctaccacaaagtgcgtaaaggcgacgccgccgaaggctatcatcagagtttgatcgacattacgccgcagcgcgtactggaagaattaaacgacctgctgctggaaaaaacggaacaagaggaagcctga

SEQ ID NO: 174144 - DNA, 945 bp, Klebsiella oxytoca
atgatcatcgttaccggcggcgcaggctttatcggcagcaatatcgttaaggcgctgaatgacaaaggcattaccgacattctggtcgtagataatctgaaagacggcactaaattcatcaacctggtggatttgaacattgccgattacatggataaagaagacttcctgatccaaattatggcgggcgaggagttcggcgatatcgacgccattttccatgaaggcgcctgctcgtccactacagagtgggacggcaagtacatgatggataacaactatcagtattccaaagaggtactgcactactgcctggagcgtgaaatcccgttcctgtacgcctcttccgccgcgacctacggcggccgcaccagcgactttattgaatcccgcgaatacgaacagccgctcaacgtttacggctactccaagtttctgtttgatgaatacgtccgtcagatcctgccggaagcaaattcgcagatcgtcggcttccgctatttcaacgtctacgggccgcgcgaaggtcataaaggcagcatggccagcgtcgcgttccacctgaacactcagctgaataatggcgaaagtccgaaactgttcgaaggcagcgatagcttcaagcgcgacttcgtctacgtcggcgacgtcgcggcggtaaacctgtggttctgggaaaacggcgtttccggcatctttaacctcggcaccggccgcgcggagtctttccaggccgttgcagacgcaacgctggcttatcataagaaaggcagcatcgaatacattccgttcccggacaagctgaaaggccgctatcaggcgtttacccaggcggatctcactaacctgcgcgcagcgggctatgataaaccgttcaagaccgtcgccgaaggcgtaacggaatatatggcctggctcaatcgcgacaatcatgcgaattcataa

SEQ ID NO: 174145 - DNA, 1194 bp, Klebsiella oxytoca
atgcgtggtgatttctacaaacagttaaccaatgacctcgataccgcgcgcgcggaagggttgtttaaagaagagcgtattattacttcggcgcagcaggcggatatcaccgtcggcggtagccaggtcattaacttctgcgccaataactatctgggtctcgcgaaccacccggatctcattgccgccgcgaaaagcggtatggatagccacggttttggcatggcctccgtgcgctttatctgcggcactcaggatagccacaaagcgcttgagaagaagctggcggattttttaggcatggaagacgcgattctgtactcctcctgcttcgacgccaacggcggactgtttgaaactctgctcggcgcagaggatgcgattatctccgatgccctgaaccacgcgtcgatcatcgacggcgtgcgcctgtgtaaagcgaagcgcttccgctatgccaacaacgacatgcaggagctggaagcccgtctgaaagaggcgcgtgaagccggcgcgcgtcatgtgctgatcgccaccgatggcgtgttttcgatggacggcgtgatagccaacctgaaaggcgtttgcgacctcgcggataaatacgatgcgctggtgatggtcgatgattctcatgctgtgggtttcgtaggggaaaacggccgcggttcccatgagtactgcgacgtgatgggccgcgttgacattatcaccggtacgctgggtaaagcgctgggcggcgcgtccggcggctatactgccgcgcgcaaagaagtcgtcgagtggctgcgccagcgctcgcgtccgtatttgttctccaactcgctggctccggcgattgtcgccgcttcgatcaaagtgctggagatggtggaagccggcagcgaactgcgcgaccgcctgtggtcgaacgcgcgcctgttccgcgaaaaaatgactgcggcagggtttaccctcgcgggcgccgaccacgccattatcccggtaatgctcggtgaagccaccgtggcgcagcagttcgcgcgcgagctgcaaaaagaaggtatctacgtcaccggattcttctatccggtggttccaaaaggccaggcgcgtatacgtacccagatgtctgcggcgcatacccctgaacaaattgaacgtgcggtggaagcctttacccgcatcggtaaacaactgggcgtcattgcctga

SEQ ID NO: 174146 - DNA, 1026 bp, Klebsiella oxytoca
atgaaagcgttatccaaactgaaggcggaagaaggcatctggatgaccgacgtaccggaaccggaagtcggccacaacgatctgctgattaaaattcgcaagaccgcgatttgcggtaccgacgtacatatctataactgggacgaatggtcgcaaaagaccattccggtaccgatggttgtgggccatgaatacgttggcgaagtggtgggtatcggtcaggaagttcgcggctttaagctgggcgaccgcgtttccggcgaggggcatatcacctgcggccactgccgtaactgccgcgccggccgtacgcatctgtgccgcaatacgacgggcgtcggcgtgaaccgtccgggctgttttgccgaatatctggtgatcccggcgtttaacgcttttaaaattccggacaatatctccgacgatctggcatcgatttttgacccgtttggcaacgctgtacataccgcgctttcattcgacctcgtgggtgaagacgtactggtttccggcgcaggccccatcggcgtgatggcggccgcggtggcgaaacacgttggtgcgcgcaacgtcgtgattaccgacgttaacgaatatcgcctggaactggcgcgcaaaatgggcgtcacccgggcggtgaatgtggcgaaagagaaccttagcgatgtgatggccgagctgggcatgacggaaggcttcgatgtgggcctcgagatgtccggtgcgccgccggcgttccgcaccatgctcgataccatgaaccatggcgggcgcatcgccatgctgggtattccgccgtcggatatgtccatcgattggaccaaggtgatcttcaaggggctgtttatcaaagggatttatggtcgcgaaatgttcgaaacctggtacaagatggccgcgctcatccagtccggcctcgatctgtcgccgatcatcacccaccgctttggcattgatgatttccagcagggctttgacgcgatgcgctctggccagtctggcaaagttattctcagctgggattaa

SEQ ID NO: 174147 - DNA, 798 bp, Klebsiella oxytoca
atgcttaaactctctgtatgcttattgacctgtaattcatcccgcttattacgggaggttttaccacctttgcttaaggtggccgatgaatttatcgtcatcgactcaggcagcacggatgccacgctgcagatttgccaacagttcgggctcaccgttcaccatcatccctatacttctcacggcgcgcagatgaactacgcgacctctctggcctgccacgattgggtgctgtgtatggatagcgatgagattcttgacgacgaagtggtggcggctattctggcgctgaaggcgggggacgatcctgacccggcccgcgcctggcgactgccgcgttactggttcgtactgggcgaggaggttcgcaccatttatccggtatcatcgccggatttcccggttcgtttgtttaatcgctccgtcgccaggttcaacgatcggccggtagacgatcaggtcgtgggctttcagcactccagcaagctaccgggcttcgtgcgacatgacaccttttactccctgcatgaggtgtttaataagctcaatagctacactacgcggctggttaaataccagaagatcaggccatctctcgcacgcggagcgatcagcgcgattggcgctttctttaaatggtatctgttcagcggggcctggcgaaagggtaaggtgggcgtggtcaccgggctctatgcgaccttttatagctttctgaaatactttaaagcctggtatgcccatcaggataagccggaatccgcggcggataaacgccgggactccaggacggtttag

SEQ ID NO: 174148 - DNA, 888 bp, Klebsiella oxytoca
atggcgtcgccggtttttgccggcaaactctccattgttatcgacgactttggctatcgtccacaaacggaaaatcaggtgctggcgctgccagcgacgatctccgttgccgtacttcctaatgcgccccacgcccgcgaaatggcgacgaaagcgcataatctcggccacgaggtgctaattcacctgccgatggcgccgatcagtaaacagccgctggaaaaagataccctccgcccggatatgaacagcagcgagatagaacgcattatccgcgaagcctacggtaaggttccgtacgccgtggggctgaataaccatatgggcagcgccatgacgtcgaatctcttcggtatgcagaaagtgatgcaggcgcttgagcgctacaatctctactttctggatagcgtcaccatcggcaatacccaggccatgcgggcggcgcagggcaccggcgttaaagtgattaagcgtaaggttttcctcgacgatacccaaaacgaagcggatattcgctatcagttcaaccgcgccatcgctttggcgcgacgcaacggttccgcaattgctatcggccacccgcacccgacgacggtgcgcgtgctgcagcagatggtgtataacctgccgccggatatcaccctggttcgcccgagcagcctgctcaacgagccgcaggtggacacctcaacgccgaacgctgccccgccgccgaaacagccgccgcgcaacccgttccgtggcgtgaagcagtgcaaatctaagcgccctccggagccgatcaacgccagccgcttctttaccattctgagcgaaagcatcagcaagagtacgctggtgcagtattaccagctgaagtggcagggctgggatacccccaccaactaa

SEQ ID NO: 174149 - DNA, 1272 bp, Klebsiella oxytoca
atgaggggaaaggcgacttattcaactacatggatcgcaacggcagttcgatccgtcctttacgccagcgcgcttagcgctggcgtattgctgtgcgccgcatctgctcacgccgacgatcgcgaccagcttaaatccattcaggccgacatcgccgctaaacagcgggcgattaaacagcagcagcagcagcgtgcttccctggttgcccagcttaaagcgcaggaggaggccatctccgccgccgcgcgcaagctgcgcgaaacccaggaaacgctgaaccagctaaataagcagatcgacgaaatgaacgccgcgctcgcgaagctggagcgtcagcgcgcctcgcaggagcgcaacctttccgcgcagctcgatgccgcgtttcgtcaggggccgcacaccggcatccagatgatcctcagcggcgaagaggggcagcgtaatcagcgtctgcaggcctactttggctatctgaaccaggcgcgtcaggaaaccatcgcccagctcaagcaaactcgcgaagacgtggcggtgcaaaaatccatgctggaagagaaacagagccagcagcaaaccctggtgtacgagcagcgcgcccagcagagcaagctggagcaggcgcgcaacgagcgtaaaaaaaccctcgccagccttgaatcctctattcagcaaggccagcagcagctcagcgaaatgcgggctaacgaatcacgcctgcgcggtcgtatcgcccaggcggcggcggcggccaaagcgcgagcggatcgcgaagcccgcgaagcgcaggacgtacgcaatcgccagcaggaagcctcacgtaaaggcaccacctacaaacctaccgaaagcgaacgctcgctgatgtcccgcaccggtgggcttggttcaccgcgaggccaggcattctggccggttcgcggctcaattctccatcgctatggcgaacagctgcaaggtgaactacgttggaaggggatggttatcgctgcgtctgaaggcaccgaggtcaaagcagttgccgatggtcgggttattcttgccgactggctgcagggctatggcctggtggtggtcgttgaacacggcaaaggcgacatgagtctttacggctataaccaaagcgcgctggtcagcgtcggcactcaggtccgggcgggccagccgatcgctctcgtaggcagcagcggcggtcagggccgtccgtcgctctatttcgaaattcgccgccagggtcaggcggtcaatccacagccgtggttgggaagataa

SEQ ID NO: 174150 - DNA, 1545 bp, Klebsiella oxytoca
atgtcggtttctaaaaaacctatggtactggtgattctggatggctatggctaccgtgaagaccagcaggataacgctatttacagcgccaaaacccctgttatggacgcactgtgggcaaaacgtccgcatactctgattgatgcgtcaggcctggaagtcggtctgccggatcgtcaaatgggtaactccgaagtgggccacgtcaacctcggcgcgggccgcatcgtatatcaggacctgacccgcctggacgttgaaatcaaagaacgcaccttcttcgccaacccggtactgaccggcgcggtggataaagccgttgccgctggcaaagccgtgcatattatgggcctgatgtctccgggcggcgtccacagccacgaagaccacatcatggcgatggtggagctggcagccgaacgcggcgcggataaaatctatttgcacgctttcctcgacggccgcgataccccgccgcgcagcgctgaaaagacgctggcgaaattcgaagataaatttgccgcactcggcaagggccgcgtcgcctcaatcattggccgctactacgccatggatcgcgacaaccgttgggatcgcgttgagcaggcttacgatctgatgactctggcgaaaggcgagttccaggccgataccgccgttgcgggcctgcaggccgcttatgcacgcgatgaaaacgatgaattcgtgaaagcaaccgttattcgcgctgaaggccaggccgatgcggccatggaagacggcgatgcgctgattttcatgaacttccgtgccgaccgcgctcgcgaaatcacccgcgccttcgttaacgccgatttcgacggatttgcccgtaagaaagtggttaacctcgatttcgtcatgctgaccgagtacgccgcggacattaaagtcgcctgtgcttatccgccggcatctctggtgaacaccttcggcgaatggatggcgaaaaatgacaaaacccagctgcgcatctccgaaactgaaaaatacgctcacgtcaccttcttcttcaacggcggcgttgaagagccgttcaaaggcgaagagcgcattctgatcaattcaccgaaggtcgcaacctacgatctgcagccggaaatgagctccgctgagctgaccgaaaaactggttgccgccatcaagggcggtcagttcgacaccatcatctgtaactacccgaacggcgatatggttggccacaccggggtgatggaagccgccgttaaagcggtcgaagcgctggatgactgcatcgaccaggtgagcaaagccgttgaatccgtaggcggacagctgctgatcaccgcagaccacggcaacgccgagcagatgcgcgatccggccactggccaggcgcacaccgcgcacaccaacctgccggttccgctgatttacgttggcgataaaaacgtcaaagcggtcaacggcggcaaactttccgacatcgcgccgaccatgttgacgctgatgggaatggaaatcccgcaagagatgactggcaagccgctgttcatcgtggaataa

SEQ ID NO: 174151 - DNA, 432 bp, Klebsiella oxytoca
atgcaagaaattatgcaattcatcagccgtcaccccgtcctgagcatcgcgtgggtcgcgctgctggcggcggtgctgttcaccacctttaaagggctgatgtcgaaagttaaagtcatcacccgcggtgaagcgacgcgcctgatcaacaaagaagatgccgtagttgtcgacctgcgtcagcgtgacgatttccgcaaaggtcatattgcgggttctattaacctgctgccgagcgatatcaaagcaaataacgtcggtgagttggaaaagcacaaagcacaacccattatagtagtagacggctcaggtatgcaggcgcaagaacccgccagcgcgctgaacaaagccggttttgaaaaggtcttcgtactgaaggaaggcatcgcaggctggagcggcgagaaccttccgctggtacgcggtaaataa

SEQ ID NO: 174152 - DNA, 252 bp, Klebsiella oxytoca
atggccaatattgatatctataccaaagcgacatgtccgttttgcgtgcgtgcgaaagccctgctgaacagcaagggcgtcacgttcaacgagttgcctatcgatggcgatgctgcaaagcgtgaagagatgattcagcgcagcggtaggacgacggttccgcagatttttattgatgcgcagcacattggcggctgtgacgacttgtatgcgcttgattcacgtggtggactcgatcccctcttgcgctaa

SEQ ID NO: 174153 - DNA, 468 bp, Klebsiella oxytoca
atgtcagaacaaaacagcaccgaaatgactttccagattcagcgcatctataccaaagatatttcttttgaagcgccgaacgcgccgcaagttttccagaaagattggcagccggaagttaaacttgatctggatacagcttccagccagctggctgaaggcgtgtatgaagtggtgctgcgtgtcaccgtaaccgcctcgctgggcgaagaaactgcattcctgtgtgaagttcagcagggcggtattttctccatcgaaggcatcgacggtacccagatggcgcactgcctcggcgcatactgcccgaacattctgttcccgtacgcgcgtgagtgcatcaccagcctggtttctcgcggtaccttcccgcaactgaaccttgcgccagtgaacttcgatgcgctgtttatgaactatctgcagcagcaggctggcgaaggtgctgaacaacatcaggatgcctga

SEQ ID NO: 174154 - DNA, 1017 bp, Klebsiella oxytoca
atgaacgcgcttaacgctgcaatgactgtaatcggtgccggctcttacggcaccgctcttgccatcaccctggcaagaaatggccaccacgttgtgctgtggggccatgacccgaaacatattgcgacgctgcagcacgatcgctgcaacgccgcatttcttcctgacgttcctttccccgacacgctgcatctggaaagcgatctggcgaccgcgctggctgccagccgcgatattctggtagtcgtgccgagccacgttttcggcgaagtgctgcggcagattaaaccgctgatgcgctctgacgctcgtctggtctgggcgacaaaaggtctggaagcggaaaccggacgcctgctgcaggacgtggcccgtgaagccctgggcgacgatattccgctggcggtaatttccggtccgacctttgcgaaagagctggcggcaggcctgccgacggcgatatcgctggcgtcgacggatccgcagtttgctgatgatttgcaacgcttgctgcactgcggcaagagcttccgcgtctatatcaacccggattttatcggcgtgcagctcggcggagcggtgaaaaacgttatcgctatcggcgccggcatgtctgacggcatcggctttggcgccaatgcgcgtaccgcgctgattacccgcgggctggtcgaaatgtctcgcctcggggaggcccttggcgccgatccggaaacctttatgggtatggcgggcttaggcgatctggtgctcacctgcaccgataaccagtcgcgtaaccgccgcttcggcatgatgctcggccagggtatggatgtgcaaagcgctcaggagaagattggccaggtggttgaaggctatcgcaataccaaagaggttcgcgttctggcgcagcgtttaggcgtcgaaatgccaataaccgaggaaatttatcaggtattgtattgcggaaaaattgcgcgcgaggcagcattgaccttattaggccgtgcacgcaaggacgagcgcagcaattaa

SEQ ID NO: 174155 - DNA, 822 bp, Klebsiella oxytoca
atgccgtgtgaagaactggatatcgtctggaataacattaaagccgaagcccgggctttagctgactgtgagccgatgctcgccagtttttaccacgccacgctactcaagcacgaaaatctcggcagcgccctgagctatatgctggcgaacaagctggcttctccgattatgcccgccatcgcaatccgagaagtggtggaagaggcctacgccgctgacccggaaatgatcgcttccgctgcctgcgatattcaggcggtgcgaacgcgcgacccggcggtggataaatactcgacccccctgctttacctgaaagggttccacgcgctgcaggcctatcgtatcggccactggctatggaatcaggggcgtcgggcgctggcgatcttcctgcaaaatcaggtttccgtatcgttccaggtggatatccacccggcggcgaagattggtcgcgggatcatgcttgaccacgccaccggtattgtcgtcggcgaaacggcggtgattgaagacgatgtgtcgattctgcaatccgtgaccctcggcggtaccggtaaaactagcggcgatcgtcatccgaaaattcgtgaaggggtgatgattggcgccggggcgaagatccttggcaacatcgaagtcgggcgcggagcaaaaatcggcgcgggttcggtggtgctgcagccggtgccgccgcataccaccgccgcaggcgtaccggcccgtattgtgggcaagccagagagcgataagcccgcaatggatatggatcagcactttaatggcatacaccataccttcgagtacggtgacggtatttga

SEQ ID NO: 174156 - DNA, 474 bp, Klebsiella oxytoca
atgcttaacatcgtcttatttgaaccagaaatcccgccaaataccgggaatatcatccgcctgtgcgctaacaccggcttcaatctgcatattatcgagcctatggggtttgcctgggatgataagcgcctgcgccgcgccggtctggattaccacgagttcgccgccgtccagcgccatcgcgattacgccgcgtttgttgaaagcgcaaagccgcagcgcctgttcgccctgaccaccaaaggcacgccggcgcacagcgcggtgagctatcaggacggcgattatctgatgtttggcccggaaactcgcggactgccgggcagtattcttgatgctctgccgccagaacaaaaaatccgtattccgatgatgccggacagccgcagcatgaacctgtcaaatgcggtgtcggtggtggtctatgaagcctggcgccagctgggatatcccggcgcggtactgcgcagctga

SEQ ID NO: 174157 - DNA, 1224 bp, Klebsiella oxytoca
atgattatttccgccgccagcgactaccgcgccgccgcacagcgtatcctgccaccgttcctgttccactacatcgacggcggcgcttacgccgagcacaccctgcgccgcaacgttgaggatctctccgacgtggccctgcgccagcgcattctgcgcaatatgtcggacctgagcctggaaaccaccttattcaatgagaagctggcgatgccaacggcgcttgcgccggtcgggctgtgcgggatgtacgcgcgccgtggtgaagtgcaggccgccggcgcagcggatgagaaaggcatccccttcaccctctctaccgtttccgtctgcccgatagaagaagttgccccgaccattaaacgtccgatgtggttccagctgtacgttctgcgcgaccgcggctttatgcgcaacgcgctggagcgcgcgaaggcggcgggttgttcaacgctggtctttaccgtcgatatgccgacccccggcgcacgctatcgcgatgctcactccgggatgagcggcccgaacgcggcgatgcgccgctactggcaggcagtgacccatccgcagtgggcatgggacgtcggattaaacggccgcccacatgatttaggcaacatctccgcctacctcggcaagccgaccggcctggaggattacatcggctggctggcgaataacttcgatccctcgatttcttggaaagaccttgagtggatccgtgaattttgggatggcccgatggtgatcaaggggatcctcgatccggaggacgcccgcgacgcggtgcgcttcggcgctgatggcatcgtggtgtctaaccacggcggccgccagcttgatggggtgctctcttccgcccgcgccctgcccgcgattgccgatgcagttaaaggcgacattacgattctcgccgatagcggcatccgcaacggcctcgatgtcgtgcgcatgattgccctcggcgccgatagcgtgctgctgggccgcgcttatctgtatgcgctggccacgcacggcaagcagggtgtcgccaatctgctgaacctgatcgaaaaagagatgaaggtggcgatgacgctgaccgggacgaaaaccatcggcgaaatcagtcgtgaatccctggtgcaaaacgccgatgcgctgcggacttttgatgttattaaggcggggaatgcggcggttacctctaaccctgaaggaaccgtccggcaggcgggttaa

SEQ ID NO: 174158 - DNA, 774 bp, Klebsiella oxytoca
gtgatagtgatgccaaaacgccttgccgacgacgtcgcccgtcgcgtgcgggcgctgattgaagaacaaaagctggaggcgggcatgcgattgcccgccgagcgccagctggcaacgcagctcggcgtatcgcgcaattctctgcgcgaagcgctggcgatgttagtcaacgaaggggtgctgctcagccgtcgcggcggcggcaccttcgtgcgctggcagcacgaagcgtggtcggagcaaaacatcgttcaaccgctgaagacgctgctctccgacgaccccgattacagctttgatatcctcgaagcccgtcatgctattgaagccagcaccgcctggcatgcggcaatgcgggcaaccgatgccgaaaaagagaaaatccgcctctgctttgaagccacccaaagtgaagacccggacctggcctcgcaggccgatgtccgcttccacctggcgatcgccgaagcctcgcacaacgtggtgctcctgcaaaccatgcgcggtttttttgacctattacaatcctcagtcaaggagagccgccagcggatgtatctcgtcccgccggtattcgctcgcctcaccgaacagcacctggcggtcatggaggcgattgtcgccggtgacccggaaggtgccagacaggcgatgatggcccatctgggcttcgttcacgccaccatcaaacgttttgatgaagaccaggcccgccaggcgcgaattacccgcctgcccggtgaccataacgacaattccagggagaacttgtga

SEQ ID NO: 174159 - DNA, 1656 bp, Klebsiella oxytoca
atgaacctctggcaacaaaattacgatccggccggcaacatctggctatcgagtcttatcgcatcgctaccgattctgtttttcttttttgccctgattaagctcaagctgaaagggtacgtcgctgcgacctggaccgtggtcattgcgctctccgtcgccctgctgttctacaagatgccggttgaccacgcgctggcctccgtcatctacggcttcttctacggcctgtggccaatcgcgtggattattatcgccgcggtcttcgtctataaaatttcggtgaaaaccgggcagttcgacattatccgctcatcaatcttatcgattactccggaccagcgtctgcaaatgctgatcgtcggtttctccttcggcgccttccttgaaggggccgccggttttggcgcgccggtcgccatcaccgcagcgctgctggtaggactcggctttaacccgctgtatgcggcgggcctgtgcctgatcgttaataccgcgccggtggcgtttggcgcgatgggcattccgattctggtcgccgggcaggttacgggactcgacagctttgaaattggccagatggtcggccgccagctgccgttcctgaccatcatcgtgctgttctggatcatggcgattatggacggctggcgcggcattaaagagacctggcctgcggtcatggttgccggcggctcctttgctatcgctcagtacctcagctcaaacttcctcggcccggagctgccggacattatctcttcgctggtatcgctggtctgtctgacgctgttcctcaaacgctggcagccggtacgcatctttcgcttcggcgatatgggcgcatcgcaggtcgatatgaacctggcgcgcacgcactacacgccgggacaggtgattcgcgcctggacaccgttcctgtttctgaccgccaccgtgaccctgtggagcgtgcctccgttcaaagcgctcttcgctcccggcggcgcaatgtacgattttgtgattaatatttccgtgccgttcctcgacaagatggtagcgcgcatgccgccggtggttagcgaagccacgccatatgccgcggtctataaatttgactggctctccgccaccggcaccgcgatcctgttcgccgcgctgctttccatcgtctggctgcgcatgaagccaaaagatgcgatttccacctttggcagcacgctgagagagctggcgttgccgatttactccatcggcatggtgctggcgttcgcctttatttccaactattccggtctatcctcaacgctggcgctggcgctggcgcacaccggccatgcatttaccttcttctcgccgttcctcggttggctgggggtattcctgaccggttcagatacctcgtctaacgcgctgtttgccgcgctgcaggccacggcggcccagcagattggcgtctccgatatcctgctggtcgcagcaaataccaccggcggcgtgaccgggaaaatgatctccccgcagtcgatcgccatcgcctgtgcggcggtcggcctggtgggtaaggagtccgatctgttccgctttaccgtcaaacacagcctgattttcacctgtatggtcggcgtcatcaccacgctgcaggcgtatgtcttaacctggatgatcccgtga

SEQ ID NO: 174160 - DNA, 951 bp, Klebsiella oxytoca
atgagccagttagacgaactgaaaaaatacaccacggtggttgccgacaccggcgatatcgaatcgatcaaaaaatttgccccgcaggatgcgactaccaacccttcactggtgctgaaggccgcgcagctcccgcagtatcaggcgctcattgccgacgccatcggcaaggcgcgtcggcagggcggcagcccggaaacgcagctgataaacgcctgcgatcaggtggcggtggatatcggtaccgaggtgctgcgtcatgtgcccgggcgtatttctaccgaagtcgatgcccgttttgcctgggatcgcgggatgtgcgtgtcgaaggcgcgcaagcttattcagatgtatgaaaagaacggcgtcgggccggaacgcatcctcatcaaacttgccgccacctgggaggggattcgcgccgcagaggagctggaacaaagcggtatcaactgtaacctgaccctgctgttctcctttgcccaggcgcgggcctgcgccgaagccggcgtctttttaatctcgccgttcgtagggcgtatttacgactggtatcagaaaaaccaaccgcagtcggagtatcaggtcgacagcgatccgggcgtggtttccgtgcgccagatttatcagtactacaaatcgcacggctacgacaccgtggtgatgggggccagcttccgccgtatcgagcagatccaggcgctggcaggttgcgatcgcctgactatctctccggcgctgcttgatgaactggccgccagtgaagggacgctgagtcgccagctggcgcccggctgcgtgacggaaacccgccccagcccgatgactcaggcggagttcctctggcaacatcatcaggatccgatggcggtggaaaaactggcggaaggtatccgcctgttcgcggtcgatcaggtcaaactggaaaatcagattcagcagatgctgtaa

SEQ ID NO: 174161 - DNA, 459 bp, Klebsiella oxytoca
atgaaaacaatcgctattggtgcggatgatgccgcctatgcttttcgcgacgctatcgtcgcttatctgaatgggcagggaattaaggtcgcggattacagcagcgataaacgccagggcagcatggtctacccggatgttgcccatgcggtggcaatgtcaataaagcagggcgagcacgatcgcggcatcctgatttgcggcaccggtattggaatgagcattgtggcgaataaagtgccggggatacgagccgcccaatgccacgatactttctccgccgagcgggcgcgcaaaagtaataacgcgcagattatcactcttggcgcgcgcgtgattggcccggagctgggcaaaaaaattattcaggcctggcttgaatccgaatatgaaggcggcggctccgcgtcgaaagtggagcgtatcgactattacgaacaccagcacgccagagattaa

SEQ ID NO: 174162 - DNA, 375 bp, Klebsiella oxytoca
atgactgcgccgttgtattcattacttatcacggctgtcgggaaatatgtcaaagactatctacaggagcatcagctgattttattttctgaatccgttcctgacgatattgcgatgtattgcgccgtacatcagagcagtgagctgacagctgaattggtacccgggcagataatgaaaataaatgagactatttatcgagtcacggcggtaggtggttttgcaacggcaaatttaaaacagcttggccatatcactttaaaatttgatggcgctgccaccgctgaattaccggggatggtgcatctcagtggtgacgtcccccagaatattcagcgtggcgaccaaatctttttctatccggaactaaattaa

SEQ ID NO: 174163 - DNA, 1020 bp, Klebsiella oxytoca
atgaacataaatatattagagaagatgaataaggtgccaggcggtttaattattattccgttgctcgtggcgattcttattaatacctttgctccagaagtcctgggcatcggcggcccgacgaccgcattattcaaagtcggttccagcgcaatgatggggatttttctgctgatttgtggtacctcgatcaatatccgccaggccggcctgccgctctataaaggcgcggtgctgttgttgctgaaatgcctcgccggcgcgctggccgtatgggtggccggggcgatgtttggccccaacggtttcctcggtatttcgaccctggcgctgattgcctgtttaaccagctccaacagctcgctatatatcgcgctgtgcagcaactacggcgatgccagcgatgccggggcgatctccgtcttctgcgtcaaggatgggccctttgttaccatgatggtgctgggggtcagcggcctggccaatattcctttcgccgcgctgctatcgatgcttatcccgctgctgattggtatgctgtggggcaaccttgatgagcgtttcaaacagctgtgcgccgccgctcagccgctgattatcattattatgtcgtttgccatcggcgccaattccagcattaacacggtctttaccgccggactgtccggtatcctgcttggcattatctctgcgctaaccggcattgtgttctattttatctacaacctgttcctgaagaagaaaaccgcgctgggcgccgcgctggggacaaccgccgccagctctgcgctgacgccggcaatggtggctcaggccgatccctcgctggcgatgtacgtggatgccgcgaccgcgcagctggcgacggcgagcatcatcaccatgattaccgcgccgatactggtggcctggtttgataagcgtctgaaaaagcgcgcgccgagggttgaaccggtaaaagaagaaaccagtgaagagaaagtgacgttatcttcgcctgccaccaaagggaacaaataa

SEQ ID NO: 174164 - DNA, 1719 bp, Klebsiella oxytoca
atggaaaaacatctgttaattagcaaaggctgtaagggctggggcgggccgctgaccattaatattagccaggcgaaaaagattgcttatatcaccggggggatttgtcccccggtcgttgagcgcctgagcgaactgactggctggccttccgtcgacgtatttaaaaacggcgagccgccggaagaggagatcggcctgatggttatcgactgcggcggcacgctacgctgcggtctctatcccaaacgcggtattccgacgattaacctccatcccaccggtaaaagtggtccgctggcggagtttattcatgaagggatctacgtctccggcgtgacgcccgcctgtattgaaatgatctggccgcagggggaaggcggtaagctggggatcgtggccgacgatctgaccggtgcgaccaccgtcggggtgctgctggcgcgtagcgggttaaaaaccgccgcgttcttcgatactgaatccttcgcccgcaatgaggtggagtatccggcgatggtcgtcagcagcgacagccgtcctttgccgaaagcggaagcccagcagcaggtcagcgccgcggtgaagcagctgcaggcgcgcggcgcgcactactttaccaagcgtattgataccacgctgcgcggcggcatcggctttgaaattgatgccatgctggaacaattgccgctggaaacggttgccgtcgtcgtgccggcgatgccgcagtcgcggcgtattctggttggcggctattcggtaattgactccgtcgcgctttcgcgaaccgatgtcgcacgcgatgtgcgtactccggttaccgaatcctgggtgccgggattgctggcggcgcagacccatcatcaggtcgggcatatcgcgctggcctcggtgatgaaaggcgaggagcaactgcagcgggatctccaggaacagcagcagcgcggcgtgcgggtgatcgtcgtcgatgcgattactgttgacgatgtcgatgcgattgccggggcggtggtggcgctgaactggaacgtgctggcagtcgacccggggccttttaccgagcggcttgcggtccgtcgtggcctgatgcgggaagcgcgcagcagcgcgacagcgtcgtcaggggcggaaaacccgcgcggttcgattctggtggttgccggtagcgccacgccggtgaccaaaaagcagcttcagcatctgatcgctaatgatgaaagagtgtgtcacatccctgttgatgccgaactgctggttgacaggaaaaacgccgctgaaatcgaagtgaatcgcgtggtgcagcatgcccggcagtgcgtgccggcgcagcagaacgctatcttcgtttttgaatccgcgttaaccgggcggctgctgaatcttcaggaagaagagcagcgctttgggctggcccacggacaggctgcggaaaatattaaccagggactggggaatattgttcgtgaagtgcttaactgcgcagccggagaaattaaaggcctgtatatgaccggcggcgatacgatggtaaatgttcttaaagagcttggcgcgaccggcattgaaatgatcgactacgtgataccgcaaaccgatatggtgcgtattatcggcggcgattatgcgggattgatttgcgtcggcaaaggcggtttaaccggaccagaagatattattagcacgattgttgaaagaatttataaagaagcgcagctataa

SEQ ID NO: 174165 - DNA, 1008 bp, Klebsiella oxytoca
atgtcacaagagaaaaagccagttgtcgcacttaccattggcgaccctgccgggattggtccggagatttcagtcgcgacgatgatggagaaaagcgtctacgacgagtgcaaaccttttttgattggctcagcgccgattatcgccagagcaatgaaaatcatgggctgtgattttccgattaacaaaattagccatccgcaggaagctcgcttcaactggggtacggtggacgtgctggaaaccggtgagtatgactgcgagagcattgaatggggcaaagtgcagaagctggcggggcagatgtcgctggactatgtgctgaaatctatcgaactggggaaagccggcctgatcgatgtggtctctaccgcgccgattcataaagaagcaatcaagctggcggggtgtaaactgccgggtcataccgagatctatcaggttgaaacgcaatccgattatggcctgaccatgttccacgttcataacctgcgggtcttcttcgtgagccgtcatatggcgcttaaagacgcctgcgattacgccaataaagagcgcgttctggcctgcgtgcagcagatccaccatgagtttaccgcgctgaatatcaaaaatccgcgcattgcggtagccgcgctgaatccgcatggttcagacaacggcctgtttggccacgaagaagccgataacctcatcccggcagtcaaagcggcgcaggaaatggggattaacgccatcggcccggtgccggcagattccgtcttccatctgggtaaacaggggcgctatgacgccatcctctcgctttatcacgatcaggggcatatcgcctgtaaaaccctcgattttgagcgttccgtaaccattacctttggcctgccgtttatgcgtagctcggtagaccacggcacggcgtttgatattgccggcaccggtaaagcgggcaccgtcagtatgctggagtccacgatggccgcggtgagctactggaaaatgaaaaaccactaa

SEQ ID NO: 174166 - DNA, 795 bp, Klebsiella oxytoca
atggaacaaatctggttaggaaccagctggaaaatgaataaaccgttatcgcaagccatggccttttgtgaaacgctggcgcagcggttaccgcaggtgaggcatccgaaaatccagccgtttattattccccctttcaccgccatttatcccgtcagccagtatctacagcagcatcagatcccctgcctgaccggcgcgcagaatatgcatgaagcggaaaacggcgcctggaccggtgaaatttccgccgccatgctggctgaaaccggcgcctccctggtcgagcttggtcactccgagcgtcgcggcgcgttcaatgaatccgacgccgccattaaccaaaaagtgcatcgcgccctgcgtcacgggcttcgacctctgatctgtatcggcgacagcgccgatgaaaaacgctggcaggtctcacgggaaacggtagtgaggcagatgaaaatcgcgctttctggcctgaatgaacagcaggttttacacactctggttgcctatgagcccatatgggctatcggcgaacacggcacgccggcgacgccggagcaggccgcagagatccaccgggcgctgcgtcaggcgttatgcgagaccttcggcgaagaaatcggacggcgcattcccctgctgtacggcggtagcgtcaatcggcaaaatgccgtagaactgcttcagcaggatgacattaacggactgtttattggccgcgcggcatgggatgccaacggctattgcgacattgttcaacgcgttacagaggaatttattcttcaggcgcagtag

SEQ ID NO: 174167 - DNA, 963 bp, Klebsiella oxytoca
atgactgaacaagactcagattatgcgctgctgacagaaattgccgtggcctattacgatcaggagcaaacccaggaagagattgcaaaacgctttgggatctcacgcattaaggtcggtcggttgctgaaaaaagctcgccacgaagggattgtcgagatcagcgtgaaataccacccggtcttcagctcccagattgagcagcagtttatctcccatttcggcatcaagcgcgcgcttatcgccctggaccatcacgacgaggatgaacagcgccagcaggtcgcggcgctggtcagcaactatctcgccgggatcctcaaaagcgatatgaccgtgaccgtcgggcagggtcgcaacgtcgccgccgtggccaaccacgtggggatctttccagagcgcaactgtcgctttatttgcggtatcggcggcaccaagcgcgacaaccagctgatcgatgccgatcacatcagtcgaaacctggcgcgtaaattcaacggttttagcgaaacgctgtacgccccggcctatgtcgaaacgccggaactgcgctcagcgtttatgcaaaaccggctgattaaagccacgctcgaacaggcaagcaaggcggatgtagccatcattggccttggcgatatgaacgaaaatagctttatggtgcagctcggctggttctccccgcaggaaattgcgactgcgcgccaggaacagggcgtagtgggcgatctcgctggctatagttttttcaatattcagggtaaaccggttgatacggtgatgaacgatcgggttatcggcctgagccttgaacagcttcgcgccatcccgtgcgtgatcgccattgcttcggaaagcaccaaggcaacggcgatcctcggcgcgctgcgcaccggcgtaattgatgtgctggccaccagcgcatctaatgcccgggcggtgatcaatatgcagaaggcgctatga

SEQ ID NO: 174168 - DNA, 312 bp, Klebsiella oxytoca
atggatagcccattagcactatctgctgcgatatttttggccgcagtgggggttggcctgtggagtcagtatggcctgcctcgtctttctgatagcagaaatattctgttcatcctctctcttattctcggcgtcgtatccgcggcttcctgcctgtttcatctgctgtatctgctgattgagggccagagcgcgcagggcggttcggcgtggttcgggccgcttatcgtgctgggcgcgttgtggaagccgctgaagtatattgcgggcaagcttgatgctgtcttaacgaaaaatcagggcaagaaataa

SEQ ID NO: 174169 - DNA, 831 bp, Klebsiella oxytoca
atgcagtcgcgccgcttacatcgattaagccgatttcgccgcaataagcgtcggttacgagaccgtctgcgtcagcggattttcttcggcgaagataaggagacacctgaaacgatggaaaaaccaagagtcgtggtgctaaccggcgcgggtatttcggcggagtcgggaattaaaaccttccgcgccgccgacggcctgtgggaggagcatcgggtagaagacgtcgcaacgccggaagggttcgcccgcgacccggcgctggtgcaggcgttttacaacgatcgccgtcgtcagctgcaaagcccggacattgcgcccaatgcggcgcatcaggcgctggcgcggctggaagagagactgggtgaccattttctactggtgacccagaatatcgataatctgcacgagcgcgcgggcaaccgtcgggtgatccatatgcacggcgagctgctgaaggtgcgctgttcgtggagcggccaggtggtggcgtggaccggtgatgtgacgacggaagataagtgtcactgctgccagtttcccgcgccgctgcgcccgcacgtggtgtggttcggcgagatgccgctggatatggatgaaatctacctggcgctggcggaggcggatatctttatcgccatcggtacttccgggcacgtttatccggcggcagggtttgtccatgaagcgcggctgcagggcgcccacacggttgagctaaatctcgaaccaagccaggtaggcagcgaatttgccgagaaacactatggcccggcaagcgaagaagtgccgcgctttgtggaaaagctgctgaaacagctggccgggtag

SEQ ID NO: 174170 - DNA, 912 bp, Klebsiella oxytoca
atgtactatggatttgacattggcggcagcaaaatagcgttgggcgtatttgataacgcgcggcggctgcagtgggaaaaacgcgtcgccacgccaaaagagagctatgaagattttttgcaagcggtagaagcgctggtggcggaggccgaccagcgcttcggctgtcagggttcggtgggcatcggtattcccggcatgccggagacggaagacggtacgctatatgccgccaacgtccctgccgccagcggcagacggctgcgggccgatctgagcgagcggctggggcgcgatgtgcggcttgataacgatgccaactgttttgccctctccgaagcgtgggacgacgaatttacccaatacccgctggtgatggggatgatcctcggcaccggcgttggcggcgggctggtgcttaacggtaaatcgattaccgggcatcgctatataaccggcgaattcggccatatccgcctgccggtggatgcgctggaagtcgtagggcgcgatttcccgcttacgcgctgcggctgcggccaactgggctgcattgaaaactacctttccggacgcggctttgcctggctgtaccaccatttttaccaacaatccttaacctcacccgagatcgtcgcgctctggcagcagggcgacgcgaaggcgcgcgagcacgttgagcgctatctcgatctgctggcggtgtgcctgggcaatattttaacgattgtcgacccggatctgctggtgttgggcgggggattgtctaactttacagcaataaccgaagggctggcgcagcgcctgccgcgacatctgctccccgttgccagcgtgccgcgcatcgaacgcgcgcgtcatggcgatgcgggaggtatgcgcggtgcggccttccttcatctgactcattaa

SEQ ID NO: 174171 - DNA, 1245 bp, Klebsiella oxytoca
atggcttctccgttatcgttattaattgctctgcgctttagccgtggacggcggcgcggtgggatggtgtcgctgatttcggttatctcgaccatcggtatcgcgctgggcgtggcggtgttgatcgttggcctgagcgcgatgaacggcttcgaacgcgagctcaataaccgcattctggcggtggtcccgcacggtgaaattgagccggtaaaccagccgtggaacaactggaacgaggcgctggcgaaggttgagaaggtcaaaggcatcgttgccgcggcgccttatattaacttcaccgggttggtggagagcggcagcaacatgcgcgcaattcaggtgaaaggcgtcgacccgcagcaggaaagtcgtctcagttcgttacccaactttgtgcagaacaatgcgtgggccagctttaaagccggcgagcagcaggtgatcctcggtaagggcgttgccgatgcgctgcacgtcaagcagggcgactgggtgtcgatcatgatccctaactccgatgccgagcaccagctgctgcagccaaagcgcgtcaggcttcatgttaccggcattttgcagctcagcggccagctcgatcatagttttgccatgattcccatgcaggatgcgcagcagtacctggatatgggcagcagcgtgacggggatcgctatcaaagtgaccgacgtgtttcatgccaatacgctggtacgcgatgcgggcgaagtgaccaacagctacgtttacatcaaaagctggatcggtacctacggctatatgtaccgggatattcagatgattcgcgccattatgtatctggcgatggtgctggtgattggcgtggcctgctttaatatcgtctcgaccctggtgatggcggtgaaagataaaagcggcgatattgcggtgctgcgcacgcttggcgcaaaagacgggctgatccgcgcgattttcgtatggtatggtttacttgccggttcggtaggtagcctgattggcgtggctattggcattatctgcgcatttaagctgaccgcaatcattaacggtattgaggatctgatcgggcataaattcctctccggcgacatctattttattgacttcctgccgtctgaactgcactggctggacgtcgtttacgtgctggtgacggcactgttgctgagtttgctggccagctggtatcccgcccgccgcgccagccgcattgacccggcgagggtgctgagtggccagtaa

SEQ ID NO: 174172 - DNA, 702 bp, Klebsiella oxytoca
atgaataagatcctgctgcaatgcgacaacctgtgcaaacgctatcaggaaggcaccgtgcaaaccgacgtgttgcacgatgtcagcttcagcattgaagagggcgagatgatggcgattgtcggtacctccggttccggcaaaagtacgctgctgcatctgctgggcgggctggacacgccaacctccggtgacgttatcttttccggccagccaatgagccggctctccgccgccgcccgcgccgatctgcgcaatcgcgaactgggctttatctatcagtttcaccatctgctgccggatttcaccgccctggaaaacgtagcgatgccgctgctgattggtaaacagaaggcggcggatatcgagcgtcaggcgaaagcgatgctgcgctccgtcgggcttgagcaccgtagcgatcaccgtccgtcggagctctccggcggcgagcgtcagcgcgtcgcgattgcccgcgcgctggttaataaaccgcgtctggtgctggcggacgaacccaccggtaaccttgacgcccgcaacgccgacagcatttttcagctgcttggcgagctgaacatcgcccagcgtaccgccttcctggtggtgacgcacgacctccagctggcaaaacgcatgagccgccagctggagatgcgcgacgggcgcctgacagccgaactctccctgatgggggctgagtaa

SEQ ID NO: 174173 - DNA, 1200 bp, Klebsiella oxytoca
atgtatcaacctgccgcactttttatcggccttcgctatatgcgcgggcgcgcagccgaccgcttcggtcgtttcgtctcctggctttccactattggcattacgcttggcgtgatggcgctggtgaccgttctttcggtgatgaacggctttgagcgcgagctgcaaaacaacatcctggggctgatgccgcaggccattctcagcgcacagcaagggtctataaacccgcaaaaactgccggaaagcgcagccagactacagggcgtcacccgcgtggcgccgctgaccaccggcgatgtggtgctgcaaagcgcccgcagcgtagcggttggcgtgatgctcggcatcgacccggcgcaaaaagatccattgaccccttatctggttaacgtgaagcagagcgatctgcaggccggaaaatataacgtcatcctgggtgagcagctggcagggcagttgggggtcaaccgcggcgatcggatccgcgtgatggtgccttccgccagccagtttaccccgatggggcggcttcccagccagcgcctgttcaacgtgatcggtacctttgccgccagcagcgaagtcgatggctatcagatgttgaccaatatcgacgatgcttctcgcctgatgcgttacccccaggggaacattaccggctggcgtctgtggctgagtcagcctctgcaggtcgacacgctcagccagcagaaactgccggaaggcaccaaatggcaggactggcgagagcgaaaaggcgaactgttccaggccgtgcggatggaaaaaaatatgatgggcctgctgctgagcctgattatcgccgtggccgcctttaacatcattacttctctgggcatgatggtgatggaaaaacagggtgaagtggcgatcctgcagaccctcggcctgacgccgcggcagatcatgctggtctttatggtccagggggccagcgccgggatcgtcggtgcgctgctcggcgccgggctgggcgcgctgcttgccagccagctcaataatttaatgccgattatcggcgcgttcctcgacggcgccgcgctgccggtggctattgagccgctgcaggtcatcgtcattgccctcgtggccatggcgctggcattactctctacgttgtatccttcatggcgcgctgccgccactcaacccgctgaggctttacgttatgaataa

SEQ ID NO: 174174 - DNA, 3567 bp, Klebsiella oxytoca
atgacctttgcgatacgggttggcgaattctggtcgatcgcggataatcagactattgaatatcagcgagttgccctccatatcggcagagcgaatcctcaagagatcatgataccgtctatgcctgaacaataccgatactctctgccggttaaagccggcgatcagcgccagcttggcgaactgaccggcgcggcctgcgccactctggtggctgaaatggccgagcgccacggcggcccggtggtactgatagcccccgatatgcagaacgccctgcgtctgaatgatgaaatcaggcagtttaccgacagcatggtagcaggcctggcggactgggaaacgctcccctacgatagcttctctccgcaccaggatattatctcttcacgtctcgctaccctgtaccagctcccgaccatggaacgcggcgtgctgatcgtcccggtcagcactctcatgcagcgcgtctgtccgcataatttcctccacggccacgcgctggtgatgaaaaaaggccagcggctgtcgcgggatgcgctgcgctcgcagctggatagcgccggctatcgtcacgtcgatcaggtcatggagcacggcgagtacgccacgcgcggcgcattgcttgatctgttcccgatgggcagcgagcagccctaccgtctcgatttttttgatgatgagatcgatagcctgcgtctgttcgacgtcgacagccagcgaacgctggaggaagtcgccagtatcaacctgcttccggcgcacgaatttccgaccgaccaggccgctatcgagctgtttcgcagccagtggcgcgaccgcttcgaggttaagcgcgacgccgagcatgtttatcagcaggtcagtaaaggcacgctgcctgcggggatcgaatactggcagcctctgttctttaacgaaccgctgccgccgctgttcagctatttcccggcgaaaacgctgatcgtcaacaccggcgatctcgaagccagcgccgaacgcttccagaatgaaacccgcgctcgctttgaaaatcgcggcgttgatccgatgcgtccgcttttgccgccggagcagctgtggttgcgcagcgatgaactgttcagcgagctgaaaaaatggccgcgcgtgcagctcaaaaccgaacgcctggcggagaaggccgctaataccaatctcggctatcaaaaattacccgagctggcgattcaggcgcagaacaaagcgccgctggataacctgcgccgattcctcgaatcctttagcgggccggtgattttctcggttgagagcgagggacgccgcgaagcactcggtgaaatgctggcccgcatcaagatcgcgccaaagcatattttgcgtcttgaagaggcgacgggtaacggccgctatttgatgatcggcgccgccgagcatggctttattgatagccagcgcaacctggcgctgatttgcgaaagcgacctgctgggcgagcgcgttgcccgccgtcgtcaggattcacgccgcaccatcaatccggatacgttgattcgtaacctggcggagctgcatatcggtcagccggtggtgcatctggagcatggagttgggcgctatgccggaatgacgacccttgaagcgggcggcattaatggcgaatacctgatgctgacctacgccaacgacgccaaactgtacgtcccggtgtcctcactgcatctgattagccgctatgcgggcggggcggaagagaatgcgccgctgcataaactgggcggcgacgtctgggcgcgagcgcggcagaaagcggccgagaaagtgcgcgacgtggccgccgagctgctggatatctatgcccagcgcgcggcgaaatccggctatgcgtttaaacatgataaacagcagtatcagctattttgcgacagcttcccgttcgagaccacgcccgaccaggcgcaggctattaacgccgtcctgagcgatatgtgccagcctctggcgatggaccgtctggtgtgcggcgatgttggcttcggcaaaacggaagtggcgatgcgcgccgctttcctggcggtcgaaaaccataagcaggtggcggtgctggtgccaaccaccctgctcgcccagcagcacttcgataacttccgcgatcgctttgctaactggccggtgcgtattgagatgctttcgcgctttcgcagcgccaaagagcaggcgcagatccttgagcaagtcgcggaaggaaaaatcgatattcttatcggcacccataaactgctgcagccggacgttaagctgcgcgatctcggtctcctgattgttgatgaagagcaccgctttggcgtgcgtcacaaagagcgcatcaaggcaatgcgcgccgacgtcgatatcctgaccctgaccgcgacgcctattccgcgcacgctgaatatggcgatgagcggtatgcgcgatctttcgatcatcgccacgccgcccgcccgccgtctggcggtcaaaaccttcgtgcgcgaatatgacgcgctggtggtacgcgaggcgatcctgcgtgaggtgctgcgcggcggccaggtttactacctctataatgacgtggaaaacatccagaaagccgccgagaggctggcggagctggtgccggaagcgcgcattaccatcggtcatggacagatgcgcgagcgcgagctcgagcgggtgatgaacgatttccatcaccagcgttttaacgtgctggtctgtaccaccattatcgaaaccgggatcgacatacccacggcgaacaccattattattgagcgtgccgatcacttcggcctggctcagctgcatcagctacgcggacgcgttggccggtcgcaccatcaggcctatgcctggctgctgacgccgcatccgaaagcgatgacccccgatgcgcaaaaacgccttgaggctattgcatcgctggaagatctcggcgctggctttgcgctggcgacccatgacctcgaaattcgcggcgcgggcgagctgctgggcgaagatcagagcggttctatggaaaccatcggcttctccctctatatggagctactggaaaacgccgttgacgcgctgaaggccgggcgcgagccctcgctggaagatctcaccagccagcaaaccgaagttgagctacggatgccgtcgctgctgccagacgactttatcccggatgtgaatactcgcctgtcgttctacaaacgcattgccagcgcgaagagtgagaatgagctggaggagatcaaagtcgaacttatcgatcgctttggcctgctgccggatccggcccgcaatctgctcgatatcgcccggctgcgccagcaggcgcagaagctggggatccgcaagcttgagagcaacgaaaaaggcggcaccattgagtttaacgagaagaataacgttaatccgatgtggctgattggcctgctgcagaagcagccgcagcactatcgactggatggcccgacgcgcctcaaatttacgcaggacctcgccgagcgtaaaacgcggatggactgggtgcgccagtttatgcttcagctggaagagaacgccaccgcttaa

SEQ ID NO: 174175 - DNA, 960 bp, Klebsiella oxytoca
atgaagagcttttcgcgactttctttctggctggggatgatggctatcgccgccgcgctggcgctgcccgctcgcgccaatacctggcccctgccgcctccgggcagccgtctggtcgggcagaaccagttccacgtggtcgagaataatggcggctcgctggaagcgatcgctaagaagtacaacgtcggttttctggccctgcttcaggcgaaccccggcgtggatccttacgttccgcgagccggtagcgtactgaccatcccgctgcaaacgctgttgcccgacgcgacgcgggaagggttagtccttaacctggccgaacttcgtctctattactatccgccgggcaaaaatgaagtgaccgtgtaccctatcggcatcggccagctcggcggtgataccatcaccccaacgatggtcaccaccgtatccgacaaacgcgccaacccaacctggacgcctacggccaatattcgcgcccgctataaggcgatgggcattgacctgcctgccgttatgcccgccgggccggataatccgatgggccaccacgccattcgtctggcagcgtacggcggcgtctacctgctacacggcaccaacgccgatttcggtatcggcatgcgcgtaagctccggctgtattcgtctgcgcgatgatgatatcaaagcgttgtacaatgaaattagcccgggcacccgagtgacgataatcaatacgcccattaaggtatccgttgagccgaacggtacccgtctggtagaagtgcaccagccgctgtcaaagcatattgacgacgatccgcagaccctgccgattacgctcactgacagcatgcaggctttcaaacaggcgcagttgaccgataccgaagtgatggaacgtgcaatgatgctgcgctccggtatgccggttgatgtgacccgtcacccccgggccagcgaacagtcgctatag

SEQ ID NO: 174176 - DNA, 258 bp, Klebsiella oxytoca
atgaaaaatgttaaaacattggccatcgccgctgttctcagctcgctctctttcgccagctttgccgctgttgaagttcaatccactccggcaggccagcataaaatcggtaccgtttccgcctctgctggcaccaacctgggttctctggaagatcagctggcgcaaaaagcggaagagatgggtgcaacctcttaccgtatcacttcagtaaccggtccaaatacccttcacggaaccgcggttatctataaataa

SEQ ID NO: 174177 - DNA, 636 bp, Klebsiella oxytoca
atgacaactgacgttcaaagttgcacgaaaaaaagccgtggccgacctaaagtgttcgacagggaagcggcgctggataaggccatgacactcttctggcagcacggctatgaagccacctctctcgccgatctggtcgaagcgacgggcgcaaaagcgccaacgctttatgccgaattcgtgaataaagaggggttgtttcgggcggtgctggatcgctacatctcgcgttttgccgccaggcatgaggcgcttttgtttgacgacgagaaaaccgtcgatcgggccttgcgcgattatttcaccgccgtcgcgacctgcttcaccagcaaagagacgccagcaggctgttttatgatcaatacctctgcggcgctggcggcctcctcaaccgatatcgccaataccgtgaagtcgcggcacgcgatgcaggaacagacgctcactcattttctccagcagcggcagctgcgcggcgaactgccgccagacggcgatgttcatcagctggcgcagttcctgaactgtatactgcaggggatgtccatcagcgcccgcgaaggcgccgatttcactaaaatcatgcaaattgccgaaaccacgctgcggttgtggccccaggttcttcagcgctaa

SEQ ID NO: 174178 - DNA, 2178 bp, Klebsiella oxytoca
atgaacaagcgtctctgggtactcaacccactgctgctggcaaccgccctgcccgcctgggccgctgatgacaatatgatcgtcagcgctaaccgaacgcatcgcaccgtcgctgaaatggcgcagaccacctgggtcattgaaggccaggagattgaacagcaggtacagggcggtaaagaatttaaagatgtgcttgcgcagctgatccctggcatcgacgtcagcagccagggacgcaccaactacggcatgaacatgcgcggccgcgcgatcgtcgtcctgatcgatggcgttcgccttaactcctcccgtaccgacagtcgccagctggattcaatcgatccgtttaacattgaacacattgaggtgatctccggcgccacctcgctctacggcggcggcagtaccggtggtcttatcaatatcgtcaccaaaaagggacaacaagagcgtcaggtcgatctggaactgggaggcaaatccggctttgctaatagcaacgatcgcgatgaacgcgtggcggcagcggtcagcggcggtaccgaccacgcttccggtcgtttgtcggtcgcttatcagcgcttcggcggctggtatgacggtaaccacgatgcgctaatcctggataatacccagaccggcctgcagcattccgatcgcctcgacgtcatggggacgggaaccattgaaattgacgataaccgtcagctgcagctggttacgcagtattataaaagccagggcgacgattatggcctgtacctggggaaaaatatgtcggcggtgaccggcgacggcaaggcctttaccaccgatggtctgaactcggaccgcgtacccggcaccgagcgtcacctcattagcctgcagtattccgatgccgatttccttggccagaacctcgtcagtcaggtttattatcgcgatgaatccttgtccttttatcccttccctacgctgagcaaaggccaggttagcagcttctcatcctcaaaacaggataccgatcaatacggggcgaaagtcacccttaacagccagccgctggacggattggacctgacctgggggctggatgcggaccacgaaacgttcaacgccaatcagatgttcttcgatctgaatcgatcaatgtcttccgggggcctgaataaccaggcaatctataccactggccgttatcccggctacagcattaccaacctggcgccgttcctgcagtccagctacgatctgaacgatattttcaccctcagcggcggcgtacgttaccagtggacggaaaaccgggtcgatgactttgttggctatgcccagcagcaggatgtcgccggcggtaaggtcagctcggcggatgccattccgggcggaaaaaccgattacgataacttcctgtttaacgccgggatcgttgctcatctcaccgaccgccagcaaacctggtttaacttctctcagggcgttgagctaccggacccggggaaatactacggcatcggcaagtacggcgcggcggtcaacggccatctcccgcttctctccagcgttaacgtcggcgactcgccgctgcaggggatcaaagtcaactcttacgaactgggctggcgctataccggtgataacctgcgcacccagctggcggcatactattcgacctccgataagacgattgtcgttaaccgtaccgacatgaccatcgacgtgcagtccgataaacgccgtatttacggccttgaaggagccgtagattacttcttcccgaatagcgactggagcgccggagctaactttaacctgctgaaatctcaggtgaagagtgacggtagctggcagaagtgggacgtgacgctcgcctcgccgtcaaaagccaccgcctgggttggctgggcgcccgaaccgtggtcgctgcgggtacagagccaacaggtattcgatctcagcgatgccagcggcaataagcttgatggttataataccgtggactttatcggcagctacgcgctacctcttggcaaactgaccttcagtatcgagaacctgcttaatgaagattatgtcaccgtctggggccagcgcgcgccgctgctctacagcccaacctacggcagcagctctctgtacgaatataaaggtcgcggccgtacctttggcctgaactacgcactgagcttctga

SEQ ID NO: 174179 - DNA, 540 bp, Klebsiella oxytoca
gtgaataaatctatgttggcgggtatagggattggcgtggctgccgcgctgggcgttgcagccgttgccggtcttaacgtgttagatcgcggaccgcagtatgcgcaggtggtgtccagtacgccgataaaagagagcattaaaaccccgcgtaaagagtgccgaaacgtcaccgtcactcatcgtcgcccggtgcaggatgaaaaccgtattgccggttcagtcttaggcgcagtggccggcggggtgattggtcatcagttcggcggcggccgcggccgcgacgttgccaccgtcgtgggcgcgctgggcggcggctatgctggtaaccagattcagggctcaatgcaggaaggggacacttacacaaccacgcagcagcgctgtaaaacggtgtatgacaaatcggaaaaaatgctcggctatgacgtcacttacaaaatcggcgaccagcagggcaaaatccgtatggatcgcgaccccggcgcgcaaatcccgctggacagcaatggtcaacttattctgactaacaaagcgtaa

SEQ ID NO: 174180 - DNA, 1305 bp, Klebsiella oxytoca
gtgactacaccattgaaaaaaatagtgattgtgggtggtggtgccggtgggctggagctggctacccagctgggtaaaaagctgggccgcaataagaaagccaaaattacgctggtcgatcgtaaccacagccacctgtggaaaccgctgctacatgaagtagcgaccggttcacttgatgaaggtgtagacgcgctgagctacctggcccacgcccgtaaccacggtttccagttccagctggggtcagtggtagatattaaccgcgagaccaaaacgatcgcccttgctgaactgcgtaacgaaaagggtgagctgctggtacctgaacgtaagctgccttacgacacgctggtgatggcgctgggaagtacctctaacgatttcaatacgccaggggttaaagaaaactgcattttcctcgacaacccgcaccaggcgcgtcgtttccatcaggaaatgctggatctgttcctcaagtactcggcgaatcttggggcggacggtaaggtgaatatcgccatcgtaggcggcggcgcaaccggcgttgagctgtcggccgagctgcataacgcggtgaagcagctgcacagctacggctataaaggtctgactaacgaagctctgaacgtgacgctggttgaagccggcgagcgtattctgccggcactgccgccacgtatctccggcgcggcgcacaacgagctgaccaagctgggcgttcgcgttttgaccaaaaccatggtcaccagcgccgatgctaacggtctgcacaccaaagaaggcgaatttattaacgcggatctgatggtctgggcggccggcattaaagcgccggacttcatgaaagagattggcggcctggaaaccaaccgcattaaccagctggtggttgagccgacgctgcaaaccactcgcgacgaggatatctacgccatcggcgactgcgcctcctgcgcccgtcctgaaggcggttttgtcccaccgcgcgctcaggctgcgcaccagatggcgacctgcgctctgcacaacattctggcgcagatgaaaggtaaaccccttaaagcctatacctataaggatcacggttcgctggtgtcgctctccaactattccaccgtgggcagcctgatgggcaacctgatgcgcggttcaatgatgattgaagggcgcattgcgcgtttcgtctatatctctctgtaccgtatgcaccagattgcgctgcacggttacttcaaaaccggcctgatgatgctggtagggcgtatcaaccgtattattcgcccgcgtctgaagctgcattaa

SEQ ID NO: 174181 - DNA, 543 bp, Klebsiella oxytoca
atgattatctatttacatggttttgactcaaacagccccggtaaccatgagaaggtgctacagcttcagtttattgaccccgatgtccggttgattagctacagcacgcggcatcctaaacatgatatgcagcatttgttaaaagaagtcgataaaatgctgcagctaagcgccgacgatcgacccctcatttgcggcgtgggtctcggtggtttctgggcggagagaattggctttctttgcgatattcgccaggccgttttcaaccccaacctgtttcctgatgaaaacatggaaggcaagattgaccggccggaagagtatgctgatatcgccaccaagtgcgtgaataatttccgtgaaaaaaaccgcgaccgctgcctggtggtgctgtcacgacaggatgaagcgctggatagccagcgttctgcggacctgctgcaccactactatgagatcatctgggatgaagaacagacccacaagtttaaaaatatctccccgcatctccagcgaataaaagccttcaaaaccctcggctga

SEQ ID NO: 174182 - DNA, 1029 bp, Klebsiella oxytoca
gtggctgtgggcccggtaatgttggatgtcgaaggttttgaactggatgcggaagagcgtgagattctggcgcatcctttggttggcgggctgatcctgtttacccgcaactatcacgatccggcgcagctgcgtgagctggttcgccagatccgcgaggcttcgcgcaaccatctggtggtggcggtcgatcaagaaggcggtcgcgtgcagcgtttccgcgagggctttacccgtcttcctgcagcgcaatccttcgccgccctgctaggcatggaagagggcggccggctggccgcagaagccggttggctgatggccagcgaaatgatcgctatggatattgatatcagctttgcgccggtgctggatgtcggacatatcagcgccgctattggcgagcgctcttatcatcaggaccccgacaaggcgctggcgatagctcgccatttcatcgatggcatgcacggcgcgggtatgaaaaccaccggcaagcacttcccggggcatggggcggtgacggcagactctcacaaagagacgccgcgcgatccgcgtgcggaagcggaaattcgcgcgaaagatatggccgtgttccgcacgctgatcggcgagcagcgtctggatgctattatgcccgcccacgttatttacagcgacgttgacccccgtcccgccagcggctccgcgcactggctgaaaacggtcctgcgcggcgagctgggatttgacggcgtaatattctctgacgatctgtcaatggaaggcgcggcgattatgggcagctatgccgaacgcggccaggcgtccctggatgcgggttgcgatatgatccttgtctgcaataatcgtaagggtgcggtcagcgtgctggataacctgtcgccgatcaaagcagagcgtgttacgaaattgtatcataaaggttccattagccgtcaggcgttaagggattccgcccgctggaagacaataagcgcgcagctggagcagcttcacgcgcgctggcaagaggcgaagtccgcgtaa

SEQ ID NO: 174183 - DNA, 819 bp, Klebsiella oxytoca
gtgctgttcagcaacaataagctcacgcgcgacgaagtgctgtcgcgctttttcccccactatacgcctgtcgccgcgctgtccgaaaccgggctgagcggcggcagctgtattctcagcgatggccggcgaaagcgggtgctgcgccagccgcacgacccgcatgcgccgtcctgcgacttccgccgccagtaccgtgtgctttcccgccttcccaataccttagcgcctgcgccggttttttattctcccgcctggatggtggtggaatattgctctggcgacgtggtcaacgcattaccggagtgtccggcgctcgcagggttgctgtatcatctgcaccggcagccacgctttggctggcgtatcgcgctgcggccgctgcttgagcgttactggcagcagtgcagtcctgcgcgccgtacaccgctgtggctacggtggcataagcggctgcttcgccggggcgaaccgcagccgttacgtctggcgcccttacatatggatgtccatgcgggcaacattgttcgcggcgaggcgggactgcggctgattgactgggaatatgcgggcgatggcgatatcgcgctggaactggcggcggtgtggatcgaccccgttgcgcatcgccagcttaccgcagagtatgcgcgacaggcgcacattgatgagcttcagctctggcggcaaattcagcgctggcgcccttgggtgcggctgctgatggcgggctggtatgaacgacgctggcagcaaaccggcgaccggcagtttatcacgctggccgatgagatatggcgtcagttagacaaaaaataa

SEQ ID NO: 174184 - DNA, 636 bp, Klebsiella oxytoca
atgattaaactatgtcgctatgcattagttaccgcactggcgatattccttgccggatgcgtgggtcaacgtcaggaacccgctcccgttgaggaagcgcagccgaagccgcagcagcctgttcagccgcagccgactgtgccgactattcccgtgataccgacccagccgggtccgattgaacacggcgagcagcctgcgcagccggcgccgcgcgtgcgtcattttgactggcactccgcggtgcagccgatgattggtcagatgctgcaggccagcggcgtaaatgcgggcagcattttgctggtcgacagcgtcaacaaccgcaccaacggcacgttgaatgcgggtgaagccaccacggcgctgcgtaatgcgcttgagggtaacggaaaattcaccctggtttcccagcagcagctgggcgtggccaaacagcagcttggcctgtcgccacaggatagccttggtagtcgcagcaaagcgatgggcattgcgcgcaccgttggcgcacagtatgtgctctattccaacgcaaccggcaacgtcaattcacctgagctgaaaatgcagctgatgctggtacaaaccggcgaaattatctggtcgggtaaaggtgctgttcagcaacaataa

SEQ ID NO: 174185 - DNA, 375 bp, Klebsiella oxytoca
atgcgtgcagcccatttcggcgcattactggccgtgacactactggccgggtgcagttcgcatccggaaataccggtcagcgatcagcaaagtctggtgatggaatcaaacgtactggcagcaggaatcagcgctgaagtaccaacggtaaccgcatccgagattcaggcgacggcgaccaccagattgttcaatgaacgccaggttccggtgaccgtgcattatcgctttttctggtatgacgccaggggactggaaatgcatccgctggagtctgcacgcagcataacggttcctgcgcactcttccgttacgctttatggcagcgccaatattctgggggcgcacaaggcccgactttatctttatctgtaa

SEQ ID NO: 174186 - DNA, 357 bp, Klebsiella oxytoca
atggcagaagaaacgattttcagcaaaatcattcgccgggagatcccgtcggatgtggtttatcaggatgagctcgttaccgcttttcgcgatatctctccgcaggcaccgacccatattctgatcgttcccaatatcctgattcccaccgtcaatgatgtgaccgcagagcatgagctggctctggggcgcatgatgaccgtagcggcgaaaatcgcccgcgacgaggggctcgccgacgatggctatcgcctgatcgttaactgcaatcgccacggcggccaggaggtctatcatatccatatgcacctgctgggcggccgtccgttaggcccgatgctggctcataaaggttaa

SEQ ID NO: 174187 - DNA, 2184 bp, Klebsiella oxytoca
atgtctctctccactcactcccgggatgggcgaaacgctccatccctgcttgcgatgggcatagcgctggcgctctccccaaaccttagccaggctgccagtcactccgaagacactattattgtagaaggttccgcagatagcgcttcggatacgcaagaacaggattacagcgtcaaaactacctccgcagggacaaaaatggagatggcccagcgcgatatcccgcaatcggtcagtatcatcaccgaacaacggatgcgcgatcagcagttgcaaacgctgggtgatgtgatggagcacaccatggggatcagcagcagccaggcagattctgaccgcaccagctactactctcgtggttttgagatcgataactatatggtcgatggcattccgacctggtttgaatcccgctggaatctgggcgacgcgctttccgatatggctcttttcgaacgggtggaggtcgtccgcggcgcgaatggtctgctgaccggcaccggtaatcccgccgcgtcgatcaatatgatccgtaagcatgcgaccagccgcgagttcaagggaaatgtctctgcggagtacggcagctggaacaagcagcgctacgttgccgatatgcaaagtccgctaaccgaagatggcaacgtgcgggcgcgcattatcgctggttatcaaaataatgactcatggctcgatcgttacaacagcgaaaaaacgttcttctcggggattgtggatgcggatctcgcgacgtcgaccagtttatccgccggctacgagtatcagcgtatcaacgtcaatagcccgacatggggcggtctgccgcgctggaataccgatggcagcacaaaccgttacgatcgcgcccacagcaccgctccagactgggcctataacgacaaagagatcaataaagtcttcgttacgctgaaacaacgctttgctgatacctggcaggcaacgctgaacgccactcactccgaggtcaagttcgacagcaaaatgatgtacgtagatgcttacgtcaataaagcgaccgggatgctggaggggccttatagcagctacggtccgggctatgactacgtaggcggtaccggctggaatagcggaaagcgtaaagtcgacgccgtggatctgttcaccgacggcggctacgacctgttcggccgccagcataatctgatgataggcggcagctacagcaagcaaaataaccgctatttcagctcgtgggcaaacgtcttccccaatgagattggcagcttctacagcttcaatagcgctgggttcccggaaaccagctggggcccgcagagtctggcgcaggacgataccacgcgcatgaaatcgctgtatgccgcgacgcgtatttccctgcttgatccgctgcatctgatccttggcgtccgctataacaactggagcattgagacgctgacctacaacatggagaaaaatcataccaccccatacgccgggctggtttacgacataaacgacaattggtcggcctacaccagctatacctcggtcttccagccgcagaacaagcgcgatagctcgggtaagtatctgacgccgattaccgggaataactatgaagtgggcctgaagtcggactggatggacagccgattaaccacgactctcgcgatattccgcatcgagcaggataatctcggccaggcgaccggcgggcaaatccccggtagcaacggcgaagcagcctataaaaccgtcgatggaaccgtgagcaaaggggtggagttcgaaatcaacggtgcgattaccgataactggcagatgacctttggggcgacgcgttttgtcgctgaagataatgaaggcaatgccgtgaatcccaacctgccgcgaaccagcgtcaaactgtttaccagctaccgtctgccggtaatgcctgaactgaccgttggcggcggcgttaactggcagaaccgggtatataaagataccgcgacgccttacggcaccttccgtgcggaacagggcagctacgcgctggttgatttgttcactcgctaccaggtcactaaaaattttgctttgcagggtaacgtcaataacctgttcgataaaacctacgacaccaacatcgatggctcaattgtctacggcgaaccgcgcaacttcagcattaccgccagctatcagttctga

SEQ ID NO: 174188 - DNA, 1434 bp, Klebsiella oxytoca
atgtttaagaatgcatttgctaacctgcagaaggtcggtaaatcgctgatgctgccggtatccgtactgcctatcgcaggtatcctgctgggcgtcggttccgcaaacttcagctggctgccagccgtagtttcccacgtcatggcagaagcgggcggttcagtcttcgctaacatgccgctgatttttgctatcggtgtcgcacttggcttcaccaataacgacggcgtatccgctctggcatcggtcgtcgcttacggcatcatggtgaaaaccatgtccgtggttgcgcctctggttctgcatttacctgctgaagagattgcggctaaacaccttgcagataccggcgtactcggcggtatcatctcgggtgccatcgcagcgtacatgttcaaccgcttctatcgcatcaagctgcctgagtatctgggcttctttgcgggcaagcgttttgtgccaattatctccggtctggcagcgattttcacgggcgtgatcctgtcctttatctggccgccgatcggtactgccatccagacgttctcccagtgggctgcttaccagaacccggttgtcgcgttcggtatctacggcttcattgaacgttgcctggtgccgtttggtctgcaccatatctggaacgtacctttccagatgcagattggcgaatacaccaacgcagcaggtcaggtcttccacggcgatattccgcgctacatggcaggcgacccaacggcgggcaaactgtccggcggcttcctgttcaaaatgtacggtctgccggctgccgctatcgctatctggcactctgctaagccagaaaaccgcgcgaaagtgggcggtatcatgatctccgcagcgctgacctcgttcctgaccggtatcaccgagccgatcgagttctctttcatgttcgttgcgccgatcctgtacattatccacgcgattctggcgggcctggccttcccgatctgtatcctgctgggtatgcgtgacgggacgtcgttctctcacggcctgatcgactttatcgttctctccggcaacagcagcaagctgtggctgttcccgatcgtcggtatctgctacgcgatcgtgtactacgtggtcttccgcgtgctgattaaagcgctggatctgaaaaccccgggtcgcgaagatgcaaccgaagacagcaaagctggcgcgaccagcgaaatggctccggcactgatcgctgctttcggcggtaaagagaacattactaatcttgacgcatgtatcactcgtctgcgcgtgagcgtggcggatgtggcgaaagttgatcaggctggcctgaaaaaactgggcgccgcaggcgtggttgttgcaggttcaggcgttcaggctattttcggtactaaatccgataacctgaaaactgaaatggatgaatacatccgcaacagctaa

SEQ ID NO: 174189 - DNA, 795 bp, Klebsiella oxytoca
atgtttttagtcgactcccattgccatctcgatggcctggattatcaaacgctgcataaaaacgtggacgatgtgctggctaaagccgccgcccgcgatgtgaaattttgcctggcggtggccacaaccctgccgggatatcgcggtatgcgcgagctggtgggccagcgtaacgacgtcgttttctcctgcggcgtgcatccgttgaaccaggatgaagagtacgacgttgaggcgctgcgccagctcgccgcagaggatggcgtggtggcgatgggtgaaaccggactggattatttctacacgccggaaaccaaagcgcgccagcagacgtcgtttcgcgaccatatccggataggccgggagctgaataagccggttatcgtgcatacccgagatgcccgcgccgatacgctggaaattttacgcgaagaaaaagtgacggattgcggtggcgtactacactgtttcactgaggatagagagacagcgggtaagctgctggatatggggttctacatctcgttttccggcattgtgacgttccgtaatgcggagcagcttcgcgatgcggcgcgctatgtacctctcgatcgcctgttggtagagaccgattcgccgtatctggctccggtaccgcatcgtggtaaagagaaccaaccggcattggtcagggatgtcgccgagtatatggcggttcttaaaggcgtatcgctggagcaactggcacaacagaccacggaaaatttcgcgacgctttttcatatcgacccctcccggctgcaacctctctga

SEQ ID NO: 174190 - DNA, 1005 bp, Klebsiella oxytoca
atgaaatggtatccgtggttacgtccctcttttgaacagctagtttccggctatcaggcgggacggggtcaccatgcgctactggttcaggcgctgccgggtatgggaagcgacgcgttgatttacgcgctgtgtcgttttctgatgtgccggcagccggaggggcataaaagctgcggtcgatgccatagctgtcagctgatgcaagccgggacgcatccggattattatgcgttgatcccggaaaaggggaagagctcgctcgggattgacgccgtgcgtgaagtgagcgaaaaactctatgaacgagcccgtctgggcggcgcgaaggtcgtctggatagacgatgccgctctgctgaccgacgcggcggccaacgccctgctgaaaacgctggaggagccgccggaaaacacatggttcttccttgcctgtcaggagcccgcacgcctgctggccacgttgcgcagccgctgccggttacatcatcttgctccgccttctgaacagtatgcgctggcgtggttagagcgagaagtgacaatgtcacaagatgcattgctcgcggcgctgcggcttagcgccaatgccccggcggcggcgctggatctgctgcaggacgctcactggagcgtgcggctgcagctttgccagaccctgggtgctgttttaacccacggcgactggctgtctttgctgccggtattgaatcatgagcaggccgcgattcgtctgcattggctggcatcactgctggtcgatgcacaaaaaaggcagcagggaattacgcttatcagcaatcccgatgcctggcctctggtgaatcaactggccgctgcgctgccagccgcgcgtttacaggcgatcgcgtgcgacgttaacgcctgccgcgagcagttgctgagcgttgtcggtatcaatcgcgaactgctgcttaccgagcgccttctgcgctgggaacattacctgcaacctggggcggtccttcccgtatcccacctctga

SEQ ID NO: 174191 - DNA, 642 bp, Klebsiella oxytoca
atgcgcagtaactatatcgtcatcgagggcctggagggcgcagggaaaaccaccgcacgtaatcttgtggtagagacgctaaaacagctgggcattagcgacatggtgtttacccgcgagccgggtggcactatcctggccgagaagctgcgcagcctggtgctggatatacagtccaccggcgatgaagttatcaatgataaagccgaagtactgatgttttacgcggcgcgcgtgcagctggttgagacggtgattaaacccgcgctggcccgcggccagtgggtcattggcgatcgtcacgatctctcgactcaggcctatcagggcggcggccgcggtatcgaccaaacgatgctggcaaccctgcgcgatgcggtactgggcgattttcgtcccaatctgacgctctacctggatgtgactcccgaggtagggctgaagcgcgcccgcgctcgcggcgaactcgaccgtatcgaacaggagtcgctcgatttctttaaccgcacgcgcgcgcgctaccttgagctggcagcgcaggacgacaccatacgcaccgttgacgccacccagccgcttgaggccgttgagcgcgatatccgcgcggtggtgaatcagtgggtcgcggagcagcgcgcatga

SEQ ID NO: 174192 - DNA, 1023 bp, Klebsiella oxytoca
atgaagaaaatgttacgtttcatcctgctattggtggtggtgctgggcatcgccgccggcgtcggtatgtggaaagttcaccagctggcggacagcaaattactgattaaagaagagaccatctttaccctcgagaccggcacaggtcgcctggcgcttgggcagcagctctacagcgataaagtgatcaaccgacctcgggtgtttcagtggctgctgcgcattgagcctgagctatcccactttaaagccggaacctatcgcttcacgcctgagatgacggtacgtcaaatgctgcagctgttagccagcggcaaagaggcccagtttccgctacgcttcgtggaagggatgcgggtgagcgactacctgcgccagctgcgcgatgcgccctacgtaaagcatacgctggcggacgatcgctatgaaaccgtcgcaaaggctctcgatctggagcatcccgattgggtcgaaggatggttctggccggatacctggatgtataccgccaacaccagcgatgtggcgatccttaagcgcgcgcatcagaagatggttgccgcggtcgataaagcctgggaagggcggatggataatctgccgtacaaagataaaaatcagctgctgaccatggcctcgatcattgagaaagagaccgcagtggccgaagagcgtgaccgcgtagcctcggtgtttatcaaccgcttacgtatcggcatgcgtctgcaaaccgatccaaccgtgatttacggcatgggtgcgggttataatggtaagttgacgcgtaaagacctggaaaccccaaccgcttacaacacctatgtcattaacggcatgccgcccggcccgatagccgcgccgggggaagcctcgctcaacgccgccgcgcatccggcaaaaacgccgtacctctattttgtcgcggacgggaagggcggacatacgtttaataccaacctgatcggccataaccgctcggttcaggactatctgaaagtacttaaggaaaaaaatgcgcagtaa

SEQ ID NO: 174193 - DNA, 810 bp, Klebsiella oxytoca
atgtatctactgaatggcgcatgggcgaatgtgttaccggtgaacgatcgcgtcgtgcagtttggcgatggctgttttaccaccgcgcgaattgtggcgggacaggttcagttcctcaacgcacacctgactcggctacaaacgacctgcaaaaagctctttatcccctttaacgactgggaattgttggcaggggagatggcacgccttgcgcagccccattctgatggcgtgctgaaagcgatcatcacgcgcggagtgggcggtcgaggctatagcgccgcaggctgcgtaaatcccagccgcatcctcagcgtatcgccttacccggctcactaccaccgctggcgtaaagaagggatctccgtctcgctgagcccggttcagctgggatgcaaccctttacttgccggactcaaacaccttaatcgccttgagcaggtgctgattcgctctcatcttgagcagacggatgccgatgaggcgctggtccttgacagcgaagggtggcttacggaatgctgtgccgcgaacatattctggcgtacaggctttgacgtctttaccccgcgcctcgatcgggcgggagtcaacggcattatgcgtcaacacattctcgctaagctggcaccatcgccgtttcgcgttgtcgaagtcaccatgcgccccgatgcgttacgcgaagccgacgaggtcgttgtctgtaacgcattgatgccgctggtgccggttcgccgctgggacgataaatgctggtccgcgcgcgagctttaccattttttagcccccttgtgtgagctgtctgattag

SEQ ID NO: 174194 - DNA, 543 bp, Klebsiella oxytoca
atgaaattaaaattagctactatcgcttttgttgccaccatggggattgcctcttctgcatcagcacaggatggccagattaattttaccggtaaaataacagaaaccggttgtaaaattaatggcggagtcaccagcgcacaggatgtgaagctcggtgaagtctctaaaaccgcactgccggctgctggcgacacggcggcgaccactcgcttctcgctggtattgacggaatgcccggaagacctgttgggtaagccgattagcgttaaatatgacggtactccggatagcatcaataccgattatttacagttgaccggtgcgggtagtgaaaatgttgctgaaggcgtggcgattcagttactcaacgacgatacctcggcgctgccgctgggcacgtcttccagaccggtaactattagcaacaatgcagctgaagaaaccactcttaacttcttcgctcgctatatcgcaaccacagatacagtgaaagccggtgatgctaatggtaccgtaaacttcacgctgacctacaactga

SEQ ID NO: 174195 - DNA, 675 bp, Klebsiella oxytoca
atgaaaaaaagcttagtattaattgccacaacgctattaatgatgacagtatcagctcaagccggcgttattatcggtggaacgcgcgttatttataacggtgataaaaaggagacttcaattagcgtaaaaaatcctgacaaatcatcatatctgatacaatcctggagcgatagcggagaaaaaaacaacgataaatcaccctttatggttactccaccgctctttcgtctcgggcctggacaagagaacacgctaagaataattcgcaccggcggtaacttacctgaggaccgggagtctctgtactggatgaatattaaatctattccttcgacggagaagcaggataatgtaaatagcctgcaaatagccataaaaacgcgcatcaagttaatatatcgcccccaggcgcttatcaaaatgccggaagatattgccgaaaaattaacctggcagcgtaacggtaatactctgatcgttagcaatcctacagcgtactacatgaacttcagtaccatcaaaatgggcaatacttcggtaaaaaatgccgcctgggttgcaccgaagagctcggttagctttgccattcctgccggcgcgagcggcgatgtggtatggacgctgattactgattatggctccgtcggaaaagagcatcgagcacgtttataa

SEQ ID NO: 174196 - DNA, 2553 bp, Klebsiella oxytoca
atgaatgtagacgcctacaaaaagaaaataacgctcagtcgtatcgcctgctttattgccttgcagtgtgctttatctattcataataccgcattagctcgcgagtattttaatccggcctttctcgggatcgatgggccgggaaaggatctgaccgacctctctgcttttgaagaaggcatcggccagataccgggaaactatcatgttgacgttatcgtcaataaaacatcagtcggtctatatgatattgactttgtaatgcaaaaagatagccagggcaacgctacgctccagccctgtcttagccttgaggcattacaaaaatttggtatccgtacacagtcatttccccagcttgctgacggtaaagattgcgccaacttacaggttattccacaggccaatgcggaatttgtcttcgatcgccagcagctacgcctctctattccacaagctgcattaaacaaccatgcccgcggctatgtggctccagagcggctagacgaaggaattaatgcgctactgctgaactacaactttagcggcgccaataccgaagctcgtcaacgcggcgcagaagactcgaacagctattatctgaacttaagacccggttttaatatcggcccctggcgaatccgcaactacacgacctggaaccgtaacagcagcggtgggcaagcacaggagagctgggattcactctatacctatgcacagcgcaatatcatcgccctgaaaagccagctcacaattggcgacagcaccgcgccttcggacatctttgacagcgtccccttccgcggtgcgcagctcgcctccgatgacgatatgcttcccgatagcctccgcggctatgcgccagtaattcgcggtattgcacgcactaacgctcaggtgatcgttaaacagaacggctataccatctatcagagctatgtctctccgggagcgtttgagatcgctgacatgtaccccaccggcagcagcggcgattttgacgtcacgattaaagaagctgacggcagcgaacaacatcagaaaatcgcctttgcctcccttcccgtactgcagcgtgaaggccggttgaaatatagtctgaccagcggccagtaccgcccttatgacagcgatattaataaagacacgtttacgcaagggaccgtcatttacggtctaccggcaggctttaccgtttatagcggcggtcagttctctcaacattaccagtccgtccttctgggtgcaggtaaaaatttaggaatgctgggagcgctatcgatagacagcgcgcaggcatggtcaagaaaacaggacgaaagcaaagaaagtggtcaatcatggcgcatacgctacagtaagaacattattgaaacgggaaccaatttctcaattgcgggctatcgatactcaacctcgggctactatagcctgtcagaggtactggacacgtggcgcgataacgactggaaaagtcaaaacgatcgccgccgcaatcgcgccgagcttcagcttaaccagaatatcagccaaaacctgggttcgctcaccctcaacatgatgagtgaggattactggaatagcgagcgtaaaatgcgctccatcagcgtgggatatagtaacaactgggcaggagtaacttacaacctcaactatagctataacgaaaacaccaccgataccgacaataaaaaagtttatgacaaagatcagatcttctcatttaacatcaacgttcctttcgatctcgggtcaggtaataactacgctacctacagtctgaacaccagtaagcacggcagcaccagccataatctggggatgaatggctctacgctggcagacaacaatctgaactggaacatccagcaaagccagacaaatcacggtgaaggcaatggtggttatgccagtcttgactatcagggcacctatgcccgggtcaattcggcgtacagctatgaccgcgatcagcgccgcgtcaactatggtattgacggcggaatcgtcgcccacgctcacggcctgacgctcagtcaggagttaggcgaaactgcagccctggtcgaagcgcccggcgcagatggcgtgacggtaatgaatcaaacaggggtaaaaaccgattatcgcggctataccattgttccgtatgtctccccctatcgtgaaagcgtgatttccctggatacggcgacgctaccggataatgccgacgtagagctgacctcacaaaccgttacgcccactcgtggagccatcgtccgcacccactttgcggctcacgtcggcaaacgagtgttaatgacgctcattcgccgcagcggtgacgtcgtcccctttggcgcaatggtctcagtcaacggcgtcgacaagccgtccggttctatcgtcggcgacggcgggcaagtttatcttaccggcatgccgactaacggtaccgctacggcaaaatgggggcaaacagcgtcagaacagtgcgagtttctctggcagctacctgacgtcgtccccgcaagcggggtcgctgaactaacatcttcctgccaatag

SEQ ID NO: 174197 - DNA, 978 bp, Klebsiella oxytoca
atgaacgcaaaactctatttacccatcgcggcaatcactttctttgccctcttccccgcgcatgcagactattttgatgcggtcaggggaagcgtaatgaactataaatttggtgatttcacgctgccagctaatcctggagaaacgacctattgggaagaagcgggttcgctgccgacaacggtatcgaggagtgatacaaccggctcttatattgccctttcaattaacggacccctggtcggtgacaatatctacgcgaccagcaatccgggtattggcattcaatataaaacgagcgtggatacactgactgatgcgggtggaggcacagaatcgactccgaatagtcgcttcaatttagggcagcaggtcgctgcagatataagcacttacgtccacgtaaaataccgacttgtcaggctgacaaataagatccctgccggtaaaattaccagcgcaccgcaggtaactgccactttttacaacccagatggaagggggaccgctgtattcactcacggtatttatagctcaacgattgcgtcgcaacctaaaacaacttcctgcacggtagacgcaccgacggaaataaagcttcctgcgctttacggtaataagctgaaaaatggtgcgcaaactattactgaagctccgaccatcaaattaatcaactgtcccggcgcgattgacggtatttcttataactttagtgccgtttacggcgcgcgcgatgcctcaaatggaatactcaacgccgttaatggcgatggctacgcgcaaaacgtttacattcaggtccagaatgccgacggaaccccccatacggttaatagttcaatagcactcagtgattacgcaggttcaggtgaatatgaaatccctgaatttaaagttgcttattatattgagaatattgaaagcgtgacggctggcgaagtgaaatccgctatcgaactcaaattaacctataactaa

SEQ ID NO: 174198 - DNA, 510 bp, Klebsiella oxytoca
atgaaaattaaacaaggacttttggcaaccttagttaccgccagctgcggattattcacgcctttaagccacgcggtcaatatcgatatcacgggaaaagttatcgcctctccttgcgaggtcaatggcggtaatgaaaccctctccattgatctgggagattctattcgggccggagatatttttgaaccaggtagcggcagtgaatggaaaaccgcagatcttgagcttgtttgccccccttcggccagattctttaatgtgaccttcacgggtactagcgatgatgacgatccggcttattacaaaaataccggtaccgctcaacgcgtcatggttgaattaaccaataccctgtcagaaaccgcttacaaaaatgggaccacgctggaaaatctcgaagtaggaggagtctacataatcaacttgcgcgcccgtgccgtctctaaatggaatcctctgccgggcaccatttcagctcaagtccaggccaccatcacctatccgtag

SEQ ID NO: 174199 - DNA, 525 bp, Klebsiella oxytoca
atgagactgcgaataatagaggttatttcatgccttacggctgcgctcgggataatgatgaccgccgttccggcatttgcgacaaacattaatctgacggggacggtggtcgcctctgcctgcacggtagatactgcacattcgctcaatcagaccattacattcccggattcaaagacatctgattttaccagggcaggggatgccagcgagtggcagaattacaccatcgtattcacctcttgcccaccgtcaacaacggacataattgttaacttctccggtacgccagatccatccaataaatgtctggcaaaaaatgacggaagtgccacaggtattgcactgcaatcggcctttggcaaagatggtggttatttgcaaaattgctttggtggaatgactggaactgcttatgaaacaggaaggaccatagagttgtcctctcgaatgattgccacctccgatcgtgtcaccggagggagttttcattcaaccctgttacttactgtgacctacaaataa

SEQ ID NO: 174200 - DNA, 1242 bp, Klebsiella oxytoca
gtgtctaagcgtcgtgtagttgtgaccggactgggcatgttgtctcctgtcggcaataccgtagagtctacctggaaagctctccttgccggtcagagtggcatcagcctgatcgaccatttcgatactagcgcctatgcaacgaaatttgctggcttagtaaaggattttaactgtgatgacttcatctcgcgtaaagaacagcgcaagatggacgccttcattcaatatggaattgtcgctggcattcaggccatgcaggattctggccttgaagtgacggaagagaatgctacccgcatcggtgccgctattggttccggtattggcggacttggcctgatcgaagaaaaccacagttcgctggtaaaaggcggaccgcgtaagatcagcccgttctttgttccttccacaatcgttaacatggtggccgggcatctgaccatcatgtttggtctgcgtggaccaagcatttccatcgcgaccgcttgcacctctggcgtccacaatattggtcacgcagcgcgcgttatcgcttatggcgatgctgacgcaatggttgccggtggcgcagaaaaagccagtacccctctgggcgtaggcggctttggtgcagcacgagcgctctccacgcgcaatgacaacccgcaggcggcaagccgtccatgggataaagagcgtgatggtttcgtactgggcgacggcgcaggcatggtcgtgctggaagagtacgaacacgcgaaaaaacgcggcgcgaaaatctatgcggaaatcgtcggttttggtatgagcagcgatgcctaccatatgacttcaccgccggaagatggcgctggcgcagcgctggcgatggttaacgctattcgcgacgcgggcattgaagcaagccagattggctacgtcaacgctcacggaacttctacgccagcaggcgataaagcagaagcgcaggcggtgaaatccgtcttcggcgacgctgccagccgcgtaatggtcagctcgactaaatccatgaccggccacctgctgggcgcggcgggcgcagtagagtctatctactccatcctcgcgctgcgcgatcaggccgttccgccaaccattaacctggataacccggatgaaggttgtgacctggacttcgttccgcacgaagcgcgccaggttagcggaatggagtataccctgtgtaactcctttggcttcggtggtaccaacggctcgctgattttcaagcgcgtctag

SEQ ID NO: 174201 - DNA, 237 bp, Klebsiella oxytoca
atgagcactatcgaagaacgcgttaagaaaattatcggcgaacagctgggcgttaagcaggaagaagttaccaacaatgcttccttcgttgaagacctgggcgctgattctcttgacaccgttgagctggtaatggctctggaagaagagtttgatactgagattccggacgaagaagctgagaaaatcactactgttcaggctgccattgattacatcaacggccaccaggcgtaa

SEQ ID NO: 174202 - DNA, 735 bp, Klebsiella oxytoca
atgagttttgaaggaaaaatcgcgctggttaccggtgcaagtcgcgggattggccgcgcaatcgctgagacgctcgttgcccgtggggcaaaagttatcggtactgcgaccagcgaaagcggcgcgcaggcgattagcgattatttaggtgctaacgggaaaggcatgctgctgaatgtgaccgatcctgcatctatcgaatctgttctgggaaatattcgcgcagaatttggtgaagttgatatcctggtgaacaatgccgggattactcgtgataacctgttaatgcgcatgaaagatgacgagtggaacgatattatcgaaaccaacctgtcatctgttttccgtctgtcaaaagcggtaatgcgcgctatgatgaaaaagcgtcatggacgtattatcactatcggttctgtggttggtaccatgggaaatgcgggtcaggccaactacgctgcggcgaaagcgggtctgattggcttcagtaaatcactggctcgcgaagttgcgtcccgcggtattactgtaaacgttgttgctccgggctttattgaaacggacatgacgcgtgcgctgaccgatgagcagcgtgcgggtacgctggcggcagttcctgcggggcgccttggctccccaaatgaaatcgccagcgcggtggcatttttagcctctgacgaagcgagttacatcactggtgaaactctgcacgtcaacggcggaatgtacatggtctga

SEQ ID NO: 174203 - DNA, 930 bp, Klebsiella oxytoca
atgacgcaatttgcttttgttttcccgggacagggctctcagagtgtcgggatgctgtcagatatggcggccgcttacccggtaatcgaagagacgttccgtgaagcctctgcggcgttgggttacgatctgtgggcgcttgcacagcagggcccggcggaagaattaaataaaacctggcagacccaaccggcgctgctgaccgcttccgttgcgctctatcgcgtctggcagcagcagggcggaaaagcgccgatgatgctggctggccatagccttggcgaatattcagcgctggtatgcgcgggcgttatcaatttttccgacgccgttcgccttgttgaactgcgcggtaagttcatgcaggaagcggttccggaaggtaccggggcgatgtctgcgatcatcggtcttgacgatgctgcgattgcgaaagcctgcgaagagtctgccgaagggcaggtggtttctccggtgaactttaactcgccgggtcaggtcgttattgccggtaataaagaggccgtagaacgcgcaggggcggcctgtaaggctgcaggcgctaaacgtgctctgccgctgccggtcagcgtcccatcccactgcgcgctgatgaagcccgcagcggagaaactggccgttgagctgcaaaaaataaccttcaacgcgccagctattccagtcgtgaataacgttgacgtgaaaagtgaaacgacgcctgaagctattcgcgatgcccttgtccgtcagctgtatagcccggttcagtggaccaaaaccgttgaatttatggcatcacagggcgtagagcatctgtatgaagttggcccgggtaaagtcctcaccggtctgactaaacgtattgttgacaccctgaccgcttccgcgcttaacgagccggcagctatgtctgcggcgcttgagcaataa

SEQ ID NO: 174204 - DNA, 954 bp, Klebsiella oxytoca
atgtatacgaagattattggtaccggcagctatctgcctgagcacgtgcgtacgaacgctgaactggaaaatatggtcgatacgtcagacgagtggattgtcactcgtaccggtatccgtgagcgtcgtattgccgcgccgaacgaaacagttgctaccatgggccttgaagccgctaagcatgcgctggatatggcgggcgtaaagccggagcaaattggtctgattattgttgcgaccacctccggtacccatgcgtttcccagctcggcttgccagattcaatcaatgctgggtattaaaggttgcccggccttcgacgtcgctgcggcctgcgcgggtttcacctacgcgctcagcgttgccgatcaatacgtgaaaaacggcgcggtcgattacgcgctggtgatcggcgctgatgttctggcgcgtacctgcgatcctgccgatcgcggaaccattatcattttcggcgacggcgcaggtgccgtggtgctgggggcttccgaagagccgggtattatctctacgcatctgcatgcggatgggagctacggcgaactgctgacgctaccgaacgccgatcgcgtcgatccggaaaacccgatcttcctgaccatggcgggcaacgaagtctttaaagtggccgtgaccgagctggctcatatcgtcgatgaaactttagctgcgaataatctcgagcgttcgtcgctggactggctggtaccacatcaggctaacctgcgtattatcagcgccacggcgaagaagctgggcatgtcgatggacaacgtcgtcgtcacgctcgacaggcacggtaatacttcagccgcttctgtgccttgtgcgctggatgaagccgtgcgcgatggccgcattcaacgtggtcagcttattctgctggaagcctttggtggcggtttcacctggggttccgcgctggttcgtttttag

SEQ ID NO: 174205 - DNA, 1152 bp, Klebsiella oxytoca
gtgaggatctccccgggtaactggggaataaccgaaccgagcagcgacgataccttgacacgtctaaccctggcgttagatgtcatgggcggggattttggcccttccgtgacagtgcctgcagcattgcaggcactgaactctaattcacagctcacacttcttttagtcggcgatcccgacactatcgcgccattacttgccaaagctgattttgaacaacgttcacgtctgcaggttatccctgcgcagtcagttattgccagtgatgcccggcccgcgcaagcgattcgcgccagccgcggtagctcaatgcgcattgcgctggagttagtaaaagaagggcgggcgcaggccagcgtcagcgcgggtaataccggagcgctaatggggctggcgaagctgttgctcaaacccattgaggggattgagcgccctgcgctggttaccatgctgccgcaccagctgaagggcaaaacggtggtgctggatttaggcgccaacgtggattgcgatagcactatgctggtgcagtttgccgtcatgggggcggtccttgcggaagaagttattggtattaaggatccccgcgttgcgctactgaatatcggcgaagaagagatgaaaggtctcagcagcattcgcgacgcggcggccgttttgaaaactttgccaaccctcaactatattgggtatctggaagccaacgagttgttgacgggtaaaacggatgtgttggtttgtgatggattcacgggcaacgtcacattaaaaacgatggaaggtgttgtcagaatgttcctttcactgttgaaatcacagggagaggggaagaaaaggtcgtggtggctgcttttattaaagcgttggttacaaaaaagcctgtcgaggcgattcagtcacctcaaccccgaccagtataatggtgcctgtctgttaggattacgcggttccgtgatcaaaagtcatggggctgccaatcagcgcgctttttgcgtggcgatagagcaggcagtgcaggctgtgcagcggcagattcctcagcgaattgccgctcgcctggaatctttataccctgcaggtttcgaattgcctgaggacggcagaagcgggaacgccaggcctcaaagcccggtgaccggaaacgactga

SEQ ID NO: 174206 - DNA, 174 bp, Klebsiella oxytoca
atggccgtacaacagaataaaccaacccgttccaaacgtggcatgcgtcgttcccatgacgctctgaccgcagtcaccagcctgtctgtagacaaagcttctggtgaaaaacacctgcgtcaccacatcactgccgacggtttctaccgcggtcgcaaggttatcgctaagtaa

SEQ ID NO: 174207 - DNA, 522 bp, Klebsiella oxytoca
atgcaaaaggtaaaattacccctgactctcgatccggttcgcacggctcaaaagcgcttagattaccaaggtatctatacccgtgatcaggctgtgcgcgtcgctgattctgttgtcagcgtggacagcgatgtggaatgcagcatgtcgttcgctattgataaccagcgtcttgccgttttaagcggcgatgcgacggtgtcggtaaccctcgaatgtcagcgttgcgggaaaccgttcccccatcatgttcacacaacgtattgtttcagccccgtcagaaatgacgaacaggccgaggcactgccggaagcgtatgagccgattgaggttaacgaattcggtgaaatcgatctgctggcgctggttgaagatgaaattatcctctccttgcctgtagttccggtgcatgattctgaacactgtgaagtgtccgacgcggacatggtctttggtgaactgcctgaagaggcacaaaaaccaaatccatttgccgtattagccagcttaaagcataagtaa

SEQ ID NO: 174208 - DNA, 585 bp, Klebsiella oxytoca
atgtctgaactgatcctcgcgtcaacctcgccctggcggcgaatgctgctggaaaagctgtcggtgccttttgaatgcgcggcgccggacgtagatgaaaccccgctgcccggcgagcccgcccgccagctggtgatgcgtctggcgcaggcaaaagcgcaggccctcgccgcacgctatccgcagcacctcattataggctccgatcaggtttgtgtcctggacggtgaaattaccggcaaaccgcataccgaagagaacgcccatcgccagttgagaaaggccagcggcaccatcgtcacgttctacaccggcctcgcgctatataactctgccaggggtcatctacaaactgaatgtgaaccctttgacgtccacttccgccatttaagcgatcgggaaattgaaagctatatccgcaaagaaaatccgctgcagtgcgccggcagtttcaaaagcgaaggattaggcatcacgctgttcgagagactcgagggccgcgatcctaacgcgctggtcggtttaccgctcatcgcgttatgtcaaatgctgcgccgggaaggattcaatcccctgctcacctga

SEQ ID NO: 174209 - DNA, 1146 bp, Klebsiella oxytoca
atgccttttcgcgctacgcttttgaccctcaccctgctggccgccgccagcgtcaacgcgagcgactggcagcgccagggcgtcgtagaaggcaatttacccgcctcctggcaacagttgaaagcgcagatgacgtatccggactcgtggctctctggaaagtatcgtcatttcgatcaatggcgagagcacgcccgcacgctgcttcggcaatccctgctaacgccgacatcagcaagcccgttcaccccacaaacgctgatgagcgaagatcggggcacctatcgcgccgagaaactggcatttaacgtcacagatgaaaaccggattgccgctctgatgttaacgcccaaatcagcaggccctcacccggccattgtcctgctgcacgaccatggctcaaaatttgacataggcaaggagaaactgattcgtcctttgcgggatgccgcacgcctggccagcgccgaggcatgggcagataaatttttcagcggtcggttcatcggcgatgagctggcgcagcgcgggtatgttgtcatcgccattgatagcccgggctggggggatcgcggccccatgacctacgagcagcagcaggcgctggccagtaactattttaaccttgggcgctcgctggcaggggaagtcgcctatgaagatctgcgaaccgtggatttcgtcagtacgttaaaagaggttgataataaacgcatcggggtactgggtttttcaatgggcggttttcgcgcctggcaactggccgccctgtctgacaaagtcgccgccactgccgcgatctcctggttcggtacctggaacggcctgatgcagccaggcaacaacgttctgcgcggtcaatcggcgttttatatgcttcatccgggcctggccggacatcttgatattcccgacatcgccagcattgcagcgcccaggccgatgctgatttatagcggagggcaggataagctgtttcccgctgcagccgttaatgacgccttcgctaaggtgcataacgtatgggcgtcacagaacgcgcaggataagctggagaccagaacgtggccggaactgggccacgtcttttatcaagaacagcaggatgaagtgttcccctggcttgataagtggctcaagccctga

SEQ ID NO: 174210 - DNA, 1038 bp, Klebsiella oxytoca
atgcggcgaaaaccggatgataataaatataagcatataaaaatgagtggcgctaatgcgtcgggctatttagaatcgcgcaccatgaaaactgagatcccaagcgtaaaaatggttgccattgctgatgatgaagcagggcaacgtatcgacaactttttgcgtacgcagctgaagggcgtaccaaagagtatgatttatcgcatcttgcgaaaaggcgaggtgcgggtcaataaaaagcgcgtcaagcctgagtataagctggaagccggcgacgaagtgcgcattccgccggtccgcgtcgcggagaaagaagaagaggcggtctctccccacctgcagaaagttgctgcgctggccgatgtgattttatatgaagacgatcatattctggtgcttaataaaccttccgggacagcggtacacggcggcagcgggttgagcttcggcgtgattgaaggtctgcgcgcgctgcgcccggaagcgcgcttccttgagctggtgcatcgcctcgatcgcgatacctctggcgttctgttggtcgccaaaaagcgttccgcgctgcgttccctgcacgagcagctgcgcgacaaaggaatgcaaaaagactacctggcgctggtgcgcgggcagtggcagtcccacactaaagtggtgcaggctccgctgctgaagaatattctgcagagcggtgaacgcatcgtgcgggttaaccaggaggggaaaccgtcggaaacgcgttttaaagtcgaagagcgttatccccatgcgaccctggtgcgctgcagcccggtaaccggccgtacccatcaaatccgcgtgcatacccaatatgccggtcaccctatcgcttttgacgatcgctacggcgaccgggaattcgataagcagctgtcaggcaccggccttaaccggctgttcctgcatgcggcggcgctgaagtttacgcatccggggacaggggaagtgatgcgtgttgaagcgcctttagataaccagcttaagcgttgcctgcaggttttacgtaacacgaagtga

SEQ ID NO: 174211 - DNA, 3255 bp, Klebsiella oxytoca
atgaaaagaatgttaatcaacgcaactcagcaggaagagttgcgcgtcgcccttgttgatgggcagcgcctgtacgacctggatatcgaaagccccgggcacgaacagaaaaaagcgaacatctacaaaggcaaaatcactcgtattgaacctagtctcgaagccgcgtttgttgattatggcgccgagcgtcatggtttcctccctcttaaagaaattgcccgcgaatacttccctgccaactacagttcccacggccgccctaacatcaaggacgtgctgcgtgaaggtcaggaagtgattgtgcagattgataaagaagagcgcggcaataaaggcgccgcgctgaccacctttatcagcttggcgggcagctacctggtactgatgccgaataacccacgcgctggcggtatttcacgccgtatcgagggtgacgatcgtaccgagctgaaagaagcgctggccagccttgagctgccggatggcatgggacttatcgttcgcaccgctggcgtcggcaaatccgccgaagcgctgcagtgggacttaagcttccgcctgaagcactgggaagccatccagaaagccgctgaaagccgccctgctccgttcctgatccatcaggaaagtaacgtgattgtgcgcgctttccgcgactatctgcgtcaggatatcggcgaaattcttatcgacaacccgaaagtgcttgagctggcgcgccagcatatcgcggctcttgggcgtccggatttcagcagcaaaatcaagctgtacaccggtgaaattccgctgttcagccactaccaaatcgagtcgcagattgaatccgctttccagcgtgaagtgcgcctgccttctggcggttctatcgtaatcgacagcaccgaagcgctcaccgctatcgatatcaactccgcccgtgctacccgcggcggcgacatcgaagaaacggcgtttaacaccaacctggaagcggccgatgaaattgctcgccagctgcgcctgcgcgacctcggcggtctgatcgttatcgacttcatcgatatgaccccggtacgtcaccagcgtgcggtagaaaaccgcctgcgcgaagccgtacgccaggacagagcgcgcatccagatcagccacatttcacgctttggcctgctggagatgtcgcgtcagcgtctgagcccgtcgcttggcgagtccagccatcacgtctgcccgcgctgtagcggaacgggtaccgtacgcgataacgaatcgctgtcgctttccattctgcgcttgatcgaagaagaagcgctgaaagagaacactaaagaagttcacgctatcgttccggtgccgattgcttcgtacctcctgaacgaaaaacgtgctgcggtaagcgccattgaaacccgccaggccgatgtacgcgtcatcatcgtgccaaacgatcagatggaaacgccgcactactccgttctgcgcgtacgtaagggtgaagagacctccacgctgagctatctgctgccgaaactgcacgaagaagagatggctatgccttctgatgaagagccggccgagcgtaaacttccggagcaaccggcgctggccgcttttgtcatgcctgatgccccaccagcgccggctcagcaagagcctgctaaagctacggttgccgtcggaacaccagccgcttccgcacctaagtcggcagcgccagcgcagccgggtctggttgcacgcttcttcagcgccctgaaaaatatcttctccggcgcagaagaaactaagccggctgaagtccaggttgagaaaaaagcggaggagaaatccgagcgccagcaggaacgtcgcaaaccgcgcgccaacaaccgccgcgatcgcaacgaccgccgcgataatcgggataaccgcgataatcgtgacaaccgcgacaatcgtgccgagaatagcgaagttcgtgaatctcgcgaagaaaaccgccgtaaccgccgcgagaagcagcagaacgtcgaacctcgcgacatccgccagacaacggcagaagatagcgataaaggcaaagctcgcgatgatcaaccgccgcgccgtgaacgcaatcgccgtcgtaacgacgagaagcgtcaggttcagcaggaagctaaagcgcaaactcgtgaagaaccggtcgtacaggatagcgagcaggaagaacgcgtgcagaccatgccgcgccgcaagccgcgccagctgtcgcagaaggtacgtattgaatctgctgccgctgagcaggttgtcgagccggtagccgcgcctcaggtcatcgaagcgccagccgtccaacccgaggccgcagctccgcgcacggaactggcgaaagtcgacctgccggcagttgttgaaaccgctgcggaacatgacgatactggcgaagcacgcgaagctaacggtatgccgcgtcgttcgcgccgttcccctcgtcacctgcgcgtaagcggccaacgccgtcgtcgctaccgtgatgagcgttacccgacgcaatccccgatgccgctgaccgtagcctgcgcatcgccggaaatggcatctggtaaagtgtggatccgttaccctgtcgttcgcccgcaggaccagcagcaagaagaagcgcaggtacaggagttcgctaccaccgcggttgaccccgttatcacccctgcggccgccgttgaaccggctgtctctgaagtggttgccccggagatagttgaagagcgcgttgttgagccggtcgtcatctctgagcctgtggcgatgatgaacgaacctgaagctccggttgtcgaaaccacgcacccggaagctatcgccgcaccggttgatgaacagccgcagctgattgccgaggctgatgaaaccgtcgccgaagaggttgtcgcagaagctgtcgacgtcgtggcgaaagaggctgtcgagccggaagcagcggtcgctgaacctgctgcggttgaagaagccgcggccgctgttgaagaagcgcctgtcgtctccgaaccggtggttgagccggcaccggcggcagagccggtagtgaagactcaacctgttgtcacgactgtgccggtcgttaaggtcgccaatcgtcacgccaccgcgccgatgacccgcgcgcctgcgccagactacgtccctgaagcgcctcgtcaaagcgactgggttcgcccgagctttgattttgacggtaagggcgctgctggtggccatagcgcgacccataaagccgctgccgggcctacccgtccgcagcccgtagagtaa

SEQ ID NO: 174212 - DNA, 936 bp, Klebsiella oxytoca
atgaagaagcaggagcgtatagatcgtatcgaattgatgcgtacgttcattcggattgtcgaagccgggtctctctccgctgcggcggtccagatgaacacgacccaggcgacggtaagtcgacgactccagtcgctggaagggctgctcggcgcaaagctgatcctgcgtaccacccatgcgatgaagctgaccgatgacggcgagcgctgttaccagcatgcccgacagatcgtcgatgcgtggctggcgctggaagacgacctgcgcatcaccgatgaccgtccggtggggatattaagggtacgggcgccgcatgcgtttggtcagcagcagctgctggggccgctggtggactttctgcagcgctatccccagctatcggtcgaatggatgctgaatgataaaaacgtggatttcctgagcgatggcatcgactgcgcgattcgcgtgggggctgaggtggatccggctacggtgtcggtcctgctggccgaggtgccgcgcagcgtagtggcatcgccgtcgctgctggcgaactatccgccgttaaccgagccgcaggagatgtcgctgctgccctgggtagccatcagcacgttctatcagcatgaggtgatgctgcaatcagaggtggatgagcagcttacaacctttagcattgctccgtgcctgagtaccgacagcgtacatgtcgcccgcaataccgcgctggcggggctgggcgcggcgattgtttcgagctgggcggtagcggaggatattgccgccgggcggctggtggagctattcccgcagtggcgtgcctctccgctgccggtacatcttgtctatccctgggcacgctattatccgacgcggttgcgtaagtttctcgatttgatgcgcgaggttatgccgcagattgcggggatgcagcgaccggaaggggaataa

SEQ ID NO: 174213 - DNA, 1215 bp, Klebsiella oxytoca
atgacaccgacaccactcacctcccgcgcagccggctgggtaatttttatccttgcgctcggcgcaggcttcagcgttgccgctatctattacgcgcagccgctgctgccgctaatgggagcaaacctgcatttgagcgttgagggtatgggtctggttccgaccctgactcaagcgggctatgcgctgggtatacttttccttctaccgcttggcgaccgtcacgatcgcagaaagctgatcctgatgaaaagcgccgcgctggcggtcctgttgctgctctgcagccttaccggtcagctcacctctctgttgatggttagtttgctgatcgggatggctgcgacaatggcgcaggatatcgtaccagctgccgcgattctggctcctgcgggtaaacaagggaaaatggtgggtacggtcatgactggcctgctgctggggatcctgctgtcacggacggtgagcgggctggtgggtgcgctattcggctggcgggtgatgtatcaggccgctgcggtcagtattgcactgattggtctgctgatgtggcgcgtgctgccgcgctttgaaattcactcaaacctgacttatccgcagctgataaaatcgatggcccacctgtggaaacgctatccggcactgcgtcgcgccgcattcgcccaggggttcctctctatcgccttcagcgcattctggtccaccctggcggtcatgttactggcgcactatcaaatgggcagcgcggtagccggcggctttggtattgcaggcgctgccggggcgctcgccgccccgctggctggcggcctggccgataaattcggagccgaaaaagtcacgcaaatgggcgcggcgctggttaccgtttcttttgccctgatgtttctgctgcctgcgctaccgccgcatggccagctgatcctgattgccatctcggccgtcggttttgaccttggactgcaatccagcctcgtggcgcaccagaacctggtgtatggtctggagcctcaggcgcgcggtcgtctcaatgcgctgttgtttaccggcgtgtttatcggaatgtcgctcggctcagtgctgggaagcaaactgtatgtgatagcaggctggagcggtgtagtgactctcgccgtcattaccggcgctatcgccctcggcatccgcctgatagaaagcgcgagggtcgtttcggcgcaacgaaccgtcaggtaa

SEQ ID NO: 174214 - DNA, 1536 bp, Klebsiella oxytoca
atgaatcttttaaaatcactggcggccgtcagttcgatgaccatgttttcgcgcgtgctgggttttgcgcgcgatgcgattgtggcgcgtatttttggcgcagggatggccaccgacgccttcttcgttgctttcaaacttccgaatctattacggcgtatttttgctgagggcgcgttctcacaggcttttgtgccgattctggcggaatataaaagcaagcagggtgaagatgcgacccgggttttcgtcgcctatgtttcgggcttgctgacgctggtgctggcgctggtgaccatcgctggtatgctggcggcaccgtgggtgatcaccatcaccgcgccgggatttgccaatacgcccgaaaagttcgccctgaccactcagctcttgcgcatcacttttccctatattctgctgatctccctggcttcactcgtgggcgccatcctgaatacctggaaccgcttttcggtgcctgcttttgctccgactttcctgaacgtcagcatgattggttttgcgctgtttgccgcgccctactttaatccgccgatgctggccatggcgtgggcggtgacggttggcggtattttgcagcttgcctggcagctgccgcatttgaagaaaatcggcatgctggtgctgccgcgaatcaacctcaaagatgctggcgcggtgcgggtggtgaaacagatggggccggcgatcctcggcgtctcggttagccagatttccctgatcatcaataccatttttgcctcgttcctcgtctccggctcggtgtcatggatgtactatgccgatcgcctgatggagtttccgtccggcgtgctgggcgtggcgctggggaccattctgctgccttctctgtccaaaagttttgccagcggcaatcacgacgaatactgccgtttgatggactggggattgcgcctgtgctttctgcttgcgctaccgagcgccgtggcgttagggatactggccaagccgctgacggtcgcgttattccagtacggaaaatttaccgcctttgatgccgcgatgactcagcgcgcgctggtcgcttattccgttggcctgatgggactcattgtggtgaaggtactggctcccggcttctattcgcgtcaggacattaaaacgccggtgaaaattgccatcgtcacgctgatcatgacgcaggttatgaacctcgcctttattggtccgctaaagcatgccggtctgtcattgtcgattggcctggcggcctgccttaacgccgggctgctctactggcagctgaggaaacagaaaattttcacccctcagcccggctggttcctgttcctgctgcgcctggtgattgccgtcatcgtgatgtctgcggcgctgctgggcgtgatgtacctgatgccggagtggtcgcaggggacgatgccgttccgcctgctgcgtttgatggtagtcgtggtagcgggtgtcgtcgcctatttcgcgacgctgttgctgctgggcttccgcgtcaaagagtttgctcgccgcacggtctga

SEQ ID NO: 174215 - DNA, 924 bp, Klebsiella oxytoca
atgtcggcgaaactacgcatcggcgtcgttggtttaggtagcattgcgcaaaagggctggctgccggtgctgggagcagcggatggctggacgctacaggcggcgtggtcgccgggaaaagagaaagcgctgcgcatctgtgaaacgtggcgtatcccctatgcggatactctggaacagctggcggcgcagtgtgatgctgtattcgtccatacttcaacggtttcacattatgaagtggttagtcggttactcaatgccggagttcatgtctgcgttgataaaccgctggccgacaagcttagcgatgcggagacgttggttgagctggcggcccgccgccgtcttactcttatggtcggatttaatcgccgcttctcccctctctatcgcgaacttaaagctcagctcggtaacgcggcttcgctgcggatggataaacaccgtagcgacagcgtgggccacgatctgcgctttacgctgctggatgactatctgcatgtcgtcgacaccgcactatggctggcgggcgataaagcccgtttaaacggcggtacgctgctcacgacggcccagggtgaaatgctttatgctgaacatcatttcagctgcgggatgatccaaatgaccaccagtatgcaccgccgcgctggaagccagcgggagtgggtgcaggcggtaaccgacggtggattatatgaagtccgtgatatgcgggagtggcaggaggagcgggggcgcggcgtgatccagcgtccggtccccggctggcagaccacccttgagcaacgaggattcaccggctgcgcccggcattttatcgaatgcgtgcaaaatcagacggttcctgaaacctccggcgaacaggcgctgcttgctcagcgtatcgtggagaaactctggcgcgaagcaatgagcgaataa

SEQ ID NO: 174216 - DNA, 648 bp, Klebsiella oxytoca
atgaaatatcagttaaccgcgcatgaggcgcgagtcattggctgtctgctggaaaagcaggtcaccacgccggagcagtaccccctgtcggtcaacgcggtggtgaccgcctgtaatcagaaaacgaaccgtgaaccggtgatgtcgctcagcgaaaatgacgtgcaggagctcctcgatacgttagttaagcgtcattttttgcgtacggtaagcggtttcggcaatcgggtgaccaaatatgaacagcgcttctgcaactctgaatttggcgacctgaaattaactccagcggaagtggcaattattaccacgttgctgctgcgcggggcgcagacgcccggagaactgcgcgggcgggcgcagagaatgcatgaattcagcgatatggcagaggtggaaaacgtcctcgaaaatttggctacgcgagacgacggcccctatgttgcacgtctgccgcgggaacccgggaagcgtgaaagccgctatatgcacctgttctgcgatgatatggattcgctgattaccgccgttgaagccgtttcgccggcgggtgacgatctccaggcccgcgttgaggcgctggaagcggacgtcgctgaacttaaagcgcgtctggattcactgctgcctcattcaggagattaa

SEQ ID NO: 174217 - DNA, 585 bp, Klebsiella oxytoca
atgtttggctatcgcagtaacgtaccgaaggtgcgtttgacgacggatcggctggtggtgcggctggtacacgatcgtgacgcctggcgtctggccgattactacgcggaaaataaagggttcttaaaaccctgggaaccagtgcgcgacgacagccactgttatccttccggctggcaggcgcgtttatcgatgatttcggagtttcacaagcagggttcggcattctattttgcgctgctggaccctgaagaaaaagagattatcggcgtggcgaatttttcgaacgtggtgcgcggatcgtttcatgcctgctatctcggttactctatcggagagaaatggcaagggcaggggctaatgtttgaagcgctgacgtcggcaattcgctatatgcagcgcacgcaacatatccatcgcataatggcaaactatatgccgcataatcagcgtagcggtgatttgctggcgcgtctgggttttgaaaaagagggttacgccaaagattacctgctcattgatgggcagtggcgcgatcacgtactgacggcgttgacgacaccggactggaccccgggtcgctaa

SEQ ID NO: 174218 - DNA, 1209 bp, Klebsiella oxytoca
atgtcccgcgtatcgcaggcaaggagcctgggtaaatatttcctgttagttgataacatgctggtcgtactcggctttttcgtcgtgttcccgctcatctctattcgctttgtcgatcagatggggtgggccgcgctaatggtcggcattgcgctcgggctgcgtcaactggtgcagcaaggtttagggatattcggcggtgcgattgccgaccgttttggcgccaaaccgatgatcgtcaccggcatgctgatgcgagctgccggtttcgccgcgatggccgtcgcccatgaaccatgggtcctgtggttatcctgcatactctccggtctcggcggcacgctgttcgatcccccgcgggcggcgttggtggttaagctggttcgcccacaccagcgcgggcgtttcttctccattctgatgatgcaggacagcgccggggcggtgatcggcgcgctgctgggtagctggctgctgcagtatgattttcgtctggtgtgcagcgctggagcggccctgtttatcgcctgcgcggcgttcaatgcctggtatctcccggcctggaagctgtcaacggttaaaacgccggttcgtgaagggctgggccgcgtgctgcgtgacaaacgatttgtcacctacgtcttgacgctaaccggatattacatgctggcagtacaggtcatgttaatgctgccgattatggttaacgatattgcgggttctccggcggcggtaaaatggatgtatgccatcgaagccaccatttcactgacgctgctttatccgattgcccgctggagtgaaaaacggtttcgccttgagcatcggctgatggccggactgctgattatgacgctggcaatgatgccgattggcctgagcagcaatctgcagcagctgtttacgctgatctgcgtgttttatatcgggtccatcatcgccgagcctgcgcgcgagacgcttggcgcttcgctggcggatgccagagcgcgcggcagctatatgggctttagccgtctgggattagccttcggcggcgctttcggctacgcaggcggcggctggctgttcgatgccggtaaggccacgggtcagccggagctgccgtggctgatgctgggcgcgatcggtcttgcgacgtttgttgctctgtggtggcagttcagtccaaaacgttcaacgtccggtatgctcgagccgcgcacctga

SEQ ID NO: 174219 - DNA, 648 bp, Klebsiella oxytoca
gtgaagttatatatctacgatcactgcccgttctgcctgaaagcccgcatgattttcggcctgaaaaatatccctgtcgaactgatcacgctcctgaacgatgatgaatcaaccccaacccgcatgatcggccagaaaatggcgcccatcctgcaaaaagacgatagtcgctatatgccagaaagcatggatatcgtgcactatgtcgataaacttgatggaaaaccgctactgaccggagcgcgtaacccggctattgaaacctggctgcgcaaggtcaacgtctacgcgaatcgtctgttgatcccgcgtttcgccaaatccgcatttgatgaattctcaaccccagaggcgcgcgcttattttgtgaataagaaggaagcggctattggtagctttgccgatcacctcgcccattctaccggtctggttaagaacatcagcgacgatctgcgcgcgttggataaacttatcgtccagccaaacgccgtcaacggagagctgtctgaagatgatattcatctcttcccactcctgcggaatctgacgctggttgccggggtgaactggccgagccgcgtggccgcctatcgcgacaatatggctaaacagacgcaaatcaatctgctttcctcaatggctatttaa

SEQ ID NO: 174220 - DNA, 561 bp, Klebsiella oxytoca
atgaaaaagatgtttatcgcggccgcgcttatcgtcagcggcctgctgagcggctgtaatcagcttacgcaatattccgtgagtgagcaggagatcaaccaggcgctgcagaaacgtaaccacttcgccaaggatattggcctgcccggcgttgcggatgctcatattgaactacaaaacctgaccagcgcgattggtcgtgaagaacccaataaagtgacgctaagcggcgttgctaatttagatctgaattcactattcgggaaccagaaagcgaccattgacctgaagttaaaagcgctgccgaccttcaacaaagagaaaggcgccattttcctgcaggagatggaggtggtggacgcaaaggttcaacctgaaaaactgcagtccgtggtacagacgctcattccttacctgaatcagtcgctgcgtagctacttcaatcagcagcctgcctacgtcctgcgcgaagacgccagtgcgggcgaagcgttggcgaaaaagtatgctaaagggattgaggttaagccgggtgagattattatcccgttcactaactaa

SEQ ID NO: 174221 - DNA, 1047 bp, Klebsiella oxytoca
atgacagcacaatcccaggtattgaaaatccgccgccctgacgactggcatatccatctgcgcgatgacgatatgttaaaaaccgtcgtgccttacaccagtgagttttatggccgggcgatcgtgatgccgaatctggtaccccctgtcaccaccgtcgaagccgcccttgcctatcgccagcgcatcatggcggcaatcccggcgggccacgattttacgccgctgatgacctgttatctgacggatacgctcgaccctgctgagctggaacgcggattcaacgagggcgttttcaccgccgccaaactttatccggccaatgcgaccaccaactccagccacggcgtcaccagcactgatgcaatcatgccggtactggagcgcatggaaaagctgggaatgcccctgctggtgcacggtgaggtcactcacgcggacatcgatatttttgacagagaagcgcggttcattgaaaccgtcatggagccgctgcgtcggcgcctgccgggtctgaaagtggtgttcgaacacatcaccaccaaagatgccgctgaatacgtacgcgacggcaatgagctgctggcggcgaccatcaccccgcagcacctgatgtttaaccgcaatcatatgctggttggcggcgtgcgtccccatctatattgcctgccgatccttaaacgcaatattcaccagcaggcgctgcgcgaactggtggccagcggttttgaccgcgccttcctcggtactgattccgctccgcatgcccgccatcgtaaggaagccagctgcggatgtgcaggctgttttaacgccccgaccgccctgggcagctacgcaacggtgttcgaggagatgaacgccctgcagcactttgaagccttttgttcgcttaacggccctcgcttctatggtctgccggtcaatgaaggctacgttgagctggtgcgcgaagagagcctggtggtagagagtatcgctctgcctggcgacgcgctggtgccgttcctggcaggagaaaccgtgcgctggagcatgaagaaataa

SEQ ID NO: 174222 - DNA, 246 bp, Klebsiella oxytoca
atgcgtattgaagtctctatcgccaaatcgacagccttacccaacggcgctttagatgcgctgaacaatgaactctcccgccgtatcgaacagcagttcccctcgacgtcaagccaggtgacggttcgctacgcggctaataacaatctgtcggttatcggcggcctgaaagaagacaaagaccggattagcgaaatcctgcaagaaacctgggaaagcgctgacgactggtttgtccgcgactag

SEQ ID NO: 174223 - DNA, 255 bp, Klebsiella oxytoca
atggaaaagaataatgaagtcatccagacccatcccctcgttggatgggacatcagcaccgtagatagttacgatgcgctgatgttgcgcctgcactaccaaaaccccgctcaagaaagcagtagagacgcagagattggccagacgctatggctaacgacggacgtcgcacgtcagtttatttctattctggaagcaggtattgcgaagattgaatcaggcgaataccaggaaaatgagtatcgaaggcattaa

SEQ ID NO: 174224 - DNA, 1119 bp, Klebsiella oxytoca
atgcaatacgatcttatcattatcggtagcggctccgtcggcgctgccgcaggctattatgctcgccaggcagggcttaacgtactgatgattgatgcccatcagcctccgcatcaggaaggtagccatcacggcaccacccgcctgatacgtcatgcttacggcgaaggcgaaagatacgtccctctggtactacgcgcacagaagctatgggatgagtttgccgccgccagtggggaagccgtttttgagcgtacaggggtgattaacctcgggcctgccgactccgactttctgcgcaacgtggccagcagcgcgcgcgagttccagctcaatattgaagaaatggatgcgcagacagtgatgactcgctggccggaaattcgtattcctgacgattaccgggcgatatttgaacccgcatccgggatactgcgcagcgaactggccgttgaaacctggatccgtctggcacgcgaagcgggagccgcgcaattgttcaactgcccggtttctgctattcaccaccaaccgaacggcgtaaccgttgagacgctggacggcgagtacagcggcaaaaaactccttgtcagcgccggtacctgggttacgcgtctgttgccagaactccctgtccaaccggtacgtaaaattttcgcctggtttcaggccgatggtcgctacagcagcaaaaataacttcccggcgtttaccggcgagttagccaatggcgatcagttttacggtttcccggcagaagataacgaattaaaaatcggtaagcataacggcgggcagcttatttccactccggaggagcgcaagccgtttggctctgttgcaaccgacggttcagaatcttttagcttcttgcgtaacgtgttgcccggtatcggcggctgcctgcacggcgcatcctgcacctatgacaatactgctgacgaagactttattattgatatgctacccggccagccggatacgctgctgatcaccggcctgagcggtcacggctttaaatttgctccggttttaggcgaactggccacacggttcgcgcttgaagaaccctttggatttgatctatctgcgttttcactggcgcggtttaataaataa

SEQ ID NO: 174225 - DNA, 1065 bp, Klebsiella oxytoca
atgccagtgttgcataaccgcatttcaaatgagacgttaaaagcgcaaatgttggctgaaaccgagccgcgcacgacgatctcgttttataaatatttctctattattgacccgaaagccacgcgcgatgcgctgtggattgcgctgactaagcttaatgtctttggccgaatttacctggctcatgaagggattaacgcgcaaatcagcgtcccgcaaagccgggtcgatgcgctgcgcgaattcttatacggttttgaccccgccctcaatgggctccgcctgaatatcgctctggacgatgacggtaaatcattttgggttctgcgcctcaaggttcgcgatcggatcgtggcggatggaattgacgatccgacatttgatgccacggacgtgggggattatctgaaagccgcagaggttaacgcgatgctggacgatcccaatgcggtctttattgatatgcgcaatcactacgagtatgaggttggccatttcgagaacgcactggagatcccggcggatacttttcgcgaccagctaccaaaagccgtggagatgatgcaggaacataaagataagaatatcgtgatgtactgcaccggcggtatccgttgtgaaaaagccagcgcctggatgaagcacaacggatttactaaagtctcgcatattgagggcgggattatcgagtatgcgagacgcgcccgcgaacaggggctgccggtacgctttgtcggtaaaaactttgtcttcgatgagcggatgggagagcgtatctcagatgacgttatcgcccattgccatcagtgcggcgctccgtgcgatagtcataccaattgcctgaatgatggttgtcatctgctgtttatccagtgtccttcctgcgcggagaaattcgccggctgctgtagcgaagcctgcatggaagaacataagctgccggaagaggagcagagaaaactgcgtgccggacgggaaaatggcaataagatctttaataaatcccgcggtcgtctgaatactaagctggggatccccgatcctgagccgtcagaaaaaccataa

SEQ ID NO: 174226 - DNA, 921 bp, Klebsiella oxytoca
atgacccatttacctaaattttccgcagcgttgctgcacccgcgttactggttgctttggttaggaatcggcctgctgtggttggtagttcagctgccttatccgctgatttatcgcctcggtactggtcttggccgtatcgccatgcggctaatgaagcgccgggccaaaatagcccatcgcaatctggagctctgttttcctgataaaagcgagcaagagcgtcaccggatggtcgtggcaaactttgaatccgtcggtatggggctgatggaaaccggtatggcctggttctggccgacgaagcgtattgcgcgctggacggactccatcggcgtagagcatatccgcgatgtacaggcgcaaaagcgcggcattttgcttattggcattcattttctgaccctggaaatgggcgcccgcatgttcggcatcaatgagccgggtatcggggtttatcgccctaatgataacccggttatcgactggctacagacctggggacggctgcgctccaacaaagacatgatcgatcgtaaagatctcaagggtatgatccgcgcattgaaaaagggagaagtgatctggtacgcgccggaccacgactatggccccgccgccagcgtgtttgtgccgtttttcgccgttgaccaggccgcgacgacctccggcacctggatgctggcaaagatgtcaaaagcctgcatcgtccccttcgttccgcgccgtaaacccgacggtaaaggttatgagctgatcatcctgccgccagagtgcgatccgccgctggacgatgcggagacgaccgctctgtggatgaataaagttgttgagaaatgcatattgatggcgccggagcagtatatgtggatgcaccgccgctttaaaacgcgtccggaaggcgttccttctcgttattaa

SEQ ID NO: 174227 - DNA, 1251 bp, Klebsiella oxytoca
atgtcgtctgctgatacccctattaactggaaacgtaatctcaccgtcacctggctcggctgctttttaaccggggcggcctttagcctggtgatgccatttctccctttgtacgttgaacagctcggcgtcaccggccacagtgccctgaatatgtggtcagggctggttttcagcattacctttttattttctgccgtagcttctcccttctggggcggactcgcggaccgcaaagggcgcaaaataatgctgctgcgctcagccctcggtatggctatcgtcatgctgctcatggggctggcgcagaatatctggcaatttctgatcctgcgcgcgctgttaggcctgctcggcggatttattcccaacgccaatgcgctgatcgcaacgcaaatcccccgccataagagcggctgggcgctggggaccctctctacgggggccgttagcggcgcgctgctggggccgctggctggcggcttcctggccgaccactgggggttacgcaccgtcttctttatgacagcaagcgtactgtttatttgtttcttatttaccctgtttctcatccgcgagaattttgtcgcggtcagcaaaaaagagatgctcagcgcgaaagacgtcttttcgtcgcttaaaagtccaaagctggtgctgagcctgtttgttacatcactgattatccaggtcgctaccggttccatcgctccgattctgacgctttacgtgcgcgatcttgccggcaacgtaagtaatattgcgtttatcagcggtatgatagcttcagtccccggcattgccgccctgcttagcgcccctcgcctcgggaagctcggcgatcgtattggtccggagaagatcctgatcgtcgcgctggtgatttcagtcctgctcctgattcctatgtcgttcgtccagacgccgctgcaattggggatcctgcgcttcctgctaggcgccgctgacggcgcgctgctgccggcggtacagacgctgctggtgtataactcgaccagccaaatctcgggcagaatattcagctataaccagtcgtttcgcgatatcggcaacgtcactggaccgctgatcggcgcgtcggtttccgccaactacggttttcgggcggtctttctggtgaccgcatttgtggtgctctttaacgcggtttactcaactctgacccttggccgcgttcgtcgtcagcgggctacggacaatccgggttccggcaatcattcggtaaattaa

SEQ ID NO: 174228 - DNA, 387 bp, Klebsiella oxytoca
atgccaaaggattcgatgttctatgccacgctcgaagaagcaatcgatgcagcccgcgaggagtttctggctaataatccggacagcgacgaagaaagcgccagcattgagcagttaaatatccagaagtacgtgcttcaggacggtgatattgcctggcaggcagaattttttgccgacgaagatcagcagggagaatgcctgccagtactcagcggccaggctgcgcaaagcgtctttgacggtgattatgatgagattgagctgcgccaggagtggctggaagagaacacgctgcatgaatgggatgaaggtgaatttcagcttgaaccctcgctcgataccgaagagggccaggctgcggccgatgaatgggatgaacgctaa

SEQ ID NO: 174229 - DNA, 228 bp, Klebsiella oxytoca
atgagagttttgctggttatcgcaatgacgctgctgctgagcggctgcgggagtattatcagtcgcacggtgccagggcagggccatggaaatcagtactatcccggcgtgcaatgggatgttcgtgattcctcatggcgctatatcacgatcctcgatctgcccttttcgctggtgttcgatacgcttctgctgccgcttgatgccagccatgggccttacaactaa

SEQ ID NO: 174230 - DNA, 2529 bp, Klebsiella oxytoca
atgaataagataacgaagtacatcgatgcattgccgctgtcggatgcagaaaagcgcgcgttacctgacgcgagtctgcaggccgtacatcaagcactggacgctgaacatcacgtttataaacgggaagatgactccccgctggggtcggtgaaagcccgactggagcatagctggccagattcactggccggtaatcagctggtgaaggatgatgaagggcgcacgcagctgaacgccatgccgaaagcaaaacgttcctctatgttcccggacccatggcgtactaacccggtcgggcgcttctgggatcgtctgcgcggacgcgatgtgactccgcgctatctctctcgcctcagtcaggaggaacaggcgagcgagcagaaatggcgtaccgtcggctctattcgtcgctatattcttctgctgctcaccctggcgcagaccgtcgtggcgacctggtacatgaaaaccattttgccctaccagggctgggcgctgattaacccggcggacatggtgggacagaacctgtggatctcctttatgcagctgctgccgtatgtgctgcagtccgggatcctgattcttttcgccgtgcttttttgttgggtttctgcgggtttctggactgcgctgatgggcttcctgcagctacttatcggccgcgataagtacagtatctccgcgtcaacggtcgggaatgagccgttgaatccggagcatcgcaccgcgcttatcatgcctatctgtaacgaagacgttgaccgcgtattcgcgggcctgcgcgcgacctgggagtcggtaaaagccagcggtaatgccgagcactttgatgtctatatcctgagcgatagctacaacccggacatctgcgtggcggagcaaaaagcgtggatggagctgattgccgaagtgcagggcgaagggcagatcttctaccgtcgccgccgccgccgcgtgaagcgtaaaagcggtaacattgatgacttctgccgtcggtgggggagccagtacagctatatggtggtgctggatgccgactccgtaatgagcggtgaatgtctgagcggcctggtgcgcctgatggaagcgaacccgaatgccgggatcattcagtcttcaccccgcgcgtcgggtatggatacgctctatgcgcgctgccagcagtttgctacccgcgtctacggcccgctgtttaccgccggtttgcacttctggcagttgggggaatcccactactggggtcacaacgcgattatccgggtgaaaccgtttattgagcactgcgcgctggcgccgctgccgggcgagggcaacttcgccgggtcaattctgtcgcacgacttcgtggaagcggcgctgatgcgtcgcgccgggtggggcgtatggattgcttacgatcttcccggctcttatgaagagctgccgccaaacctgctggacgagctgaagcgcgatcgccgctggtgtcagggtaacctgatgaacttccgcctgttcctggttaaagggatgcatccggttcaccgtgcagtgttcctgaccggcgtgatgtcatacctgtcggcaccgctgtggtttatgttccttgcgctctctaccgctctgcaggtagtgcatgccttgaccgaaccgcagtacttcctgcagccgcggcagctgttcccggtctggccgcagtggcgcccggagctggctatagccctgtttgcttcgaccatggtgctgctgttcctgccgaagctgctgagcattattctggtttggtgtaaagggcctaaagagtacggtggctttatccgcgtcacgctctctctgctgctggaggtgctgttttcggtgctgctggcgccggtacgtatgctgttccataccgtctttgtggtcagcgcgtttctcggctgggaagtggtgtggaactcgccgcagcgtgacgatgactctaccccatggggtgaagcgtttatgcgtcacggatcgcagatgctgttgggtctggtctgggcggtgggcatggcatggctggatctgcgtttcctgttctggctggcgccgatcgtggtctcgctgattctgtcgccgttcgtgtcggctatttccagccgcgccaccattggcctgcgcactaagcgctggaagctgttcctgatcccggaagagtactctccgccgcaggtgctaaaagatactgacgcttacctgacgcttaaccgccagcgttctctggacgatggctttatgcatgcggtattcaacccgtcgtttaacgcgctggcaacagcgatggctaccgcgcgccaccgtcacgggcatattctggatatcgctcgcgaacgtcacgttgaacaggcgctgaacgagacgccggataaacttaaccgcgatcgtcgtctggtcttgctgagcgacccggtgaccatgtcgcgtatgcattatcgcgtgtgggccgctccggagaaatactcttcgtgggtggcagcttatcagcagctgacgctgaatccgctggcgttaaaaaccaagtaa

SEQ ID NO: 174231 - DNA, 1554 bp, Klebsiella oxytoca
atgaaacataaaccacagatgatgaaaatgcgttggttaagcgcagccgtaatgttgtccctgtgtacttcatctgcatgggcattcagcattgatgacgtcgcaaaagaggcacaaacgttagccggcaaaggctttgaagcgcctaaaagtaacctgccctctgccttccgcgatatgaagtatgcggactatcagcaaattcagtttaatcacgacaaagcttattggaataatctgaaaagcccattcaagctcgagttttatcaccaggggatgtatttcgatacgccggtcaccattaatgaagtgacggcaaccagcgtacgtaaaattaaatatagcccggactattttaattttggcaacgtccagcacgacaaagacacggttaaagacctcggctttgcgggcttcaaagtcctgtatccgatcaacagcaaagacaagaatgatgaaatcgtcagcatgctcggagccagctatttccgcgtgcttggccagggtcaggtatacggtctttccgctcgtgggctggcgattgataccgcgctgccttccggcgaagagttcccgcgttttcgtgagttctggattgagcgtccaaaagcgaccgataaacgcctgacgatttacgccctgcttgattccccgcgcgcaactggcgcctatcgtttcgtgattatgcccggccgcgacaccgtagtggacgtgcagtctaaggtctatctgcgcgacaaagtcggcaagctcggcgtggcgccgttgaccagtatgttcctgtttgggccacatcagccgtcgccgaccacgaactatcgtccggcgctgcatgactccaacggcctgtccatcctggccggcaacggcgagtggatctggcgtccgcttaataatccaaaacatcttgccgtcagcagctatgcgatggaaaacccgcagggctttggcctgctgcagcgtggtcgccagttctcccgttttgaagatctcgatgaccgctacgatctgcgccccagcgcatggattacgccgaaaggtgattggggtaagggcaaaatcgaactggtcgaaatcccgaccaatgatgaaaccaacgataacattgtcacctactggacgcccgatcagctgcccgaacccggcaaagagatgaatttcaaatacaccatcacttttagccgcgatgaagacaagctgcacgcgccggataacgcttacgttatgcagacccgccgttctaccggcgacgtcaagcaatcgaacctgattcgccagcctgatggcaccatcgcctttattgtcgatttcaccggcgccgagatgaaaaagctgcccgcagatacgccagtgactgcccaggccagcatcggcgataacgctgaaatcgttgaaaacaccgtgcgttataacccagtgactaaaggctggcgtatgatcctgcgcgtcaaagtgaaagatcctaagaaaaccacggatatgcgcgctgcgctggtcaataccgaccagacgctgagcgaaacctggagctatcagctgcctgccaatgaataa

SEQ ID NO: 174232 - DNA, 1161 bp, Klebsiella oxytoca
atgaataatactccggtacagcgtgaatattttttcgatagcatccgcgcctggctgatgctgttggggatcccttttcacatctcgcttatttactccagccacagctggcacgtcaacagcgcagagccgtcgtggtggttgacgttgttcaacgacttcatccatgcctttcgcatgcaggtcttctttgttatttccggctatttttcctacatgctttttctacgctatccactgaagaaatggtggaaagttcgcgttgagcgggtaggcattcccatgttaactgccatccctcttttgacgttgccacagtttattatgctgcagtacgttaacggaaaagcggaaaactggcacacgctttcaggctatgacaaattcaatacccttgcctgggagctgatttcccacctgtggtttctgctcgtcctggtggtcctgacctcgttgggcgtagtgatgtttagttggctgacgcgccagcgttctgccgctgcgccagccttcggtgacaccgtcacattaggtcagctatcgatgatttttcttgccctgggcgtgctgtatgcggtcattcgccgcaccctttttattctttacccgcccattctcagcgacggcctgttcaatttcgtcgttatgcagacgctgttttatctgcctttctttattctcggcgcgcagacgtttatcaattcacgcctgaagctcatgttcactacgccctccccctggtgctataccgcagcgctactgggttttatcgcctatcgtctgaatcagcagtacggctccggcgatggctggatgtatgaaacggaatccgtgattaccatggtgctggggctatggatggtcaacgtggtcttttcgcttggccaccgtctgctaaatttccagtccgcgcgggtaacctatttcgtcaacgcatcgctgtttatctatttagtgcaccatccattgactctgctctacggggcgtggatcacgccgataattaagtccaatacgctgggatttattaccgggctggtatttgtggtgggtattgcgctggtcctgtatgaaatccacctgcgaataccgctgttgcgctttcttttttccggaaaattccagcaaaaaacggcgaagccgcagacttctgccggttaa

SEQ ID NO: 174233 - DNA, 609 bp, Klebsiella oxytoca
atgacaggagatttatcggtggctgaagggaaggttctacaaaaacaacggcttcgccggacggagattgtggtcgcggcgcaaaaatgctttgctgaaaagggcctgcacggcgcctcagtggcggatatcgcgcgccgggctggtctgagcgtcggccagctttatcgtgtttttgccagtaaagaagagattatcgaagtcatcgtcagcgagatcgtgaatgccagagttggcgagatggttgccgggaatcatgatttggcccgcatggcgtcggttttagccggcgcgatcccggcgagcgagaatacgaaaaatgataattatctgctaatggagattaacgccgaagcctcccgaaatccgcgcctgcgagaaatcatgaaccaggccgatcgacgcctgaaggaagaggggggaaaacttacccggcactaccaccccgaaatgaccgctgaacaaattagcatcgcctgcgaatttatcgcgatattaaccgaaggggcggcgtatcgctgcgacctggcgactgccccgacggtggataaagcggcgatggaaatgctttatcgcgatgtctttaacctggtgttcacgcgaaaatag

SEQ ID NO: 174234 - DNA, 555 bp, Klebsiella oxytoca
atggctgttcaacctgaggtaattctcggcgacattaccacgctggcggtcgacgttatcgtcaatgcagcaaacccttcgctgctgggcggaggaggcgtagacggcgcaattcaccgcgcagcaggcccggatctgctggctgcctgcaaagttgtgcgccagcagcagggggagtgtccgccgggccatgcggtgataacgacggcaggaaatctgcccgccagcgcggtcattcatgccgtcgggccgatctggcacggtggtgacaggcaggaggcggaattactggcggacgcctataaaaatagcctgcagctggcctcggcgaacaattaccgctctattgctttccccgctatcagcaccggcgtttacggctaccctaaacacgctgccgccgagatagccattaatacggtgaatgtatttcttactcgctaccatcctctggaacgcgtttgtttcgtctgctttgatgccgaaaccgccagtatctataaccgattactggaggagagtcgggcacaactcggtcgccataataagttatga

SEQ ID NO: 174235 - DNA, 306 bp, Klebsiella oxytoca
atgaaaacaattagatacatatcacttgcggccctgttttttttacccacgagtttcagcccggcgattgccgaacagacagtcgccggtgttattcatttctatggaagagttgtggaagcgccctgtcagctcaatgctatcaagaatcaggtggtgatggattgtccgagggcggaaacggtgcggatctctgcccgtcagctggagaaaggggatgttcacaatgaaaatatccgttccgcgcagttgagatatattaacccacaacggactctcgctattctggacgttgattatcgctaa

SEQ ID NO: 174236 - DNA, 495 bp, Klebsiella oxytoca
atgatacgcgccatgaacatactcttcgcaatcgcattaacgacgggcttactctctgcaatttggggatgggtagcggtcgcactgggtctgctgagctgggcgggatttctcggctgtacggcttactttgcctgtccgcaaggtgggttaaaagggctggttatttccacctgtacggtattgagcggcgtagcgtgggcgctggtgattattcacggcagcgcgctggcgcctcagctggaaatagtgagctatatcatgaccggtatcgtggcgtttatgatgtgcattcaggcgcgccagctattactctcttttgtgccgggcacctttatcggcgcctgtgcgacctttgccgctaacggcgactggcgtttggttttaccttcactggcgctggggctggtctttggctatgccatgaaaaatagcggcctgtggctggcgacgcgggcggaaaagaataaatcccttgctaacgaaagtcgttaa

SEQ ID NO: 174237 - DNA, 555 bp, Klebsiella oxytoca
atgaacgagttttcaatcctctgccgcgtgctgggctctctctattaccgtcagccgcaggatccgctgctggttccgctatttacccttattcgcgaagggaagctggcggcaagctggccgctggagcaggatgaactgctggagcgcctgcaaaagagctgcgatatgcaggctctggctgctgactacaacgcgctgtttgtcggtgaagagtgcagcgtagcgccatttcgtcgctcatgggtagagggcgctacggaagctgaagttcgagctttcctcagcgcgcatggcgttcccacgggtgagggcgcggcggatcacttaggatccttactgctggccgcatcgtggctggaagatcacgcggcagaagatgaaagcgaagttctggaaacgctgtttgctgagtatattctcccctggtgcggcgcattccttggcaaggttgaagcgcatgcgactacgccgttctggcgcacgatggctccgctaactcgtgaagcgctttcagccatgtgggatgaactccaggaagaaggtgaacaataa

SEQ ID NO: 174238 - DNA, 738 bp, Klebsiella oxytoca
atgtatcctgttgacctgcacatgcataccgtcgccagcacccacgcttacagtaccctgcacgactacattgcggaagccaagcgcaaggggatcaaactctttgccattaccgatcacgggccagatatggccgatgcgccgcaccactggcattttatcaatatgcgtatctggccgcgtctggtggatggcgttggtattctgcgcggtattgaagccaacattaaaaatacgcagggcgaaatagactgtaccggcccgatgctcaattcgctggacctgattattgctggctttcacgagccggtgtttcctccgcaggataaagccacgaatactgaggccatgatcgccaccatcgcgagcggtacggtgcatatcatcagccatccggggaacccgaaatttcccgttgatattccggctattgccgccgccgcggcgaagcaccatgtggcgctggaaatcaataactcatcttttgtctcgtcacgcattggcagtgaagataattgccgtgccgtcgcggcggccgtacgggatgccggcggttgggtggcgttgggctcagattctcatacggcattcacgctcggtgattttaccgaatgccgtaaaatccttgatgccgtagattttccgcaagagcggattctaaacgtgacgccccggcgtctgcttaatttcctggaatcgcgtgggatgccagcgattgcggaatttgctgaactttaa

SEQ ID NO: 174239 - DNA, 939 bp, Klebsiella oxytoca
atggatatcattttttaccacccgacctttgacacccctttctggattgcggaactggaaaaacagctccccagcgcgcgagttcgcgagtggaaatccggcgatgaacaacccgctgactatgcgctggtctggcatccgccggtagaaatgctgcaaggccgcgatttaaaagccgtctttgcccttggcgccggcgtcgattccatcctgagcaaactgcgtgagcatccggaaatgctgccgttgtcgacgccactattccgtctggaagacaccggcatggggttacaaatgcaagagtatgcggtgagccaggtgctgcactggttccgtcgttttgatgactatcaggctttaaagcaagaagcgcgctggcagccgctggaggagtatcagcgcgaagactttcccatcgggattatgggggcgggcgtgcttggcgcaaaggtcgccgaagctctgcagtactggggattcccgctacgcatctggagccgcagccgcaaatcctggccgcaggtcaccagctttgccggggaaaaggagctgaacgccttcctgaacggaacacgagtgctgattaacctgttgcccaacacggcggaaaccgtgggaattattaacagctcgcgcctggcgcagctgccggataatagctatgtgctgaatctggcccgcggagtacatgtggttgaagacgatctgctggacgcgttgaatagcggtaagttgaaaggcgcgatgctggatgttttcagccgtgaaccgctgcccgaagcgagcccgctgtggcgccatccgcgcgtggcaatgacgccccacgtggcggccgttacccggcctctggaagccattgcttttatcgccaaaaccatcggtcaaatggaacggggtgaaacggtcagcgggcaggtcgatcgccagctgggatactaa

SEQ ID NO: 174240 - DNA, 906 bp, Klebsiella oxytoca
atgcaggatctcaacgatttagcctggtttgtgcaggtggtggatcacggaggattcgcggcagcgggcagagcgctcgatcagcctaaatccaaactgagccggcgaatcgcccagttagaagaacgcctcggcgtacgtttgattcaacggacaactcgtcagtttgcggtaacggaggtggggcacaccttctatcagcactgcaaggcgatgctgatagaggcggaagcggcagagcaggcggtagagaccctgcgttccgagccccgcggaagcgtcaagctgacctgtccggtgacgctattgcatgcgcacgtcgggcctatgctggcgcggtttatggtgcgctatccgggagttaatctgcagctggaagccacaaaccgacgagttgatgtcgttggagagggcgttgacatcgcgatccgcgtacgcccaaggccgatagaggatagcgatctggtaatgcgcgttctcgccgatcgtggtcaccgcctggtcgccagtccacagttagtagagcaaaaggggcagcctgtggcgccgtcagaattaagcgattggccgggattgagcctgggcgcaggcaaacatcagcataagtggcagttgaccggcccggagggcgcacgggcggaagtctactttacaccccggctggtcaccacggacatgttggcgctgcgcgaagcggcaatcgccggcgttggggtggtacagcttcctttattaatggtgcgcgatcagctggcggctggcgagctggtggttgtcctcgatgagtggcagccgcgcagggaggtgatccatgcggtgtttgcctcacggcgcgggttgctcccctcggtcagggcgctggttgatttcctgagcgaagagtatcagcggatggaggaggattag

SEQ ID NO: 174241 - DNA, 861 bp, Klebsiella oxytoca
atgaaacagattaccggaatctacaccgcgcctgcgcagcattgggtaggcgatggtttcccggttcgctcaatgttctcttatcagacgcacggcgaacagctaagccccttcctgctacttgactatgcaggccctcatcacttcccgacagggtccgagaaacgcggcgtcggcgaacatccgcatcgcggatttgaaaccgtcaccgtggtgtactccggcgaagttgaacatcgagactcaacaggcagaggcggcgtcattggaccaggcgatgtgcagtggatgaccgcaggcgccgggatcctgcacgaagagttccactcggcggaatttacccgctccggcggcgagctgaaaatgattcagctgtgggtcaatcttccggctaaagacaagatgacgcatcccggctatcaaagcatcacggcggatgccatccctgacgccgagctgccggataacgctggccgcatgcgggtgattgccgggcgctatcaggatgttgtcggaccggcgcataccttttcgccgcttaacgtatgggacctgcagctaaaccagagtcatgaggtaaccctgcatcagcccgctggctggagcacggcgctggtggtgctggaaggtgaaatcgtggtgaacggcgagggtaacgcccgcgaaggtcagctggtggtgctcagccaaaaaggtgaaacgctccacctcgcggccagtagtcacgccaaagtgctgctgatggccggcgagccgctgcaggagccgatcgtgggctacggcccgtttgtgatgaataccaaagcgcaaatcgcagaagcggttcgtgattttaatagcggccgcttcggccaaatctga

SEQ ID NO: 174242 - DNA, 678 bp, Klebsiella oxytoca
atgtctaccccagctaactttaatggttctcgtcctgttattgatgtcaatgataccgccatgctgctgatcgaccaccagagcggtctcttccagaccgtaggcgatatgccgatgccggagctacgggcgcgcgccgccgcgctggcaaaaatggcctcgttagccggtattccggtgatcaccacggcatcggtgccgcagggaccgaacgggccgctaatccctgagatccatgagaatgcgccccatgcgcactatattgcgcgtaagggggagatcaatgcctgggataatccggaatttgtggccgcggtaaaggccaccggccgtaaaacattgattatagccgggacgattaccagcgtttgcatggcgttcccggcgattgccgccgtcgccgacggctatagagtttttgccgtcatcgatgcctccggcacctatagcaagatggcgcaggagatcactctcgcccgggtcgttcaggcgggcgtcgtgccgatggataccgccgcggtcgcttccgaactgcagcgcacatggaatcgaccggacgccgcagaatgggctgaggtttatactaaagtcttcccggcataccagctgctgatcgagagctatgccaaagcgcaggacgtggtgaagaataacgaacagcttgattcacagcgttaa

SEQ ID NO: 174243 - DNA, 699 bp, Klebsiella oxytoca
atgaatgaaaataacagcggtttgctgaactatattgaattgcttaagtcgcatgaagcggctttaaaaaacaaattactcgccggcgataaaagtaaatctgaccggtggctatttatcgggttagtggggatggttctggtttcctttggcgcaatgggcgggtatatgctgatcaagccctcaggccgctggcttattgatttgtcgatcgtactcatagcactttcctatgtagtgctgattctcatgccaatcattaaaatctaccagcagcgaaacacgataaaatacttcttcaccatgccgctcagcgccagcgtagaacaaaatattaaaaaagaggccttaaccgacgagcgttttcttgcggattttgtacgcttaggcaagcctaccctggagttggggctgctcgagataaagcacgaacgtgagtttctgagtaaaagaatcaatcttattgtcggccccgtcgataaacttggtattctgccagggataatctctatggttattacgttagcaaaacctgtagcaggtcatgattgggttatggggctggcatatggctatatcggtctggtcgttctctctttgtcatttataaatttattggtgaagtacgaccgcgtcatatcgttaaccgaggttgctctttcgcgctgcgatgaagtgaagggcgatgtacaggggtga

SEQ ID NO: 174244 - DNA, 294 bp, Klebsiella oxytoca
atgagcactattgccgttgttgttctgacttacattaaaccgcttgaagaagtagatgcccagcttgccgcacacgtggaatggcttaagcaagggtatgctgagggaatatttctcgcgtcggggcgtaaaatccccaggtccggaggcgtgattctggctaaaggcgatgatatggctgcgctgcaaaatcggttaagcctggacccctttcagcaatctggcgtcgcgaaggctgatatcattccctttgaagccacgatgaccagcccttcactgcaggccttgctgtaa

SEQ ID NO: 174245 - DNA, 1065 bp, Klebsiella oxytoca
atgcccgattgctgtaacggaaaacgtcaaacccgataccgtactcatcagcacggaagccccacttccggccgcgattttctcaccgccaaatcatccccctctatcacagaatatctgaacccaggcaaggttatcggtgcgcgtagccgtgaccctctgccaattcgtcaggcaagcaatggcttacaaggaagccaaacctcaatcgttagtgcgcataatcgcgtcgaacgtggcgcgtgtgatgtaaaccaacaacgcaaggtgctatccatgggaagacaaaaagcagtgaccagagctcgtcgtgaggccaaacgtgtgctgagacaggattcgcgaagccataagcagcgcgaagaagaatcggtcacatcgcttgtgcaaatgagtggcgtagaagccattggcatggcgcgggatagccgcgatctatcgccaattgaagcgcgcaatgaggctcaggcgcattatttgaacgccatcgacaataaacagctgatctttgccacgggcgaggccgggtgcggtaagacctggattagcgcggcgaaagctgctgaagccctgattcataaagatgtggacagaattattgttacccgtcccgttctgcaggccgacgaagacctcggcttcttaccgggagatatcgccgagaagtttgctccctatttccgcccggtttatgacgtgctggtgaggaggctgggggcttcctttatgcaatactgcctgcgcccggaaatcggcaaggtggaaatcgcgccgttcgcctatatgcgcggacgtacatttgaaaatgcggtggtgattctggacgaggcccagaacgtgaccgctgcgcaaatgaagatgtttttgacccgcctcggggagaacgtgacggttatcgtcaacggcgacatcacccagtgcgatttaccttcaggcgtgcggtcgggtctggccgatgcgctggcgcgttttgaggaagatgaaatggtggggatcgtgcgctttacgacggacgattgcgtgcgttcgatgctttgccagcgcgcgttgaaagcctactactga

SEQ ID NO: 174246 - DNA, 1281 bp, Klebsiella oxytoca
atggcagagcaaaaataccctatcaatgaaccgtcgcgtcggcggttactcaaagggatcggcgcgcttggtggcgcgctggccttgaccggtggctgcccggtggcgcatgcggcaaaagagaaaagctcaccgggtacggtctcccccgatgcgcgcatggaagcgcagccgttttatggtttgcaccaggccggcgtgctgacgccgcagcaggcatcgatgatgatcgtcgcatttgatgtcctcgccggtgataaagcggatctggaaaggctgtttcgtctgctgacccagcggatcgcctttctgactaagggcgggcccgcgccggagacgccgaacccgcggctgccgccgatggactcgggcattcttgggccgtggatcgccccggataacctgacgataaccgtttcggtggggcattcgctgtttgacgaacgcttcggtctggccagccatgcgccgaagaagctgcaaaaaatgacccgttttcctaacgactcgctcgatgcggcgctctgtcacggcgatctgttgctgcaaatttgcgccaatacccaggatacggtgattcacgcgctgcgggatgtgattaaacacacgccggatttactcagcgtgcgctggaagcgggagggcttcatctccgatagcgccgcgcgcagcaagggtaaagagacgccggtgaatctgctgggctttaaagacggcaccgcgaatccattgagttcggatactgcgttaatggacaaggtggtgtgggtaaccgccgatcagggggaaccggcatgggcgacgggcggtagctaccaggcggcgcggattattcagttccacgttgagttttgggaccgcacgccgctgaaagagcagcagaccatttttggccgcgaaaaactgaccggagcgccgctagggatggagcacgagcacgatgtgcccgattaccgtaacgatcctgacggcgaaatcattgcgctcgacagtcatattcggttggccaacccgcgcactccggaaacggcctccagcctgatgatgcgtcggggctacagttattcgctgggggtcacgaattccggccagctggatatggggctgctgtttgtctgctatcagcacgatctggaaaaaggcttcctgacggtgcaaaagcggctgaacggagaagccctggaagagtacgtgaagccgattggcggcggatacttttttgttctgccgggggtcgttgaccctcaacattatctcggtcaatcgttagtcgaagcctga

SEQ ID NO: 174247 - DNA, 1128 bp, Klebsiella oxytoca
atgatgaatcattttcgtcgcactgcgctgcagcttaccgttgccgcgctattcagctctgcattttacgcccaggcggccgatattccgcaggtaaaagttaccgttactgacaaacagtgcgagccaatgaacgtcaccgtcaaagcgggtaaaactcagttcatcattcagaaccacagccagaaagcgctggaatgggagatcctgaaaggcgtgatggtggttgaagagcgcgagaatattgcccccggctttacgcaaaagctaacggcaaacctgcagccgggtgaatatgatatgacctgcggcctgctgactaacccgaaaggcaaactgacggtgaccggagaggcgatccagggtgccgcgaaagccgatgcgctgcttagcctcggcgaagcgattaccgcctataaagcctgggttagcgccgagactgcgcaactggtgagcagcaccaaagcctttaccgatgcggtgaaagcaggcgatatcgagaaagcaaaagcgctgtatgcgccaacgcgtcagcactatgaacgtatcgagccgatcgctgagctgttctctgaccttgatggcagcattgacgcccgcgaggatgactacgagaaaaaagccgaagatccaaaattcaccggtttccaccggctggaaaaagcgctgtttggcgataacagcgtcaaaggcatggataaatacgccgatcaactacacgctgacgttattgagctgcaaaaacgcatcagcgagctggcgttcccgccgtcaaaagtggttggcggcgcagccggtttgattgaagaagtggcggccagcaaaatcagcggtgaagaagatcgctacagccataccgacctgtgggacttccaggccaacattgacggcgcgcagaaaatcgtcgacctgctgcgtcctcaactacaaaaagagaacagcacgctgctggcaaaagtggatgccaacttcaagaaagttgacgccatcctcggtaaataccgcaccaaagagggttttgagacctatgacaagctgacggatgccgatcgtaacgcgctgaaaggcccgatcaccacccttgcggaagatctggcccagctgcgcgggatccttggtctggattaa

SEQ ID NO: 174248 - DNA, 831 bp, Klebsiella oxytoca
atgtttgtcccatttctcatcatgttacgtgaaggcctcgaggccgcgctgattgtcagcctgattgccagctatctgaaacgcacccagcgcgggaactggattagcgttatgtggattggcgttttcctggcggcggcgctgtgcctgggactggggatctttatcaacgaaacgaccggcgaattcccgcaacgcgagcaggaattattcgaaggcatcgtggcggtggtggcggtgtgtattctgacctggatggtcttctggatgcgcaaagtgtcgcgcaacgtcaaacagcagcttgaacaggcggttgataatgcgcttcagcgcggcaaccaccacggctgggcgctggtgatgatggtgtttttcgccgtcgctcgcgaaggtctggagtccgtattcttcctgctggcggcgttccagcaggatgtgggtatttggccgcccatcggagcgatgcttgggctgggaacggcaatcgttttaggattcttgatctactggggcggtatccgcatgaatctcggcgtctttttcaaatggaccagcctgtttattttgctggttgccgcaggtctggcggccggggctattcgcgctttccatgaagccggattgtggaaccattttcaggacgtcgccttcgatctcagcaacgtgatttcgacgcatacgctcttcgggacgctgctggaggggattttcggctatcaggaaacgccgactatcagcgaagtggcggtctactttatctatttggttccggcgctggtgctgttcgcgctgccgtcgggcaataacaccaccgcatcccgagccgcgtag

SEQ ID NO: 174249 - DNA, 1185 bp, Klebsiella oxytoca
atgactcaattcctgcacttcctgctggcgctggcggttatcctcgcgctcgcctggcttgccagttacgaccgtaaaaaaatccgcattcgctatattatccagttaattattattgaagttgcgctggctttcttttttctccacgccgaaagcggcctgtggctagtgaaaaatattgcatccttttttgaatcactgctcggcttcgctgccgaaggcaccaactttgtatttggcggcatgagtgaaaaagggctggcgtttattttccttggcgtgctgtgccctattgtctttatctccgcgctcatcggtattcttcagcactggcgtattctgccgatttttattcgcctgattggtaccctgctatcgaaagttaacggtatgggtaagctggaatctttcaacgcggtcagttcgctgatcctcgggcaatcagagaactttattgcctataagggcgtgctcggcgacctctcttcgcgccgcctgttcaccatgtcggccactgcaatgtcgacggtttcgctgtccattgtcggcgcttatatgagtatgctcgacgcgaaatatgtcgttgccgcgctgatcctgaatatgttcagcacttttattgtgctgtcgatcattaatccgacgcgaccaggcagcgaggaagagatcaagcttgagaagcttcatgaatcgcagagcttctttgaaatgctcggtgaatatattctggccggattcaaagtcgccatgattattctggcgatgctgattggctttatcgccttaattagcgccattaacgcgctcttcgccaccctgtttggcctgagcttccagcagatactcggctatgtcttctatccgctggcgtggctgattggtatcccgctaagcgatgcgctgaacgccggcagtattatggcgactaagctggtggccaatgaatttgtcgccatgattgagctacaaaaaatcgctgccagcatgacgccgcgcgggctgggtatcttatcagtgttcctggtctccttcgccaacttcgcttctatcggcatcatcgccggggcgattaagggtctgaacgagcagcaggggaatatcgtttcccgctttggcctgcggctggtgtatggcgcaacgctggtcagcctgctctctgccagctttgctggtctggtactgtaa

SEQ ID NO: 174250 - DNA, 435 bp, Klebsiella oxytoca
atgagtgtcaaacagggtgcgatggcgttagtactggcagggattttaagcggctgcgtagcgcccgccgcgaagatggccccggcggcggatgctgatgcctgcccggcggataacgccatggtgcaaaccacgctttattttggcttaagccgtccggccgggaaggacattactgcccaggagtggcagcagttcgttgatcgcgacgtgacgacgcgctttcgcgatggcctgacggtctttgacgcgcgcggtcagtggctcggcaatgacggaaccgtggcgcgcgagcagagcaaggcgctgatgctgatccatggcaaagatgcgaagagcgaagaggggattgaggcgctgcgcaatacctataaatcgcgctttgcacaggagtcggtcatgcgcgttgaccagccggtctgcgtgcacttttaa

SEQ ID NO: 174251 - DNA, 1509 bp, Klebsiella oxytoca
atggctattagcacacccatgttggtgacttttattgtttatatttttggcatggtactcatcggttttattgcctggcgttcgacgaagaactttgatgattatattctcggcggccgcagccttggcccattcgtcaccgcgctctccgccggcgcttcagatatgagcggttggctgctgatggggctgcccggcgcaatatttatctccgggatttccgaaagctggattgccattggcctgacgctaggcgcatggattaactggaagctggtggcggggcgtttgcgggtacacaccgaggtgaataataacgcgctgacgctgccggattatttcaccggccgttttgaagataaaagccgggtgctgcgaattatctcggcgctggtgattctgttatttttcaccatctattgcgcatccggtattgtggccggagcgcgtctgtttgaaagcacctttggcatgagctacgaaaccgcgctgtgggccggcgcggcggcaaccattatttataccttcgtcggcggtttccttgcggtgagctggaccgataccgtccaggccagcctgatgatatttgccctgatcctgacgccggtcatggtgattatttcggtcggcggctttggcgaatcgctggaggttatcaagcaaaagagcattgagaacgttgatatgctgaaagggctgaacttcgtggcgattatttcgctgatgggctgggggctgggctattttggccagccgcatatcctggcgcgctttatggcggcggactcgcaccatagcatcgtacacgcccgtcgtatcagcatgacctggatgattctctgcctggcgggggccgtagccgttggcttcttcggcatcgcttacttcaacaacaacccgggcgtggcgggcgcagttaatcagaacgctgaacgcgtctttatcgaactggcgcagattctgttcaacccgtggattgccgggattctgctgtcggcgatcctggcggcggtcatgtcgaccctgagctgccagctgctggtttgctcaagcgccatcaccgaagatctgtataaagcgtttttgcgtaaaaatgccggtcagcaggagctggtatgggttggccgctttatggtgctggccgtggcgctggtctccattgcccttgcagcgaacccggagaaccgtgtgctggggctggtgagctacgcctgggccggcttcggcgctgcgtttggtccggtggtgctgttctcggtgatgtggtcgcgaatgacgcgtaacggcgcgctggccgggatgatcatcggcgccgtcacggtgattgtctggaaacagttcgcctggctgggcctgtatgaaattatcccgggctttattttcggtagcatcggaattgtggtcttcagcctgctgggtaaagcgccttccgcagagatgcaaaaacgctttgccgaagcggacgcccattaccactccgcgccgccggtgcgcgcgaccgccgagtaa

SEQ ID NO: 174252 - DNA, 3963 bp, Klebsiella oxytoca
atgggcaccaccaccatgggtgtaaaacttgacgacgcgacgcgcgaacgtattaaatccgcggcgagccgtattgaccgtacgccgcactggctgattaagcaggccattttcaattatctggaaaagctggaaaacgacgagacgctgcctgagctaccggcgttactttccggcgcggctaacgaaagcgatgaaacgggcagtccgggcgatgagccctggcagccgttcctcgaattcgctgagcagatcctgccgcagtccgtctcccgcgcgtcaattaccgccgcctggcgttgggccgaaaccgacgccgtgccgatgctgctggagcaggctcgcctgccgcagaatctcggcgagcaggcccacaagctggcatatcagctggcggagaagctgcgcaaccagaaaaccgccagcggccgcgcaggaatggtgcagagcctgctgcaggagttctcgctctcgtcgcaggaaggcgtggccctgatgtgcctggcggaggcgctgctgcgcattcccgacaaagccacccgcgatgccctgatccgcgacaaaatcagcaacggcaactggcaatcgcatatcggccgcagcccctcgctgttcgtcaatgccgccacctgggggctactgtttaccggcaagctggtctcgacccataacgaaaccagcctgtcgcgttcgctgaaccgtattatcggcaagagcggcgaaccgctgattcgtaaaggcgtcgatatggcgatgcgcctgatgggcgagcagttcgtcaccggcgaaaccatcgccgaagcgttggccaatgcccgcaagctggaagacaaaggcttccgctactcctacgatatgctgggcgaagcggcgctgaccgctgacgatgcccaggcctatatggtttcctatcagcaggctattcatgccataggcaaagcctcgaacggccgggggatttatgaagggccgggcatttcgattaaactctccgcgctgcatccgcgctatagccgcgcccagtacgatcgcgcgatggatgagctttacccgcgcctgaaatcgctaaccctgctggctcgccagtacgatatcggtatcaacattgacgccgaagaggccgatcgcctggagatctcgctcgatctgctggaaaaactctgctttgagccggagctggcgggctggaacgggattggctttgtgatccaggcctatcagaaacgctgcccgttcgtcattgactacctgatcgacctggctacccgcagccgtcgccgcctgatgattcgtctggtaaaaggcgcctactgggatagcgaaatcaaacgcgcgcagatggacgggctcgaaggctatccggtctatacccgcaaggtttataccgatgtctcctatctggcctgcgcgaaaaagctgctggcggtgccgaacctgatctatccgcagttcgcaacgcataacgcgcataccctggcggcgatttatcagctcgccggacaaaactactaccccggtcagtatgagttccagtgcctgcacggcatgggcgaaccgctgtatgagcaggtgaccggcaaagtcgccgatggcaaactcaaccgtccctgccgtatttatgcgccggtgggcacccacgaaacgctgctggcctaccttgtgcgtcgcctgctggaaaacggcgctaacacctcgttcgtgaaccgcatcgccgacagcaccctgccgctggatgagctggttgctgacccggtcgccgccgtggaaaaactggcccagcaggaaggtcaggttggcctgccgcatccgaaaatcccgctgccgcgcgatctctacggcaaggggcgcagtaactcagccggtctggatctggccaacgagcatcgcctggcctccctctcttcctcgctcttaaacagcgcgctgcataaatggcaggcgctgccgatgctggaacagccggttgccgaaggcgaaatgcagccagtcatcaacccggcggagccaaaagatatcgtcggccacgtgcgcgaagccagcgaggctgaagttcagctggcgctgaccagcgcggtcaacaacgcgccgatctggttcgccaccccgccgcaggagcgcgcggcgatcctcgaacgcgctgcggtactgatggaaggccagatgccaacgctgatgggtatcctggtgcgcgaggcgggaaaaaccttcagcaatgccattgccgaagtgcgtgaagcggtggatttcctgcactattacgcaggccaggtgcgcgcggattttgataacgaaacccatcgtccgctcggcccggtagtgtgtatcagcccgtggaacttcccgctggcaatctttaccggccaaattgctgccgcgctggcggccggcaacaccgttctggcgaaacccgcggaacagacgccgctgatcgccgctcagggcgtcgctatcctgctggaagcgggcgtaccgccgggggttattcaactgctgccgggccgcggagaaaccgtcggtgcggcgctgacttccgacgagcgcgttcgcggcgtgatgttcaccggctcaaccgaagtcgccacgctactgcagcgcaatatcgccagccgcctggatgctcagggtcgcccgacgccgctcatcgccgaaaccggcggcatgaacgcgatgatcgttgactcttccgccctgaccgaacaggtggtgatcgacgttcttgcctcggcgttcgacagcgcgggacagcgctgctctgcgctgcgcgtgctctgcctgcaggatgatatcgccgaccatacgctgacgatgctgcgcggcgcgatggccgagtgccggatgggcaatccgggccgcctgactaccgatatcgggccggttattgacgccgaagccaaagagaacattgagcgccatattcagacgctgcgcgccaaagggcgcaaagtcttccaggcggtgcgcgaaaccagtgaagattcgcgcgagtggaccagcggtacgttcgttccaccgacgctgatcgaactcgacagcttcgacgagctgaaaaaagaggtcttcggcccggtgctccacgtggtgcgctataaccgcaacgagctggacgggctggttgagcagatcaacgcctcgggttatggcctgaccctgggcgtgcatacccgtatcgacgaaaccatcgcgcaggtcaccggcaacgccaacgtcggcaacctgtacgtcaaccgtaatatggttggcgccgtggtcggcgtgcagccgttcggcggcgagggcctgtcgggtacgggtccaaaagccggcggcccgctgtatctgtaccgactgctctccagccggccgcagaacgcagtcgggatcaccctcgcccgccaggatgcggagtacccgctggacgcgcagttgaaaacgctgctggagaaaccgctgctcgcgttacagcagtgggctaaagaccgcccggaactgcaggccctgtgccaacagttcagcgaacaggcgcaggccggtacccagcgtctgcttccgggcccaaccggtgagcgcaacaccctgacctttatgccgcgcgaccgcgtgctgtgcgtcgccgataacgagcaggacgcgctcacccagctggcgggcgtgaccgccgtggggtgcgaagtgctgtggcctgacgcgcctctgcagcgcgagctggcaaaaaaactgccgcgcgaagtcagcgaacggatccactttgccaaagcggaaaccctggcgagcgaacctttcgatgcggttatctaccacggcgattccgatcagctgcgtgagctgtgtgaacaggtagcggcgcgcgatggcgcgattgtttcggtgcagggcttcgcccgcggcgagagcaatctgctgctggagcggctctatattgaacgttcgctcagcgtcaataccgccgcagccggcggcaacgccagcctgatgacgattggctaa

SEQ ID NO: 174253 - DNA, 396 bp, Klebsiella oxytoca
atgaaacgcactttactcgcttttgccgcgctgctggcaagcacccatgcgctggcggacgaatgtagcaacgccagcaatcaaacggaaatgaaccagtgcaccgccgagcagtaccaggctgacgacaaaaaattaaatgaaacgtatcaggaagcgctgaagcgcgcctctgaaaaacagcaggaactgctgaaaaaagcgcagctgacgtggattgccctgcgcgacgccgactgtcaattcctcgcctccggcgcagaaggcggcagcgtacagccgatgctgatcaaccagtgcatgtccgataaaaccgtcgagcgcgagtcgtatctcgcttcgctgctgcagtgcgaggatggcgatcagagctgcccgctgccgcccgccaattaa

SEQ ID NO: 174254 - DNA, 639 bp, Klebsiella oxytoca
atggcacagggcggcgtgaaaaagatcggcaaacgttcacaggcggtgagcgcaaaaaaagaggctattctggccgccgcgctggacgcgttctcgcagtatggcattcacggcacgcggcttgagcaggttgccgagctggccggggtgtcgaaaaccaatttgctctattactacccctcgaaagaagcgctgtatatcgcggtgctgcagcagatcctggctatctggctggcgccgctcaaggcgtttcgtgaagacatcagtccgctggtggccatcggcgaatatattcgccttaagctggaggtttcccgcgatcacccgcaggcgtcaaagctgttttgtctggagatgctgcaaggtgcgccgctgctgatgggcgagctgaccggcgatctgaaagcgttggtagatgagaagtcggcgattatttccggctgggttgagagcggcaggctggcgcccgtcgacccgcagcatctgatctttatgatctgggcgactacgcagcattacgccgatttcgccactcaggttgaggcggtaaccggcgcgacgctgcgcgatgaggcgttttttcagcaaaccgtcgataacgtccagcggatgattatcgaagggattcgggtgcgttaa

SEQ ID NO: 174255 - DNA, 1092 bp, Klebsiella oxytoca
atgaaaattggtgtcttcgttccgattggtaataacggctggctgatttccacccatgctccccagtacatgccgacgtttgagctcaataaggctatcgtgcaaaaagccgaacactacggcttcgatttcgcgctatcgatgatcaaactgcgcggcttcggcggcaaaaccgaattctgggatcataatctggagtctttcaccctgatggccggactggccgccgtgacttcacgcatccagatctacgccaccgccgccaccctgaccttgcccccggcgatcgtcgctcgcatggcctcaaccattgactctatctccggcggccgctttggcgtcaatctggtcaccggctggcaaaagccggagtacgagcagatgggcatctggccgggcgatgactattttgccagccgctatgactacctcaccgaatatgtccaggtcctgcgcgacctgtggggaaccggtcgcagcgacttcaaaggcgactacttcaccatgaatgactgccgggtcagcccgcagccgtcgcagccgatgaaggtcatctgcgccgggcaaagcgatgccggtatggcgttctccgcccaacacgctgactataacttctgcttcggtaaaggcgtgaacacccctgccgcctttgcccccaccgccgcccggatgatgcaggcggcggaaaaaaccggccgcgacgtcggctcctacgtcctgtttatggtgattgccgacgaaaccgacgaggcagcccgggccaaatgggagcattacaaagccggcgcggatgacgaggcgctggcgtggctgaccgaacagagccagaaagacacccgttccggcagcgacaccaatgtgcgccagatggccgatcccacctcggcggtcaatatcaacatgggcactcttgtgggctcctacgccaatgtcgcccgaatgctcgacgaggtggcggcggttcccggcaccgacggcgtgctgctgacgtttgatgatttccttatcggtatcgaagcctttggacagcgcattcagccgctgatgcgctgccgcgaccatattgccaccatgactcaagaggttgcctga

SEQ ID NO: 174256 - DNA, 711 bp, Klebsiella oxytoca
atgattaccctgcccgctcgcccggaatccctgaccttcgcgccgctacaaagcgcgctgatcgtcgtcgatatgcagaacgcctacgccagccagggcggctatctcgacctcgccggctttgatgtttccaccacccgaccggttatcgacaatatcaacctcgccgtggccgccgcgcgcgccgccgggatgctggttatctggtttcagaacggctgggatgaccagtacgtggaggccggcggccccggttcgcccaattttcataaatccaacgcgctgaaaaccatgcgccagaacccggagctacagggcaagctgctggcgaaaggcggctgggactatcagctggtcgatcagcttaagccgcagcccggcgatatcgtgctgccgaaaccgcgctacagcggcttctttaataccgcgctcgacagcatcctgcgcagccgcggaatccgccatctggtgtttaccggcatcgccaccaacgtctgcgtggaatcaaccctgcgcgacggctttttcctcgaatatttcggcatcgtgctggaggacgctacgcaccaggccggtccggcgtttgcccagcaggcggcgctgtttaatatcgaaaccttctttggctgggtcagcgatgtcgccagcttctgtaatgcccttgagcccgccgcgccgcacgcatttaccgaggagaaacgttatgcctaa

SEQ ID NO: 174257 - DNA, 393 bp, Klebsiella oxytoca
atgcctaaacaggtgattattccgccaggcaccaccgcgcctatcgcaccgtttgttcccggcacgctggccgacggcgtggtttacgtctccggcaccctgccgttcgataagcaaaataacgtggtttacatcggcgacccaaaggcgcaaacccgccacgtgctggaaaccatcaggagcgttatcgagacggcggggggcagtatggcggatgtgaccttcaacagcatctttatcaccgactggaaaaactacgccgcgattaacgaagtctacgcggagttcttccccggcgacaaaccggcgcgtttctgcattcagtgcgggctggtgaagcccgaagcgctggtggagatcgccaccgtcgcccatatcgggaaaccggcatga

SEQ ID NO: 174258 - DNA, 804 bp, Klebsiella oxytoca
atgatgaagctgaatatctccccggcgccttatcccggcgcgccggtggtggttctgagcgccgggctcggcggcgcgggcggctactggctgccgcagcgttcggcgctggaagcgcactaccagctggtgagctatgaccacaacggcaccggcgaaaacggcggctcgttgcccgccagctatagcatggcgcagatggcgcaggagctctacgcggcgctgctggaggcgggtattgggcgctttgcgctgatcggccacgccctgggggcgctgattggcctgcagctcgcgctggaccatcccgaagcgataagcgccctggtactggtgaacggctggctgacgctctccccgcatacccgccgctgcttcctggtgcgcgagcgcctgctgcacgcgggtggcgcgcaggcgtgggtagaagcgcagccgctgttcctctatccggcggagtggatggcttctcgcctgccgcgtctggaggccgaagacgcgctcgccatcagccatttccagggcaaagagaatctgctgaaaaggctgaatgctctcaagcaggccgacttttcgcgccgggcggcagccatcgcctgcccgacgctggttatcagcgccgctgacgatctgctggtcccggcctcctgctcccgcctgctgcaggcggcaatccccgacagccagctggtggaaatggcctggggcggccacgcctgcaacgtcaccgatagcgccacctttaaccctattttatgcgacgggctggccgcgatgctgcccgtaccccaggagaacctatga

SEQ ID NO: 174259 - DNA, 591 bp, Klebsiella oxytoca
atgagcgaagccattagccctgccgcctgcgccgcgctgttcaccgaggcccgaacccacaacggctggctggataagccggtcagcgacgcgcggctgcgcgaactctacgacttgctgaaaatggggccgacctccgccaactgctccccggcgcgcttcgttttcgtccgcaccccggaaggtaaagagaagctgcgcccggccctgtcgagcggcaacatcgcgaagaccctgcaggcgccagtcaccgctattgtcgcctgggaccgcgctttctatgaccggctgccggagctgttcccccacggcgacgcccgcagctggtttacctccagttcgcaaatggcggaggagaccgcctttcgcaacagctcattgcaggcggcatacctgattttcgcctgccgcgcgctgggcctggataccggtccgatgtcgggttttgaccgcgaaaaagtcgatgcggcgttttttgccgacggcgcctggaaaagcaacctgctgattaatatcggctacggcgatcccggtaaactgtacgcgcgcctgccgcgtctgtcctttgatgatgcctgccagctggtataa

SEQ ID NO: 174260 - DNA, 495 bp, Klebsiella oxytoca
atgtctcttgccgataaacaaagctttcgcgacgccatggcccacgtcggagcggcggtgaacattatcaccaccgatggtcccgcaggccgcgcaggatttaccgccagcgcggtttgcagcgtcaccgacgcgccgcccacgctgctggtctgcctgaatcgttcagcctcggtatggccgatcttcagccagcatcaggcgctgtgcgttaataccctggcggccggtcaggaaggactctcgaaccttttcggcggtaaaacgccgatggcggagcgcttcgccgccgccgactggcaaaccggcgcgaccggctgcccgcgtctggaggcagcgctggtcagcttcgactgccgcatcagccagatcgtcagcgtcgggacgcacgacattctgttttgcgaagtggcggcgattgttcgccatccggaaccgcgtggactgatgtggttcgatcgcggctaccacacgctgatgcgtccagcctgttaa

SEQ ID NO: 174261 - DNA, 1323 bp, Klebsiella oxytoca
atggctctcttcgattttcctcgctggcagttaacctccccctccgccgcgtccggcgtcgtggcccccgatgaacggctgtcggtcgggcaaaccgtggtgatgggcgttcagcacgcggtggcgatgtttggcgcaaccgttctgatgccaatcctgatggggttagatcctaatctgtcgatcctgatgtccggcgtcggcaccctgctgttctttttggtcaccggcgggcgtgtgccgagctaccttggttccagcgccgcctttgtcggcgtggtcatcgccgtcaccggcttcaacggccaggggcttaacccgcaccttagcgtcgcgttgggcggaattatcctctgcggattggtgtataccctgattggtctggtagtgatgaaactcggtacccgctggattgagcggctgatgccgccagtggtcaccggcgcggtggtgatggcgattggtcttaatctggcccccattgcggttcgcagcgtatcagcgacgccgttcgacggctggatggcggtgctgaccgtgctctgtatcggcctggtggcagtgtttacccgcgggatgctgcagcggctgctgatcctcgtcgggctgattatcgcctgcgccctctacgcgctgctggccaacggcctcgggctgggcaagccgctggattttagcctgcttgcgcaggcggcgtggttcggtttgccgcagctgaccgccccgacctttaacggccaggcaatgatgctgatcgctcccgtggcggtaattctggtggcggaaaatctcggccacctgaaggcggttgccgggatgaccgggcgcaatatggacccgtatatgggccgcgcgttcgtcggcgacgggctggcaacgatgctctccggctcggttggcggcagtggcgtgaccacctatgcggagaatatcggcgtgatggcggtcaccaaagtgtactcgacgctggtgttcgtcgcggcggcgctgattgcgatgctgcttgggttttcaccgaaattcggcgcgctgatccataccattccgggaccggtgatcggcggcgcatcgatcgtggtgtttggcctgattgccgtcgcgggcgcgcgaatttgggtacagaatcgggtggatctgagccagaatgcgaatctgattatggtggcagtgacgctggtgctgggggcgggcgattttgcgctttcgctcggtggctttaccctcggcgggatcggcacggccaccttcggcgcgattctgctccacgctctgcttaaccgccgtccgcgtgaggccgggcaaaccaacgtcaccccggtatga

SEQ ID NO: 174262 - DNA, 174 bp, Klebsiella oxytoca
atggcaaaccatcgtggcggtaccggcaactttgctgaagaccgtgaaagagcatcagaagcaggtcgtaaaggtggccagcatagcggggggaactttaaaaacgatcctcagcgcgcttccgaagctggtaaaaaagggggaaaaaacagtcacggcagccgcgatagctag

SEQ ID NO: 174263 - DNA, 597 bp, Klebsiella oxytoca
atggctaagattctggtgctttattattcaatgtacggacacatcgagaccatggcgcatgccgtcgccgaaggggctaacaaagtcgatggcgtggaagtggtcgtgaagcgcgtgccggaaaccatgcaggcagaggtttttgccaaagcaggcgggaaaacacaaaacgcccccgttgccacaccgcaggagctggctgagtacgatgccatcatctttggtacccctacccgcttcggcaacatgtccgggcagatgcgcaccttcctcgatcaaactggcggtctgtgggcatccggcgcgctgtacggcaaactggccagcgtattcagctcaaccggtaccggcggcggtcaggaacagaccatcacctccacctggaccacccttgcccaccacgggatgatcattgtgccgattggctacggcgctcaggagctgtttgatgtctcgcaggttcgcggcggcacgccttacggcgccaccaccattgccggcggcgacggatcgcgtcagccaagtgaagaagaattggccattgcccgctatcagggtcaacacgttgcaggtctggcagttaaattacacggttaa

SEQ ID NO: 174264 - DNA, 228 bp, Klebsiella oxytoca
atgccgaatcaagaagcaaaggcccaccgcgtgggtgaatgggcaagtctgcgcaatacatctcctgaaattgccgaggcaatttttgaactcgccaattatgatgaaaagctggcggagaaaatctgggaagaaggcagcgatgaagtcctgccccgcgccttcgccaaaaccgacaaagactcgctgttctggggcgaacaaaccatcgaacgcaagaacgtgtag

SEQ ID NO: 174265 - DNA, 1248 bp, Klebsiella oxytoca
atgagaaaaagtctactcgccgccgctgtggccggcgctgttttactgtccgctggcgttcaggcgcaggaaccggccgcaccggaagggtaccagcttcagcaggtgctgatcatgagccgccataacctgcgcgcgccgctggcgaacaacggcagcgtgctggagcaatccacgccaaagtcctggccagagtgggatgtccccggtggacagctgaccaccaagggcggagtgctggaagtctacatggggcactatatgcgcgaatggctggcgcagcagggagtggtgaccagcggcgaatgcccgccggagaacgcggtctacgcctatgccaatagcctgcagcgtaccgtcgccaccgcgcagttctttatcaccggcgcgttccccggctgcggcgtgaccgtacatcatcaggaaaaaatgggcaccatggacccgacgtttaatccggtgatcaccgatgattccgccgccttcagcgaaaaggccgtacaggcgatggagaaagagcggcaggggatgcagctgagcgaaagctataagctgctggaggagataaccgactaccgtaactccccgtcctgtaaagagaagcagcagtgctcgctgagcgacgcgaaagatacctttagcgctaaatatcagcaggagccgggcgtttccgggccgcttaaagtcggcaactcgctggttgacgcctttacgctgcaatattatgaaggtttcccgaaagaccaggtggcgtggggtgaaattaacagcgataagcagtggcaggtgctgtcgaagctgaaaaacggctatcaggacagtctgtttacttcgccggaagtggcgcgcaatgtggccaaaccgctggtgaaatatattgataacgttctggtaggggacgcggcgaagtcggcgaaagtgacgctgctggtggggcacgactctaatatcgcctcgctgctgacggcgctggattttaaaccttatcagctgcacaaccagtacgaacgcacgcccatcggcggcaagctggtgttccagcgctggcatgataagagcggcaatcgtgatttgatgaagatcgagtatctgtaccaaagcaccgagcagttgcgtaatgccgatgcgctgaccctgcaatcgccgccgcagcgggtaacgctggcgctgaacggttgtcctgtggatgacaacggcttctgcccaatggatacctttaaaaaggcgatggccgaggcgacaaagtag

SEQ ID NO: 174266 - DNA, 225 bp, Klebsiella oxytoca
atggtgaataagcatatcgtcgggctggctggactgctgctgatggcgacgtcagcaagcagcctggccgattccggccatcaatctatccatgaacgcgttgtcgaacggattttaaaaccctgcgaaggaaaaaaagccggagataaagtggtcatcgttgaccatcacggcggcgagcatgaggctatctgcactctggcggcagtaccgctgccgcagtaa

SEQ ID NO: 174267 - DNA, 123 bp, Klebsiella oxytoca
atgtcaggtatcctgctctttatcgtcgcggtggttttgctgggagtcgcggtctacagcctggtctcctacgtcaaagatcggcgctccgcgcaactgccaactcataagaaaaagaaataa

SEQ ID NO: 174268 - DNA, 1392 bp, Klebsiella oxytoca
atggctattaatccctctctcgacaacgcctccggggctggaaaaccgcgcctgcgcaaatccctcaagctgtggcaggtggtgatgatgggcctcgcctatctgacgccgatgacggtttttgatactttcggcattgtttccggcatcagcaacggccacgttccggcatcctatctgctggcgctggccggcgtgctgtttaccgccatcagctacggcaagctggtgcgccagtttccccaggcgggctcagcctacacctatgcgcagaaatcgatcagcccgcacgtcggctttatggtgggctggtcgtcgctgctggattatctgttcctgccgatgatcaacgtgctgctggcgaagatttatctttccgcgctgtttccggacgtgccgccctgggtatgggtggtgacctttgtcgcgattctgacggcggcgaatctgaaaagcgtcaatctggtagcgaacttcaacaccctgttcgtgctggtgcagatctcgattatggtggtctttatcgtgctggtggtgcaggggctgcataaaggggaaggggtgggcaccgtctggtcgctgcagccttttatcagccagaatgcgcacctgatcccgattattaccggggcgacgatcgtctgcttttcattcctcggcttcgatgcggtgactacgctttccgaagagacgccggatgccgcgcgggtaatcccgaaggcgatctttctgaccgcggtctatggcggagtgattttcattgtcgcttcgttctttatgcagctctttttccccgatatcagccgttttaaagatccggatgcggcgctgccggagattgctctctacgtcggcggcaagctgttccagtcgatcttcctgtgcacgacgtttgtgaatacgctggcctccggcctggcgtcgcacgccagcgtttcacgactgctgtacgtcatgggccgcgataacgttttcccggagcgtatttttggctacgtccatccgaagtggcgtaccccagcgctcaacgtgatcatggtggggattgtcgcgctgtcggcgctgttctttgacctggtcaccgccacggcgctgattaattttggtgcgctggtagcattcaccttcgttaatctatcggtgttcaaccacttctggcggcgtaaaggctttaacaaaacgtggaaggatcgctttcactatctgctgctcccgatggtcggcgcgctgacggtgggggtgctgtggattaatctggaagcgacatccctgacgctcggtctgatatgggcggggctggggttactctatctgacttacctgacccgccgtttccgtaagccgccgccgcagtttgacggcgctaaagcggagcaggcctgggaatcgtaa

SEQ ID NO: 174269 - DNA, 1419 bp, Klebsiella oxytoca
atggaaaccaatatcgtagaagttgagaattttgttcagcagtcggaagagagacgggtcagcgcattcacctgggaagtgaagcgctaccttgagcgttaccccaatacgcaatacgttgatgtgctgttaaccgatctgaacggctgcttccgcggtaagcggatcccggtctccagcctgaacaagctggagaagggctgctatttcccggcttcggtatttgccatggatattctcggcaacgtggtggaagaggcggggctcggccaggagatgggcgaaccggatcgcacctgcgtgccggtgctggggaccttaaccccgtccgcggcggacccggaatacattggtcaggttctgctgaccatggttgatgaagatggcgctccctttgacgttgagccgcggaacgttctgaaccgcctctggcagcagctgcgccagcgcgggctgttccccgtggtagcggtagagctggagttctatttacttgaccgcaagcgcgacgcggaaggctacctgcagccgccttgcgcgccgggaaccggcgatcgcaatacccaaagccaggtttactccgtcgataacctcaaccattttgccgacgtgcttaacgatattgatgagatcgcccagctccagctgatccccgccgacggcgcggtggcagaagcgtctcccggccagtttgaaatcaacctccaccataccgataacgtactcgatgcctgcgatgatgcgctggcgttaaaacgtctcgtgcgtttaatggcggagaagcataagatgcacgccacttttatggcgaaaccctatgaagagcacgccggtagcgggatgcatatccacatcagcgtgcagaacaacaaaggcgagaacgtgctggctgacgccgacggtgaagattccgcgatgttaaaatgcgcgcttgccgggatgatcgatctgatgccggcatcgatggcgctgctggcgccgaatgtgaactcgtatcgccgtttccagccgggaatgtatgtgccgacccaggcgtcgtgggggcataacaaccggacggtggcgctgcgcattccatgcggcgatcggcacaaccatcgcgtcgaatatcgggtggccggggcggatgccaacccgtacctggtgatggcggcgatttttgccggcatcctccacgggctggataatccgctgccgttacaggaagaagtggaaggcaatggtcttgagcaggaggggctgccgttcccgattcgccagagcgatgcgctgtgggagtttatgcaaaacgaccacctgcgcgagcggcttggcgaacgcttctgccacgtttatcacgcctgtaaaaatgacgaattactgcaatttgagcgtctgatcacagagactgaaattgagtggatgttgaaaaacgcctga

SEQ ID NO: 174270 - DNA, 765 bp, Klebsiella oxytoca
atggaaaatataatgtacaagccagttattggcgtagtgatgtgccgaaacaggcttaagggtcaccagacccagactctgcaagagaagtacctgaacgcgattgttcacgccggcggcgtaccgattaccctgccgcacgcgctggccgagccggaactgcttgctacgctactgccgaaactggacggcatttatctgcccggtagcccgagcaacgtacagccgcacctttatggtgaaaacggcgatgagcctgacgccgatcccgggcgtgatcttctgagcatggcgctgattaacgccgcgctcgaaaggcgcatccccattttcgccatctgccgtggactacaggaactggttgtcgccaccggcgggactctgtatcgtcgtctgttcgagcagcctgagcttcttgagcaccgcgaagaccccgaacttcccgtcgagcagcaatacgcgccctcgcatgaagttcaggttgaggagggaggattactttctcagttaataccgggctgcaacacgttttgggtaaactcgttacacgggcagggagcaaaaacgacgggtccacggctgcgcgtggaagcgcgttctccggacgggctagcggaagcggtcagcgttaacgaccatcctttcgccctcggcgtgcagtggcatcctgaatggaacagtagcgaatacgccctgtcgcgaatgttgtttgaaggttttatcaccgcctgtcagaattatatcgctgaaaaacagcgactctga

SEQ ID NO: 174271 - DNA, 558 bp, Klebsiella oxytoca
atgagcgatgacggactggcgccagggaaacgtttgtcagcgatccgccaacagctgggtctctcacagcgtcgtgccgccgaactgtctgggttaacacatagtgccatcagcaccatagaacaggacaaagtcagtcctgccatcagcacgctgcaaaagctgctgaaagtctacgggctgtcgctctcggaattcttttctgaaccagaaaaaccggctgaaccgcaggtggttatcaatcaggacgatctgattgaaatcggcagccagggggtatcgatgaagctggttcacaatggcaatccgaaccgcacgctggcgatgatatttgaaacgtaccagcctggaaccacaaccggggagaggatcaagcatcagggtgaagagataggcaccatactggagggtgaagtcgtgttgaccattaacggtcaggcgtatcacctggtggctgggcaaagttatgccattaacaccggcataccgcatagcttcagcaacacttcggcaggtatctgccgaattatcagcgcccatactcccaccaccttctga

SEQ ID NO: 174272 - DNA, 1488 bp, Klebsiella oxytoca
atggattttcacaacctggcttactggcaagaaaaagcaaagaacatcgcgattgaaacgcggttatttattaatggcgaatacagcgccgccgccgataacagcgtgtttgccaccatcgaccctgccgcccagcaaacgctcgccgaagtcgcgcgcggcaaaaaggccgatgtcgatcgcgcggtccaggccgcccgcagcgcattcgagcggggcgactggtcgcaggcctctcctgcccagcgtaaagcggtcctgaataagtttgccgacctgatggaggcccattgcgaagagctggcgctgctggaaaccctggacaccggcaaaccgatccgtcacagcctgcgcgacgatatccccggcgccgcccgcgcgattcgctggtatgccgaagctatcgataaagtctacggcgaagttgcccctaccggcggcaacgaactggctatgatcgtccgcgaaccgattggcgtgattgcggcggtggtgccgtggaattttccgctgctgctggcctgctggaaacttggcccggcgctggcgtcaggtaatagcgtagtgctcaaaccgtcggaaaaatccccactcagcgccctgcgactcgcgggcttagcgaaagaggccggactgccagacggcgtgttcaacgtagtgagcggtttcggccatgaagccggtcaggcgctggcgcggcatcctgacgtcgaagtaattacctttaccggttctacccgcacgggtaaacagctgctgaaggacgcaggcgacagcaatatgaaacgcgtctggctggaggcgggcggtaaaagcgccaatatcgtttttgccaactgtccggatctgcaaaaagcggttaacgctaccgccggcggtattttttacaaccaggggcaggtctgtatcgccggaacccgcctgctgcttgaggagagcattgccgacaggtttctcgatctccttaaagagcaggccaaaggctggcagccgggcaatccgctcgacccgaataccgccatgggcatgctgatcgacaacagccacgccgatagcgtccacagctttattcgcgccggcgaagcgcatagcacgctgctgctggatggacgcaaaaatccgtggcccgcggcggttggcccaaccatttttgttgacgtcgatcccgcctccgcgctcagccaggaggagatcttcggcccggtgctggtggtcacccgttttaaaaccgaagagcaggcgctggcgctggccaacgacagccgctatggcctcggcgcggcggtctggacccgcgatctctcccgcgcgcaccgcatcagccgccgtctgaaagccggctccgtctttgtaaacaactacaacgatggcgatatgaccgtgccgttcggcggctataagcagagcggcaacggacgcgataagtcgctgcatgcgctggaaaaattcactgaactgaaaactatctggattgccctggagtcttaa

SEQ ID NO: 174273 - DNA, 1281 bp, Klebsiella oxytoca
atgaccgaacataccaccagctattacgccgccagcgccaaccgctatgaaccgttcccggcgctggaagaaacgatcggctgcgacgtctgcgtcgtcggcggcggctataccggcctctcttcggcgctgcatctggccgaaatgggctacgacgtggtgctgctggaaggcgcgcgcatcggcttcggcgccagcggacgcaacggcggccagttagttaactcctatagccgcgatatcgacgttatcgagaaaacctacggcccggacgcggcgaaaatgctcggcagcatgatgtttgaaggcggcgatattattcgcgagcgcatccagcgctatcagattgcctgcgactatcgccccggcgggctgtttgtcgcgatgaatcataaacagctggaaactctggaagagcagaaagccaactgggagcgctacggcaatacccaactggagctgctggatgccagcgctattcgccgcgaagtcgacagcgaccgctacaccggcgccctgctggatcgcagcggcggccatatccatccgctcaacctggcgattggcgaagctgacgccattcggctaaacggcggccgggtgtacgagcaatcaccggttacccgcattcagcacaccagcccggcggtggtgaccaccgcgcgcggacaagtgaccgcccgctacgtgatcgtcgccggtaacgcctatctcggcgataagatcgagccggagctggcgaaacgcagcatgccgtgcggcacccaggtggtcaccaccgcaccgctgtccgaggaactggcgcgctcgctgatcccgaaaaattactgcgtggaggattgtaactatctgctggattactaccgtctgaccgccgataaccgtctactgtacggcggcggcgtggtctacggcgcgcgagatccggacgacgttgagcgattgattatgccgaagttgctgaaaaccttcccgcagctgaagggggtgaaaatcgactaccgctggaccggcaacttcctgctgaccctctcacggatgccgcagtttggccgcctcgataacaatatctattatatgcagggttacagcggccacggggtcacctgtacccacctcgccggacggctaatttcggagctgctgcgcggggacgccgaacgttttgacgccttcgcgaagctgccgcactacccgttccccggcggacgcagcctgcgcattccgtttaccgccatgggcgcggcttactatagcctgcgcgatcggctcggcgtttaa

SEQ ID NO: 174274 - DNA, 960 bp, Klebsiella oxytoca
atgaataatcttccgctgctgaacgacttacgcgtctttatgctggtggcccgccgcgccggttttgccgccgctgcggaagagctcggcgtctctccggcatttgtcagcaaacgcgtatcgctgctggagcaaacccttaacgtccagctgctgcaccgcactacccggcgagtggctatcaccgaagagggcgagcgcatctacgaatgggggcagcgcattctgcaggatgtcgaccagatgatggatgagctctccgatgtgcggcaggtgccgcagggaacgctgcggatcatcagcagctttggctttggtcggcgggtggtcgcgccggcgctctccgagctggcccgccgctacccgcagctggagatccgtttcgacgtcgccgaccggctggtagatttggctaatgaaggggtcgatctggatattcgcgtcggcgacgatattgcgcccaacctgatagcccgccagcttgccagcaatcatcgcatcctctgcgcctcgccggcgtttgtcgcccgccatccctcgccgaaacagctgagcgaccttgccgcgctgccgtgtctggtgatcaaagagcgcgaccggccttttggcgtctggcagctgcgcgatgataaagaaggtgagcacgccatcaaagtgaccgggccgctgtcgtcaaaccacggtgaaatcgtccatcagtggtgcctcgacgggcaggggattgcgctgcgctcatggtgggacgtaaaggagaatatcgccagcggcaatctggtacagctgctgccggagtactatcagcccgccaatatctgggcggtatacgtgtctcggctggcgacttcggccaaaattcgcaccaccgtggagtttttacgccactactttcagcagcgctttccgcagcagtgcggggcggcgatattgccgacggcgggcgccgtcggccggggggattaa

SEQ ID NO: 174275 - DNA, 1110 bp, Klebsiella oxytoca
atgaataaaaccttacgtattgccgccatccccggcgatggcatcggtaaagaagtgctgccggaaggggtgcgcgtactgcaggccgccgccgaacgctgggggctggcgttaagcttcgagcacttcgagtgggccagctgcgattattacgcccaacacggcactatgatgcccgaggactggcacgcgcagctgaaaacctttgatgcgatctatttcggtgcggtcggctggccggatatcgtcccggatcatatctccctctggggctcattgctgaagttccgccgcgaattcgaccagtacgtcaacctgcgtccggtgcgcctgttccccggcgtcccctgcccgctggcgggtaaacagcccggcgatatcgatttctacgtggttcgtgaaaacaccgaaggggaatattccgctcttggcggccatgtgaatccgggaaccgaacatgaagtggtgattcaggagtcggtgtttacccgccgcggcgttgaccgcatcctgcgctacgcttttgagctggcgcaaagccgcccgcgtagaaccctgacctcggcgaccaaatctaacggcctcgccatcagcatgcccttctgggaccagcgcgtcgaagcgatggcgcagcaatacccggaggtgaaatgggataagcagcatattgatattctgtgcgcccgtttcgtgctgcagccggagcgttttgacgtagtggtcggctctaatctgttcggcgatatcctttccgatctcggcccggcctgtacgggcaccatcggcattgccccatcggcaaacctcaacccggatcgcacctttccgtcgctgtttgaggcggtacacggttcggcgccggatatctacggcaaaaatatcgccaatccgattgccaccatctgggctggcgcgatgatgctcgacttcctcggcaacggtgacgctcgctaccaggccgcccatgacggcattctcgcggcgattgagcagaccattgccagcggaccaaagacgccggatatgaaaggcaccgcctccacccagcaggtgggcgaggccatttgtcaggctattgccggacaccaggtcgcccgaacaggcgcgtaa

SEQ ID NO: 174276 - DNA, 2502 bp, Klebsiella oxytoca
atggctctggtaattgaattcatatgtgatttgcccaacggcgtacatgcgcgtccggcaagcctggtagaaacgctgtgcaatactttttcatcttcagtcgaatgggtaaacacccgcacagaaggacgcggaaacgccaaaagcgcgctggggattattggcaccaataccttaaagggcgaccgctgccagcttgttgtcagcggtgaagatgaacagcaggcgtttaatacgctgacggcgttcatcaccgacgagttcccgcactgcgatgcgccgctgccggcggcggagcaaatggccgttcagccggttcctgaatccctctcgcgtcttaatcctaccctgtttcacgcgctgccggtctgcgccggcagcgcgggcggcaggctcacccatcttaagtccctcgacctgcgcgattcaggcgcgctgcctgcagcgggcgcaattgaacaggaacaggcggcgctggacaggggcctgaccctgctggtgaaaaatattgagttccgcctgctggataacgacggtaccgccagcgcgatccttgaggcgcatcgctctctggccaccgacgcctcgctgcgccagcatctgctggacgggctgttgaacggtctgagctgcgctgaagcggtggtcgcgaccggcgaacatttttgcgcccagttcagcgcttccggcaatagctatttgcaggagcgggtgctggacgtgcgcgatgtgtgcttccagcttctgcagcatatctacggtgaggatcgttttccggcaccgggtaagctgaccgaagaggccatctgcctcgccgatgaactcacccccagccagtttcttgaactggataaaacgctgcttaaaggcctgctgctgcgcagcggcggcaccacttcacatacggtgatcctcgcgcgttcgttcaatattcccaccctggtgggcgtcgatatggaggcgctgctgccgtgggtcgatcgccgggtacagattgacggtaacgccgggctggtggtggtgaatcccgatgaagcggtggcgcgctactatcagcaggaagcctgggtacaggcgcaaatccgccgccagcagcaggcctggctggataaagagggccgaacggaagacggtattcgtctggaggtggcggccaacatcgcccattcggtagaggcggcggcggccttcaacaacggcgcgcagtcggtaggactgttccgcaccgagatgctctatatggacaggcccagcgcgccgtcggaaaacgagctgtataacatcttttgccaggcgctggagccggccaacgggcgcagcattatcatccgcaccatggatatcggcggcgacaagccggtggcctacctcaacatcccggcggagaataacccgttcctcggctaccgggcggtacgtatttatgaggagtatcaggcgctgttccgcactcagctgcgggcaattctgcgcgcttccgcgcacggcgcgctgaaaatcatgatcccgatgatctcctcgatggaagagatcttatgggtcaaagagcagttggcggatgctaaacagtcgctgcgcagcgaacatatcccgtttgatgaaaagatcccgctgggcattatgcttgaggtgccgtcggtgatgtttatcatcgatcagtgctgcgaagagattgatttctttagtatcggcagcaacgacctgacccagtacctgctggcggtggatcgcgataacgccagggtgacgcgccactacaacagcctcaatccggcttttctgcgcgcgctggattacgcggttcaggcggtgcatcgtcaggggaaatggattggcctgtgcggcgagctgggggctaaaggttcggtgctgccgctgctggtggggctggggctggatgagctgagcatgagcgcgccgtcgattccggcaaccaaggcgcgtctggcgcagcttgacagccgcgcctgccgtcagctgcttaaccaggcgatgcagtgccgtacttcattagaggtagaacatctgcttgcccagttccgcatgacccagcaggacgcgccgctgattactccgcagtgcattacgctgaatagcgactggcgtagcaaagaggaggtcattaagggcatgactgataatctgctgctggccgggcgctgccgctatccgcgtaagctggaagccgatctgtgggctcgcgaagcggtgttctctaccggtttaggctttagcttcgccattccacacagtaaatctgagcatatcgagcagtcgaccatcagcgtcgcccgtctggcgcagccggtagcgtggggcgacgacgaggcgcagtttgtgattatgctgacgcttaataagcattcggcgggggatcagcatatgcgtattttctcgcggctggcgcggcgcattatgcatgaagagttccggcaatcgctggtgacggcgcagagctgcgaggcgatcgcgacgttgctgcagcgcgagctggagctgtaa

SEQ ID NO: 174277 - DNA, 1077 bp, Klebsiella oxytoca
atgaacgaactggtgcaaatattaaaaaatacccgccagcacctcatgaccggggtttcacatatgatcccgtttgtcgtgtccggtgggatcttgctggcagtctccgtcatgttgtatggcaagggcgcggtgcccgatgccgccaccgaccctaacctgaaaaaactgtttgatatcggcgtcgccggtctgacgctaatggtgccatttctggcggcctatatcggctactccatctccgaccgcgcggcgctggccccctgcgccatcggcgcctgggtcggcaacagcttcggcgccggtttcttcggggcgctgattgccgggatcattggcgggctggtggtttactacctgaagaaaatcccggtgcacaaggtgctgcgctcggtgatgcccatcttcgttatcccgattatcggcacctttataaccgccgggatcatgatgtggggtctcggcgagccgattggcgcgctgaccgccagtctgaccggctggctgcagggcatgcgcgaaggcagcatcgttattctcgccatcattatgggcctgatgctggccttcgacatgggcggtccggtgaataaagtcgcctacgccttcatgctgatttgcgtttctcagggcgtttacagcgtagtggccatcgccgccgtcggtatcgccgtgccgccgctgggcatgggcctggcaacgctgattgggcgtaaatatttctccgcggaagagcgcgaaaccgggaaagccgcgctggtgatgggctgcgttggcgtgaccgaaggcgcgatccccttcgccgccgccgacccgctgcgcgttatcccggccaatatgatcggcgccgccgccggctgcgtcaccgccgcgctgctcggcgcccagtgctacgccggctggggcgggctcatcgttctgccggtcgtcgaaggtaaaggcgggtttgttgccggtctggcggtcggcgccatcgtcagcgccgcctgcgtcattctgctcaaagccctggcgaaaaagaaaacgtcagacgccaaagccgatgacgagatggatcttgatttcgaaattaactga

SEQ ID NO: 174278 - DNA, 321 bp, Klebsiella oxytoca
atgaccaaaattatcgccgttaccgcttgcccctctggcgttgcccatacctatatggccgccgaatcgctggagagcgccgctaaagccaaaggctggcaggtcaaagtcgagactcagggctccatcggcattgagaacgagctgaccgcagaagacgtcgccagcgccgatatggtgattctgaccaaagatatcggcattaagtttgaagaacgctttgccggtaaaaccatcgtgcgcgtcaacatcagtgatgccgtgaagcgcgccgaagccattatgaacaaaatcgacagccacctttcacagaatgcctga

SEQ ID NO: 174279 - DNA, 2298 bp, Klebsiella oxytoca
atgaccaatcgcactcaacgcttaaaagatcttctgttcgccaacccgcgcgaaatctcactcgagcgggcgctgctctacaccgccagccataaacagacggagggtgagccggtaatgatccgccgggcgaaagcgaccgcatggatcctcgatcatgtgcagatttcgattcgtgatgatgaactgattgccggcaaccgaaccatcaagccgcgcgccggaattatgtccccggagatggacccctactggctgctcaaggagctggaccagttcccgacccgcccgcaggaccgtttcaatatcagcgaagaagacaagcgcatctatcgcgaagagctgttcccctactgggaaaatcgctcgatgaaggacttcatcaacgcccagatgaccgatgaagtcaaaaacgccgtcagcacgcagatttttagcgtcaaccagaccgataagggccagggacatatcattatcgactaccctcgcctgctggaaaacggcctcgccgcgctggtgacggagattaaggcggtgcgtcagcagcacccgcagaacagtttttatcaggcggtgctgatcctgctggaagcctcccagcgccatattctgcgctatgcggcccttgccgatgaaatggccgccgattgtgctgatgaacagcggcgcaaagagctggagaccatcgccaacatctcccgccataatgcggtacaccgcccggaagatttctggcaggcctgccagctcttctggtatatgaacatcattttgcagtatgaatccaacgccagctccatctcgctgggacgttttgaccagtacatgctgccgtactatcaggcttcgctgaatcgcggccaggatccgcagtttcttcaggagctgctggagtcgctgtgggtgaagtgcaacgatatcgttctgctgcgctccaccagcagcgcgcgctactttgcaggcttcccgaccggctataccgcgctgctcggcggcctgaccgagaccggacgcagcgcggttaatattttgtcgtttctgtccctcgacgcctaccagaacgttcgactgccgcagccgaaccttggcgtacgcgtcaacgaactcatcgatcgtcctttcctgcgcaaaaccgccgagaccattcgcctcggtaccggcattccgcaaatctttaatgatgaagtggtgatcccggcatttctcaaccgcggcgtatcgctggaggacgcgcgggattattcggtggttggctgcgttgagctgtcgatcccggggcgcacctacggcctgcacgatatcgccatgtttaacctgctgaaggtgatggaaatcgtgatgctggaaaacgaaagcaatcctgatatcacttgggatgggctgattaaccagatccgcgacaagattcgctattacattaagctgatggtggaaggcagcaacatttgcgatatcggccaccgcgactgggcgccggttcccctgctctcttcttttattgaggattgcgtgcagcacggtcaggatattaccgcaggcggcgcgcgctataacttctccggggtccagggcatcggcattgctaacctcagcgactcgctgcacgcgctaaaagggatggtttttgagcagaaacggctcagcttcgctgaacttatcgcagtgctgaaagccaatttccagacgccggaaggggaaaaaattcgcgctcgcctgatcaaccgcttcgagaaatacggcaacgatattgacgaagtggacaacatcagcgccgatctactgcgcttttactgcaaagaggtagaacaataccagaacccgcgcggcggtcagtttacgccgggttcctataccgtctctgcccacgtgccgctcggttcggtcgtcggcgccaccccggacggacgcctggcgggagaacagctggcggacggcgggctgtcgccgatgctcggccaggacgttcagggaccgaccgcggtgctcaagtcggtcagcaagctggataactttctgctctccaacggtacgctgctgaacgtcaaattcaccccggcaacgcttgccggcgacagcggcctgaataagctggccgacttcctgcaggcattcaccaggctgaggctacagcatattcagttcaacgtggtcaacgccgatacgctgcgcgaagcccagcagcggccgcaggattttgccggtctggtggtgcgcgttgcgggttacagcgcctttttcgttgagctgtcgcaggagattcaggatgacattatccgccgcaccgcgcatcagctgtga

SEQ ID NO: 174280 - DNA, 876 bp, Klebsiella oxytoca
atgacattatccgccgcaccgcgcatcagctgtgaggtcatggaaacgcgcgccgataaggcgcgcatttttaacatccagcgctactctttgaatgacggtcaggggatccgcaccgtggtgttttttaagggctgcccgcatacctgtccgtggtgcgctaatccggagtcgatctcgccgaaaattcagaccgtacgccgggagagcaagtgcctgcgctgctcgcgctgccagcaggacgtggtcgagtgcccctccggcgcgtgggagcagattggccgcgacgttaccctcgatcatctgcttaaagaggtgctgaaggatgagatcttcttccgtgcctcgggcggcggcgtgaccctgtcgggcggcgaagtcctgatgcaggccgaatttgccgcgcgttttctgcgccgcttgcgcgaatgggggatcagaacggcgattgaaacagctggcgataccgcgttcagccgcttttttccgctggctcaggcgtgcgacgaagtgctgttcgacctgaaaatcatggatgaaacgctggcccgggagcagctgcggatgaatatgccgcgggtgctggataacttcacccgtctggtcgaagcccaaatcccgcttattccccgggtgccgctgattccgggatttacgctcaacgaagagaatttccgccagatcctggcgtttttggccccctttaagctgcgcgaaattcatcttctgccgttccatcagttcggcgaaccaaaatatcatttactgggaaaaaaatggtcgatgtcgatgattaaggcccctgcagaatctgagattcagccattcaggacgctggccgaacgggccggttttagcgtgaccattggcggataa

SEQ ID NO: 174281 - DNA, 342 bp, Klebsiella oxytoca
atggatttcaatatcgttgccgtcacggcctgcgtcagcggcgtcgctcacacttatatggcggccgaacgcctggaaaaggtcggccaccatgagaaatggaatatcaaaatcgaaacccagggcgcgctgggggttgagaacaaaattaccgctgacgatattgcccatgccgatgtcgttctgctggtgacggatattgaaattgacgatgtcagacgcttcaacggcatccgcaccattaagaccagcatcaaaacttttctgctgcagccgcagcagattgtcgaagcggttaaatgcattatgaaaaagccggtagtttatattgagatcccttga

SEQ ID NO: 174282 - DNA, 768 bp, Klebsiella oxytoca
atggaacaacaatctgcggtttatctggatgcgctgggggcaaatgttgcgctgagcccgacaatgaaacaggaactggataccctgggctacaccgttgtgcataacgtggtggacgcggagtggctggcggcgatgcgtgagcttatcgacgccatcgtcgagagagagggcgacagtctggccattgaacaccaccaggaagcgaccgccacgcgcattgccaacctgattaataaaggggtgatttgggaaaaggtctggtcgcatccactgatactttccgcctgccggtatatttttcagggcgattttaaagtctccagcctgaacgcgcgggaagcgttgtttaacggcggccatcagccgctgcatgcggactggaaaaaaccgcgtcctgactttccgaaagtacatctggtgaatacgatatgggctattgatgacctgagcgctgaaaacggcgcaccgcgcattatccccggcacccatttgcgtccggagctaccggaagaggtgctggacgacccggagctggcgcatcctgatgaagtggtgttcgccgcgccggcgggcagcgtgatgatttataacgcccacgcctggcacggcgggacgcgcaaccgcgtcggcagcagaaggcgggtgctgcacggcttatatatcgacagagcggataccgcgcagcaggatcagcagcgctggctgacgccggaaaccgccagccgtttgacccccgcgcagaaatggctgctgggggtggcgtaa

SEQ ID NO: 174283 - DNA, 834 bp, Klebsiella oxytoca
atgattgacgatctggcggatattttaaatcgtttagtaaatcagaaagataatctgcacgtcagattccccgacccggatatctccgagcctgcgctggcgtttaaagtgccctttccgcggctggaaattgtgcttgagggtgagcttaaggagagcgggctgccgctgtcggagacgatgctctccgcctcgcaggtgctctacgttcaggcgggcaagtggacgctgccggagtggaccgggccggcatcgacgttaagcatcctctttggccgccagaagctcggattctgcgttcagtactgggacggcaagcagctgcgcacggaaaagcagaacgttgcccgcctcgggccgcgcgtcggctcctatctgctgctatcgcttaatgaaatctgcctgcagccggatccggtgaccgccaggctggtggtcgcggccctgttaagccactgccttgaacagctggtggggctggagatgcgcgtcagccgcagtcgcgatctgtttctggcggtgcaggactatctcgaagagcatctcagccagcccctgacccgcgagtcggtggcgaaacgctttcatattacgcccaattacctgtcgcatattttccagaaatccggctccgtcggttttaatgagtttctcaccagcgtacgcctggaaaaggccaaaaagctgctgcgcggctacgatctcaaggtaaaagagatcgcccacaactgcgggttcgtcgacagcaactatttttgccgggtgtttaaacgctacaccgagcgttcgccatcagaatatcgtcgccactgccgcagcgcgcagcagggctga

SEQ ID NO: 174284 - DNA, 945 bp, Klebsiella oxytoca
atgctaaaagtctggcaagccgcgctgttaagagacctgaccatgcccgaacgcgagaaaaacatccatattcaaccctcatcttcaatctcccgcacccatattctaccggcgctgctggcgatcgtcgccgtgaccggactgtgcgcgtatatctcgtcgccgctggggccgtggcgcgaaattttgattaatcccggaatgtatatcgatctgctggcgctgctatttctgctgtttatgctctggagctccaccaaagtgcgcatgaatcacgtggcggttaactgggtacgctacggactgctgctgtggattgccggcggtacgttcgatctgatggatgaaatctttcaccagccgcgctggatggggtactactgtgaagatctgctgcgcctgtccggcatgctgctgagcgcagtcggggtctacaaaattattgagcgcatcaatctgctgtacgttgatgcgcgttcccaatcattaaaggatgagctgacccaactgcctaaccgtcgcttctttatcgacaccatccgcgagaaggagggacgcaggctggggctaatgattgtcgatatcgattacttcaagaaaattaatgacacctggggccatctggtgggggacgaagtcctctttgctctcggtaagcagctggctaagctcaccagcgataaggtgctgccttcgaggattggcggcgaagagtttgccattattgtcgacggaatgacggcgcaggaagtggatgaactggcgcaggctattctgcaaaacgcccgggcgatcctgatcaaccacgaccatccgctgtcgatcagtatcggcgttggtctgcgtaacaaaggggaaccgcaaaacctgttcattaaaaaggtcgatgacgccctctataaggccaaaaataacggtcgcgggcgggtcgagtgggccgtctga

SEQ ID NO: 174285 - DNA, 315 bp, Klebsiella oxytoca
atggacaaaaattttacacctgagcaaatcgaaatcattaatcgcgtggtttttgcgcgcgtcgaacaaatgaaagagcaagtgactgaccttattgcgcagacagagcgcgatgcgcaccagcagctggcggattgcgggattgatatgaccgatttctgtccggctaatcagcactttcttatgatgacaatcgtccaggcgctgatagatcgggtgcacggcggcgacagggcccttgcccggaagataataaccatggaggcgaagagactgaacgtcagcgttaacgttgaagctgatagttcgagatag

SEQ ID NO: 174286 - DNA, 399 bp, Klebsiella oxytoca
atgaaagccctcgatatccgggaaattgccgatctttctggcataaatccctccgcgctgcgttattacgaaaaaaaaggattaattcagcctgttggccgtaacggtttacgacggcaatatcaccaaaatgtgctcaataaactgcagctcattacgttggggcaggcggcagggtttacgctggatgaacttgccgcgatgtttggttcgcaagccggggtcacgattgaccgggggctgctcctccagcgggcgaaagagattgatgccaccgtgcgcaagctgcagcagttaagccgcgggctgaagcacgcagcgcgctgcacgcagccggagcctgttcattgtgaagagttcaaaagagtggtggcgaaagggttgaggctggttggctga

SEQ ID NO: 174287 - DNA, 474 bp, Klebsiella oxytoca
atggtagtaaaaacggtcataacgggtattggcgcgacgctgataatggatctctggtcattcggccaaaaatacctgctcaagctgccgccgctaaactatgcgctggtgggtcgctggattgcatggcttttcagaggaaagctttgccataataccatcgcttccacgccggcattgcgtggagagagcgttatcggctgggtgtttcactacctgaccggggccatttttgcttttgtcccgctggcattgaacggaaccgtctggttaaacgagccgacgctgacggcaggcctgctggcaggcgtgctaacgttatttgcgccgttcttgattcttcaacccgcattgggcttcggcattgcggcgtcacaaacacctcgcccgtggctggctcgcttgctgagcgtgcttacgcacctggcctggggatgcggactttatatcacggctatggttagcagagcatga

SEQ ID NO: 174288 - DNA, 774 bp, Klebsiella oxytoca
atggccgtcgatcgcaatggcgacattgccctgccaatagtgaacgcaatgcagcccgaattcgcccgcctagtggacggggtcgtggcaacgctaacccggtgcttccctgaactgatgcatagcctttatgtttacggtagcgtggcgcaaggacgagcaacgcccgacaagtccgatctcgacatgagcgtgatattccacgatcgccccgatcgggccacagcggcgcggctcgctgagattaagcgtgaactggaaaagagctatccggttgtcagtaaaatcgattttgattgcggtgtgctgccgcaagtcctgcacccggatcatacgctgagctggggatactggcttaaacatcattgcatctgcgtgtacggcgaagatctgagccgccggtttgctccctttaaaccggcaaaagctatcgccgttgccgtaaatggggatttcctgccggtactggaaaaattcatggcacaaatacgctcatccgcggataagaatgaagggttacagctgcagcgcgctgccgcacgcaaaatcatccgcgcaaccagtatcctgcgtagtgagtacgacaaagactggccggacacccttgctgagcaccatggtaagctcattgcccgctatcctgaaaaagctgatgacatggattacctgctggcagtgagtcatgaacctcagggagacctggccgactttgaaaaaaggattctggcttttgcccgctggcttaacgtcgagtttcatcgtcgtcaaagctga

SEQ ID NO: 174289 - DNA, 585 bp, Klebsiella oxytoca
atgaccatttatggaaaggatcgtgtatttatttatggagtagaaaagatactgcaggcgcttagcgatgaggcgggaacggaggcagagagcgatgcggcctgtatgtacgtcacccatgggatggatattcaggagatctatgctcttttcttccgccacccgccggagcactacgccatcttcatcacctccgaacgccattttgaggcgatcaaccgcctgtttccgggcctgttaaagctctgtttagctgagcggttgacggtagacgagctgcatcaggcgttaagggtgatgcgcctgttctcggcgcagaaccaaagcgtggcctatttgcccaccaggttgaattttacccatgcggagcgacagattatgcggctcagtttgcgcggccattccctggatgatattgcccgtatccgtggggttagcccctctacggtcagcgtccagcgtacccggctgatgaagcgtatgggaaccaaaagcctgcaggagctatgctccctctatgcggcaatgcgcgccagcgatcgctcacgcactccggctaagctgaatgaggatcgcggttattga

SEQ ID NO: 174290 - DNA, 702 bp, Klebsiella oxytoca
atgtttcgctcattattattagtcacaattcctttcatcagtattgctgctcacgcggtgacctttgattatcgtcatgaaacgaatgacaaagccgggaacaatcataaagatcgtctgttgatgtctcaccgttttgccaatggctttggcttatcgctggaaggaaaatggaaaggatcgcaagataaaaataaagcctatgatgaaaccgtgagtaacggcaccgaagtggtggcgagctacgtgcataaaataaataagaccttccagattgagcccggcttctctctggataccagttcgtcctcaaataactatcggccctatctgcgcggtaaagcgaatctgaccgacgatctcagcgcctcattgcgctatcgcccttactacaagcgcaattcaggcaatattggcacgtctaaagacacctcggagaacggctataatctgaccagcgttatttcctggaaattcctcaaagattatcaactggattatgagctggactataaaaaagccaactccgccggggttattttagcggataacgaaagctatgactggacccatgattttaagctgacctataaatttgataaaaactggtctccttatatggccatcggcaacgtttccggtagtaaatccaccgatgaacgccaaacgcgttatcgcgttggcgtgaaatattccttatga

SEQ ID NO: 174291 - DNA, 1710 bp, Klebsiella oxytoca
atgaagattgcaaaaatcaccctggcattgggcgttctgagtctcttctcactgaatgcgggtgcccaggagaacgagcgcctgagcagcgtaaagcagttcgccgacgtcgtgctggacaaagcaagcgatcggtacgggcatcactctcccctgctggctaatggcgtggacccacgcaccggcaaacaaatggaatgggtatttccggacggtaaagtgaccgtgctgtcgaacttctctgcccagcaaaacttgatgcgggtgctggtagggttaagcaacctgaccggcgaaacaaaatataaacagcgggtcgcggagaatatacgctactactttgaccactatcaggatgcaagcgggctgctgctatggggagggcatcgttttgttgatttaaaaacgctgcagcctcaaggcccaagtgaaaaagagcgggttcatgaacttaagaatgcctatccctattacgacatgatgtttgccgtcgatgaccaggcgaccgcgcgctttatcaaggctttctggaatgcccatgtttacgactggaaaacgctggaaaccagccgccacggggagtacggcaaaccgatgggcgcgctctggcaaagtgattttgtccaacagccgccctttttcgccaccaaaggtctgagcttcctcaatgccggcaacgacctgatctactccgcatcgctgctgtatcaatacgatggtgacgctggcgcactgacgtgggcaaaacggctggccgaacagtacgttctgccgcgagataagaagaccgggctgggcgtataccagtttacccaaccgttaaaacgcgccgataccagcgatgacagcgacacgcattcgaaatacggcgaccgcgcgctgcgtcagtttggcccggaactgggcccggacgcgctggaaggcaatatgctgcttaagggccgaaccagtacgctctattcagaaaatgcgctgatgcagcttgccctggcaaaatcgctcggcaaagacggtgacgatctcaaaaaatggactcttgatggcctcaaggccttcgcgacctacgcttacgatgagcagaataataccttccgcccgatgctggccaacggcacggatctctccgactacgcgttaaaacgcgatggctattatggaaaaaaagggacggtactcaaagcctatccggcgggaaatgaatttcttctctcctatgcccgcgcctggacgcttgaaccggatgatgccatctggaaggtcgcccgcggcatcgcgaaaggccaggggttaggcgatatcggtgaacccggcggcgcaaaccgcaggctgaatagccaaacggagaaccatcagccgtatgcgattttcgcgcttatcgacctgtggcaggccaccgggcagcgggattatttgacgctggcggatcgcatcggcgcgaacatcatcaacaagcagcgcctcaacggcttttttgtcgatgatcctgaggccgaatatgccagtatcgatagtatcgccccctatgcgcttctcgccctggaagccgccttccgcaacacgccggacgcggtcgctccgttcctgaacggcgctggattcacggaaggcgcttatcggatggctgacggaaccgtgcgctactccacccgagatgacgagctgttcaggctcagacccggtgagcagctgaaaccgaacggcaaaaaataa

SEQ ID NO: 174292 - DNA, 1263 bp, Klebsiella oxytoca
atgagtcaagcacaacgccagcaggcggatatgcagcaggccgcggccagggtgttggcccgcgccgatgagctggcggcgatcagcgaaacgtcggacgccctgacccgggtttatctctctccacagcatcttgcggctaaccagcgggcggcgctgtggatgacccaggccgggatgaccgtctggcaggacagcgtcggcaatatttgcggtcgctatgagggtgagcaggagggcgcgccggccatcctgctggggtcgcatcttgatacggtgcgcaacgccgggcgctatgacggtatgctcggcgtcctggcggcgattgaggtagtgcatcgcctgcatcaacaggggcgacggctgaaaaaagccattgagattgtcggcttttgcgatgaagaggggacgcgtttcggcattacgctgcttggtagccgcgggctgaccggtacctggcctgagagctggctggcgcagaccgatgccgatggcgtcagcgtggcgcaggcgatggtgctggccgggctggatccggcgcgcattcacctggccgcccgcagccaggaggagatcgccgcgtatctggaactgcatatcgagcaggggccgtgcctggagcaggaaggactggccttaggcgtagtggaagcgattaacggcgcgcgtcggctgaactgccgctttaccggcgaggcgggacacgccgggaccgtaccgatgagccatcggaaagatgcgctggccgccgccgccgagtggatggtgctgatagagtctctgacccgccagcagggcggaaacctggtcgccacggtgggcacgctgcgctgcgcgcccggcgcggttaacgttatccccggcgacgttacgctgactctggatattcgcgggccgcacgaccagccgctcgaggcgctgctcgagacgctgctgacgggggcacaggcgattgccgcccatcgccagctgcagtttagcgcggaagagttttaccgcattgccgccaccgcctgcgatagcggattgcagcaggtactgagcgaggcggtgcaggcggtgcaggggcgttcgctgaccctgccgagcggcgccggacatgacgctatcgccatggctgaacgttggccgtccgcgatgctttttgtccgctgtaaaggcggcatcagtcatcatcctgccgagtcggtcaccgccgacgatgtggcgctggcgattgaggcctattttcgcgcggtgacggcgctggcagccgggaagtaa

SEQ ID NO: 174293 - DNA, 1242 bp, Klebsiella oxytoca
atggacatgacacagtttccgcaactcaatccgccggcgcgtctgctgatggggccaggcccgattaacgccgacccgcgcgtgctgcgcgccatgtcgagccagctgatcggccagtacgacccggcgatgacccattatatgaacgaagtgatggcgctctaccgcggcgtatttcgtaccgaaaaccgctggacgatgctggtggatggaacctcaagggccgggattgaggcgatcctggtttcggctattcggccgggggacaaggtgctggtgccggtatttggccgcttcggccatctgctgtgcgaaatcgcccgccgctgtcgggcggaagtgcacaccatcgaagtgccgtggggtgaggtgtttactccggaccaggtggaggatgccatcaaacgtattcgtccgcgcctgctgctgacggtgcagggcgacacctccaccacgatgctgcagccgctggcggagctgggggagatctgccgccgctacgacgtgctgttttacaccgacgccaccgcttcgctgggcggcaacccgctggaaaccgatgcctggcagctggacgcggtctcggcggggatgcaaaaatgcctcggcggcccgtccggcacctcgccgattaccctcagcgcgcgcatggaggaggcgattcgccgccgcaaatgcgtcgaagaagggattcgcactgatgcccaccgcgacggcgacgaggagatgatctactccaactatttcgatctcggcatggtgatggactactggggaccggagcgccttaaccaccataccgaggccactaccgcgctgttcggcgcccgcgagtgcgcgcgtctgatcctccaggaggggctggataacggcattgcccgccataagctgcacggcgatgcgctgctaaaaggcattcaggcgatggggctggagaccttcggtgacctgaaacacaagatgaacaacgtgcttggcgtcgtcatcccacaggggataaacggcgaccaggcacgcaagttgatgctggaagatttcggcattgaaatcggcacttcgttcggcccgctgcacggcaaagtgtggcgtatcggcaccatgggctacaacgcgcgtaaggattgcgtgatgaccacgctcagcgcgctggagtcggtacttaactatctcaaattcccgaccactcagggcgccgcgatgcaggccgcgtgggatcactatcgcagcgagagcgcgcaatga

SEQ ID NO: 174294 - DNA, 741 bp, Klebsiella oxytoca
atgcctctcatcaccattaatcagatgcagaagtattacggcgataatcacgtgctcaagggcgtcgatctggatatcgatatgggcgaagtgatctcgattatcggccgcagcgggtccggcaaaagtacgctgctgcgctgcatcaacggcctggaaggctatcaggatggcagcattaagctcggcgggatgactattaccgaccgcgactcgcaggcgcgggagatcagccgctctatcggcatggtgttccagaactttaacctgttcccgcatatgacggcgctggaaaacgtgatgctggcgccgcgtcgggtgctgaagaagagcgccgccgagtgtcgggagctggcccagcggatgctggaaaaggtcgggcttggcgaccggctggattactacccgtccagtctttccggcggtcagcagcagcgcgtggcgattgcccgcgcgctggcgatgtcgccaaaagttttactctgtgacgagatcacctcggcgctggatcccgagctggttggcgaagtgcttaaagtgctggagcagctggcggcggagggcatgacgctgattctcgtgacccatgaaatgaattttgcccgcgaagtgggcgaccgcgtggtgtttatgcatcaggggcgcgtctgggagcagggggacagcaaaacgctgttcgctaacccgcagaccagcgaactgaagcagtttatttcatccgtgcgcggcttaaatcaataa

SEQ ID NO: 174295 - DNA, 660 bp, Klebsiella oxytoca
atgatgaccacctttaccgattgggacattgttcgcaatctgctgctggccgggcgctggacggtgctgctgtcgctggtggcgtttctcggcggcgcgctggtcacgctgccgctgctgctgctgcgcatgaccggcgggcgccagataaagcgcctgatccgcggctatgttgagctgtttcagggaacgccgctgctgatgcagctgtttcttgcctttttcggcgtggcgctgttcggcatcgacgtttcggcgtggaccgcggcatcgctggcgctgacgctgtataccagcgcgtttttgctcgatatctggtttggcagcatccgcgcgctgccaaaagggcagtgggaagcatcgcgctgtctggggctgagctttggccagacgctctatcgggtcgttgcgccgcaggcgctgcggatcgccatcgccccgacggtggggtttgccgtgcaggtgattaagggcacggcgctggcgtcgattatcggcttcgttgagctgaccaaagcgggcaccatgctgaccaacgtgacgtatcagccgtttaaagtcttcgcgctggtggcgctgggctatttcattctgtgttatccgctgtcccgctacagccgttatctggagaacaaattcaatgcctctcatcaccattaa

SEQ ID NO: 174296 - DNA, 666 bp, Klebsiella oxytoca
atgacggagcaacttcatttctctgcgctctggccgcactggccggagctgctggcggggctgtgggtgaccatccagctaacggtactggcgacgctcggtggcctgacgattggcatcttcggcgccgccatccgcagcgggcggcccacgtggttcagccggatttggggcgggtatgtcgaattgattcgcaacacgccatttgtggtacagctgttttttatcgtcttcggcttaccgaacctggggctaaagatgacggcgggcgaggccgcgctgctggcgatggtggtcaatcttggggcctacagtaccgagatcgtgcgcgccggtattcaggtcacgccgaaggggcagtgggaagcaggacgcgtgctggggctgacccggacgcagacctttattcaggtgattctgccgcccgcgctgcagcgcatttatccggcgctggtgagccagtgcatcatcgtcatgctcggttcgtcggtagtgtcgcaggtctcttatgaagagctgacctttgccgctaacctgatccagtcgcgcaccttcctcagctttgaggtctacctggtgacgacaggaatttatttggtgctgtcgataacgatgcgccagctgctgatggcggcaggacgaaaatggctgggagtgcaggcatga

SEQ ID NO: 174297 - DNA, 786 bp, Klebsiella oxytoca
atgaagaaactgttgatcgcgctggccggggccgcttgtctgttaacccacctctcggcggcgaaagctgaccagctgcaggatatcgaaaaacgcggcgtgatccgcattgcggtgccgcaggatttcccgccgtttggctcggtgggcaccgaccttcagccgcagggctacgacatcgatatggcgcgctatcttgccaaagagatgaagctcaagctgcagctggtaccggtgaccagcgccaatcgcgtgccttatctgcaaactgataaggtagatctggtgatttccagcctgggtaaaaacgccgagcgcgagaaggtgatcgattttagccgggcctacgcgccgttctttctcggcgtatttggcgcgaaaggcgctgagctgaaagacccggcggcgctgagcggtaaaagcgttggcgtaacccgcggcgcggtggaagacatggtgctgaccagcgtggcgccgaaagaggcgcagattaagcgctacgaagacaacaacaccacgctgtcggcgtacctttccggtcaggtgcagtatgtggctaccggtaacctggtggtggcggccatcgcccggcagaacgccgataaagcgccggtgccgagctttatgctgaaagattcgccgtgctttattggtctgaaaaagaaccaaccggccctgaaggcgaaagtggatgcgttgattgagcagggggtaaaagacggcactctcaatggcctttccgagaaatggctgaaagcgccgctgcctgccagcctcggcgcataa

SEQ ID NO: 174298 - DNA, 840 bp, Klebsiella oxytoca
atgcaacagcttgatgaacgactgaaagagcagtacccgtcattatcgccgcaggagcagcgggtggcggattttattttcgatcattttgatgatctgattagctacaacagcgcagagctggcgcagcttagcggcgtgtcaaaagccacggtcagccggctgttcaagcgcctgggctatgagaagtataaggatatgcgcgatgagctgcgtaccctgcgccagagcggtatgccgctgaccgacaatcgcgatgcggtacagggcaatactctgctggcgcgccactataaacaggagatggccaacctgacacaatgggttaacgcgctggatgttcagcagttcgccgaggcgattcaggcgctggtcgccgcccggcgtattgtgattgtcggcatgcgtaatgcttatcctgcggcgctgcatctgcgtcagcagctactgcaggcgcgcgggcaggtactggtgctgccgcagcccggacaaagcctgagcgaggaactggtggatctcagcgccgacgacctggtggtggtgatggcattccgccgccgcccgcgaatcattcgccctctgctgcagcagctacagagcagcgatattccggtgctgctgatgtgcgagccgcaggcccacggtctgtttccgctggcgcgctggcggctttgcgcgccgctggatagcgtgtcggcctacgacagctacgcgtcggtcaacagcctgatcaatctgctgtcgaacgcctttttgcatgaaattctcgataaaggtcgcccgcgcattcacgatattgccacgctctaccagcagctggatgagctggaacagcgatga

SEQ ID NO: 174299 - DNA, 1584 bp, Klebsiella oxytoca
atgcaaagtcatgttgccgcccacgggatggcggtcgccccccatcatctggccagccaaagcgcgctggcggtactgcgcgaaggcggaagcgccatcgaagccatggtcgccgccgccgcgaccattgcggtggtttatccgcatatgaacggcctcggcggcgatggtttctggcttatcgtgccgcccgagggcgaccccatcgccattgacgccagcggcgcggcgggttcgctggcgacaccgcaggcctacgccggcctcgcgcagatcccccatcgcggtccgcaggcggcgctgaccgtggcgggcaccgtcagcggctgggacgaagcgcttaaggtgtcgcgcgagttaaccggcgcggccctgccgctcacgcgtctgctggaagatgccatcggctacgccgcaaacggtatcccggttaccgcgtcgcaggccagcgcgagcgccgataaattcagtgaactgtgcgaccagcccggcttcgctgaaacctttctggtggacggccagccgccgaaggccgggagccgctttctgcagccggcgctggcgaacaccctgcgccgattaaccgaagaaggcctggatagcttctatcgcgggccgctggcggagcagctggcccgcgggatggaaaagtacggactgcccgtcacccttagcgacctgcagcagcatcgcgctcgccgcccccagccgctcagactggcgcatcgacacggcgaactgtggaacctcgcgccgccgactcaggggctggtttcgctggcgatcctcggcatcaccgacaggctggcgatggccgacgccgacgatgcgatgaccgtccaccgtattgtggaggcgaccaagctggccttcggtctgcgcgacgcgcacatcaccgatccgcgccaccttgatgttgatattcagagcctgctgacaccggcggcgctgcagccgctggcggataacatcgacgaccagcgggcggctccgtggggcgcaggtaaaggcccgggcgataccgtctggatgggggtgatcgataaaagcgggctggcggtctcctttatccaaagcctgtaccacgaattcggcagcggcgtggtgctgccggagagcggcattgtctggcagaaccgcggggcatcgttcagcctcgacccgagccacctgctggcgctggcgcccggtaaacagccgtttcacaccctcaacccggccgcagcaaagctgaacgatggccgggtgatggtttacggctccatgggcggcgacggccagccgcaaacccaggccgctatcttcacccgctacgtcatgcaaaacgcgccgctgcaggaaagcatcacccgaccgcgctggctgctggggcgcacctgggggcagacttccgactcgctcaagctggagggccgcttcagcgccgaaagcgttgaccgcctgcgtcagttggggcacgaggttgaagtgctagccgatttcagcgaagccatgggccatgcgggggcgattgtacgtcatcccaacggcctgtttgagggggccagcgatccgcgcagcaacggctccgccgccggatattag

SEQ ID NO: 174300 - DNA, 189 bp, Klebsiella oxytoca
atgacaacatcgcagaacgaatgggacgcctggctctcgcaaatggaacagctgctggcgctggagctggacgatacgcggcgcgcagaactcagagtgcagtttagccgcattgccgccatggccgggccgttgatggcctttcccctcgacgagcgcgtcgaaatcgccggagtctataaagcatga

SEQ ID NO: 174301 - DNA, 1398 bp, Klebsiella oxytoca
atgaagctgcctgaaatgaccattcacgaaatccagcgcgcgctggccaccggcgaactcagcgccaaagagattgcccgccacaccctggagaatatcgctcgcgttaacccgcagatcaacgcctggacccacgtcagcggaaagcgcatgctcgctgaggcggagaatatcgacaccctgcgacgggaaaaaaagcccctgcccgcactggcaggcgttccctacgcggtgaaaaatctgttcgatgtcgccggccataccacccttgccggggcgcagctgttgagcgatcgccctgccgccgtagccgacagctgggcggtgcgccagctgcacagcgcgggcgcattattatccggcatgctaaatatggatgcctacgcctacggttttaccacggaaaacagccactacggggcgacgcataacccgcacgatctttcgcggatcgccggcggctcctcgggcgggtcggcagccgcagtggccgccgggctggtgaatttctcgctgggcagcgataccaacggctccattcgcgtcccggcctcgctatgcgggatctttggccttaagcccacttttggccgcctgtcgcgctccggcagtcatccctttgtcgccagccttgaccatatcggtccttttgcccgcagcgtcggcgatcttgcggcagtttacgatgcgctgcaggggcgcgatccgagcgatggttttcaggccgataaagccagcgagcgtacggctaatctgctgccgcgtggtctcgatggcctgcgctgcgccgcgctcggcggctattttacgacatggtgcgatgacgatgcccgtgcggcggttgccagcgttgcccacgcccttgaggcgcatgaggagctgatattcccggaggccgaactggcccgctcggcggcgtttattatcagcgccgccgagggcggtaaccagtacctgcccgcgctgcggagccagcccgaacgttttgagccgaactcccgcgaacggctgctggccggagcgatgatcccctccgcctggtatctccaggctcagcgctttcgccgttatgcgcagcaggcgttcaaaggcctgttcgctcatgccgatgtgctaatcgccccggccacgccgtgcagcgcgacgctcatcggcgcgcagaccatggagatcaacggccagctgctgccgattcgcgccagcatggggatgctgacccagcccatctccttccttggactgccggtcgtcacggtgccgctgcgcacggcgaacggtcagccgattggcctgcagctgattgccgcgccctttaatgaacaagcctgtctgcgcgcggcgcgggcgctggaagagatgggcatcaccgacgcccgcccggtggagatcgccgcatga

SEQ ID NO: 174302 - DNA, 387 bp, Klebsiella oxytoca
atgatgagcccagaacagattaatcgcccgttggttctcgccgaggtgacggcggcgttttaccgctatgaggaagcgctggtgagcaacgacatcgcggtgctggatgagctgttctggcacgataagcgcacggtgcggctgggggccggggaaaatctttacggcatcgatgaaatccgcgcctttcgcgccgcccgtccggcagcgggtttgcagcgcgagctgcggcataccatcatcaccacctttggcgaggattacgcggtgtgtagcaccgaattcacccgcgcaggcagcgagcgcatcggtcgccagcagcagacctgggtacgcttcccctttggctggcgcatcgtcgccgctcaggtcagtttgatgagttaa

SEQ ID NO: 174303 - DNA, 933 bp, Klebsiella oxytoca
atggcatttttggcagaagattacccgcgcgacctgcgcggctacggcggacagccgccgcacgcgcggtggccgaacaacgcgcgcatcgccgtgcagtttgtgctgaactatgaagagggctcggaaaaccacgtgctgcacggcgatgccggttctgaacagtttctgtccgatattatcggcgccgccagctatcctgaccggcatatgtcgatggattcgctgtatgagtacggcagccgcgccggcttctggcgcatccataatgagttcagcaaacggggattgccgttgaccgtgttcggcgtcgcgatggcgctggcgcggcatcccgaggtggttgaggcgattaagagggcgaactatgacgtggtcagtcacggctggcgctggatccattaccagaatatgcctatcgagcaggagcgggagcatcttcataaagccgtgcaggtattaaccgacctgtttggcaaaccgcccaccggctggtataccgggcgcgacagcccccatacccgccaactggtggtggagcacggcggttttgattacgacagcgactattatggcgacgacctgccgttctggagcgaagtggcctgtagcgacggttcgcgtaggccgcacctgatcgtgccttataccctcgacgctaacgatatgcgcttcgccactgcccaggggttcaataccgccgagcagttttatacctatttaaaagacagcttcgatgtgctgtacgcggagggggccagcgcgccgaagatgatgtccatcggtatgcactgtcgcctgctggggcgcccgggccgcttccgggcgctgcagcgcttccttgattatgtgcagcagcacgacctggtttgggtctgtacccgtcagcagattgccgaccactggcgcgacgttcatccgttcagggggtaa

SEQ ID NO: 174304 - DNA, 744 bp, Klebsiella oxytoca
atggccgccgtttgtatacaagtgatcaatcccaacatcagcctggccatgacggaaagcatcggcgccgccgcgcgggcggttgccgcgccgggaaccgagattctggcggtctgccccggcgaaggggtgccgtcgatagagggccactttgatgaagccatcgccgctgtcggcgtgctcgagcaaattaaggccggtcgccagcagggcgttgatggtcatgtcatcgcctgctttggcgaccccgggctgctggcggcgcgcgagctggcgcagggaccggtggtgggaatcgccgaagcggcgatgcatatggcgacgctggtggccacccgtttctccatcgtgaccacgctgccgcgcaccctgatcatcgcccgccacctgctgcaccagtacggtttccatcaccattgcgccgccctgcacgccattgatttaccggtgctggcgctggaggacggtagtggtctggcgcaggagaaggtgcgcgcgcgctgtattcaggcgctaaagggggacggctgcggggctatcgtactgggatgcggcgggatggcgacgctggctcaggagctgacccgcgagctgcgcgtaccggtaatcgatggcgtcagcgcggcggtcaaaatggttgagtcgctggtggcgttaggcctgtcgaccagcaagcagggcgatttagcctttccggaaagcaaggcgttgagcggcaaatttcaggcattaaccccgttttaa

SEQ ID NO: 174305 - DNA, 717 bp, Klebsiella oxytoca
atgaacaaccaacaacggctgcaggccgcgccagagctgcatgacaaagacgagtccatctttcaggcgctgatgaccgctatcgtcgagcatcagctaccgccgggcagcaaactgccggaggaggcgctggcggaggtgtttggcgtgagccgtaccgggatcagaaaagtgctgcagcgactcgcaaccgtgcaaatggtcatcctgacgcccaaacgtggtgcacaggttgccagcccgacggttgaagaggcgcaggcgatcttccgtacccgcgcgctattggaagtggccaacctgccggatgtgctggcccgctgtcagccgccgcacctggcggcgctggaagccatcacccgccaggaacagctggcccatgaaagtcatgacggcccggcggcgattcgctattccgccgagtttcatattcagctgcaggcgatctccggcaatcaggtgctcactgagatggtgacccgcctgagccagcgctcttcattagttatcgcggcgtggggatcgccgtggcggcagggctgccgctgcgacgatcacgaacggctgatccagctgctgcgcgataaaacgctgcagcccctgagcgacgccttaagccaccattttgaacatattgtcgccagtctctgctttgagcgttctggcgtgaccctgcctgattttgcccggctgtttgccggctataaggagccgtaa

SEQ ID NO: 174306 - DNA, 1488 bp, Klebsiella oxytoca
atgccaaatacacaagcgatgcatcaggttaaggccgctgatccccacgctggatacagcccacggctttgcaatgaggatctggcgccgacgcgcgaccagaactggagctggtacaacatcttttctttctggatgtcggacgtgcacagcatgggaggctacgtggtggcggcgagcttctttacgcttggtcttgcgagctggcaggtgctgctgtgcctgctggtggggatttgtatcgttcagctgtgcgctaacctggtggcaaagcccagccagatggcgggggtgccctacgcggtgatctgtcgtcaggcgttcggcgtctttggggctaatatcccggcggtgatccgcgggcttatcgccttcgcgtggtacggtattcagacttatctcgccgctaacgcgctgatgctggtgctgctgaagttctggccgtcgctgtcgaccctcaccgcatccagcttcctgggcctgtcgcatctgggctggctctgcttcgccaccatgtggctgctgcaggcgatggtgttctggcacgggatgaacgccatcaagcgctttatcgatatcgccggcccggcggtctacgtggtgatgctggcgctggcgggatggattgtatacaaaaccggttttgacgggatctcctttaccctcgccagcaaatcgctgagcgccggggagcagacctggcagatgatcaccgccaccgcgctggtggtctcctacttctccggcccgctgctcaactttggcgatttctcgcgctatggcaaaagcatgggcgagatccgccgcggcaaccgctggggcctgccgtttaacttcctgctgttctccatcgtgaccgtggtgattgtctccggcacgcagtcgctgtttggccgcatgatcaccgacccgattgagaccgtgagccgcgtaggcaacgacctggcggtcgccattggcctgctgaccatgatcaccgccaccatcgggattaatattgtggccaactttgtctctccggccttcgatttctctaactgttcgccgcagaaaatcagcttccgcaccggcgggatgattgccgccgtagggtctattctgctgacgccgtggaacctgtttaactcgccggagctgatccactacaccctcgacgtgctgggggcgtttatcggcccgctgttcggcatcctgatcgtggatttttacatcattaagcgcgggcaggtttccgttaacgacctgtttgacgacacgcccaggggccagtactggtaccgcaacggctttaacccgaaagcgatcgccgcgctggtgccctccgtcgccattggcctgatcatcagctttattccggccctgcacgaagtggctaactttagctggtttatcggcgtcttcctgagcggcgcggcctatcgctggatcgcccgcgacgaacgcgtcggcgccaccgctggtttcagccctctcgcccagaaagagtaa

SEQ ID NO: 174307 - DNA, 1323 bp, Klebsiella oxytoca
atgatgtttgactaccatgccgcggttcgcggcgcatttttcgatatcgccgaggttgccgagagcgccgacgatatcgcccgccaggcgcgctatctggaggatggcgtgctgtttcttcgcgacggacgcattcaggcgctgctgccgtggcaggagggcgaacgctttctgcacccgcagaagggctatcgcgacctgcgcggtaagctgctgctgccgggctttgtcgatgcccacgtccactatccgcaaaccgagatgatcggcgcatttggtgagcagctgctggagtggctcaccacctatacctttccggtggagagccagtttgccgatgccgactacgccgcggagatcgcgcaattttttgtcaaccagctgctgagccacggcaccaccaccgcgctggtcttttgtacgttgcaccctgaatcggtggatgccctgtttaacgaagcgctgcgcctcaatatgcgcctgatcgccgggaaagtgatgatggaccgccacgcaccggaatatctgagcgaaagcgcggagcagagctaccggcaaacccgcgaactgattcagcgctggcaccagcgcggccgtctgggatacgccattacgccgcgcttcgcgccgacctcaacgccggagctgctggcggcggtgcagcagctccgggaagagtttcccgatacctggctgcatacccacctgagcgaaaacctcaatgaagtggcgtgggttaaaagcctctggccggagcatgaacactatctggatgtctatcatcactatcgactgaccggcgagcgcagcgtatttgcccacggtattcatctggcggatgcggagtggcagtgcctgcacgagaccggttcggcgctggccttctgcccgacgtcaaacctgttcctcggcagcgggctgtttcgtttaccggcctgctggcagaacaaggtgcggatgggtatcggtagcgatgttggcgcgggcaccaccttcagtatgctgcgcaccctcggcgaggcgtataaggtcagccagctgcaaagctatcgtctgcgcgccagcgaagcgttttaccatgcgaccctcggcggcgcgcgcgccctgcgccttgatgagaagattggtaatttccagcccggtaaagaggccgattttgtggttatcgacccggcggtcacgccgctgcaaaggttacgcggcgggcgctgcaaggatatctatgagcagctgttcgtcctgatgaccctgggcgatgagcgtaatatcagcgagacgtgggtgaacggcgagcgcgtatggggagatgcggctgcggagtag

SEQ ID NO: 174308 - DNA, 327 bp, Klebsiella oxytoca
atgagcaccttaagcacccatattctcgatatttccaccggccgaccggcgcagggcgtaaagattacgctggagtgcgaaggcgcgcaggttgcctgcggcgtcaccgatgataacggccgcattggcgaactcggtgccgggccgctggcgccaggacattaccggttaagcgcggaaattggcgcgtggtttgccgccggcgggcgcgagacgctctacctgagcgcgcagattgatttcgtcatccgcgaggaggcggatgagcactatcatttaccgtttttaattgcccccggcggctggtccacctatcgcggcagctaa

SEQ ID NO: 174309 - DNA, 501 bp, Klebsiella oxytoca
atgatcgcgctgaatcactttaatcagctgagcggcgaacaggccgtcgccgtgctggaaccctgcgtggccgtctctggctgggcggcgacgctggcagccggtcggccatggcgcagccgcgcggaactgctggacgccgcccagcggctgatggcaggttggggggaagcggagctggctgaggcgctgaacgcccatccgcgtatcggcgaaaagcccaccgggcagcaggcccatgcggcgctctcccgccaggagcaggggagcgttgatgaccgtgatgctgcgctggcgcaggcgctgaaagagggtaacacccgctacgaggcgcggtttggccgggtctttttgattcgcgccaaagggcgcagcggggaggaaatcctggcggcgctgtcgcgtcggctgcacaacagcgatagcgcagaagtacgggacgcgttagcccagctaggcgaaattaccttgttaagactgaaaggagcgattggcgaatga

SEQ ID NO: 174310 - DNA, 1383 bp, Klebsiella oxytoca
atgtcagatgaaaaaaacggcggcttactgtacggccttgagcagcggatcccgccgctcccggccttttttagcgccttacagcacgtactcgccgggctggtaggcattattacgccgccgctgattatcggcgcggcgctggggctgggggagtggctgccctatttgatcagcatgtccctgctggcttccggcatcggcactttcctgcaatccaaccgcctgtgggggatcggtgcgggcatgatctgtatgcagggaaccagctttgcgttcctcggggtggcgattgccggcggtatgtgggtaaaagggcagggcggcacgccgcaggatattatggccatgctgtttggcgtcaactttgtcgccgcgctggtgccctgcctcgtcagccgctttattgaaccgctgaagcgtatttttaccccggtgattaccggcagcgtgattgcgctgatcggcattagcctgatcaaagtcagcgtgattaactggtgcggcggtgagcaggctaaagcctttgccagcacgagcaatattgccctcggcgcggttacgctggggaccatcgttctgctgagctgcgcgaaaaaccgctggctacgcctctcgtcggtggtggtggggatggccgtcggctgcgcggcggcggcgctgagcggctcgttccagcttaaaggcgtcggcgatgtctggtttcgcttaccgcagctgttcccgtttggtttccagttcaacagcgccatttttttgccgattgccctggtgtcgctggtgtgcattcttgaggcggtgggcgacctgacggccaactgtctcatctctcagcagtcgatagataacgaagccttccgttcacggctgaaaggcggcattctggctgatggcatcagctgcatggtggcggcgatgctgtgcacgttccccaatacgacctttgcgcaaaacaacggcgtgattcagatgaccggcgtcgccagccgctacgttggccgctacatcggggtgattttgattctgctgggtttgtttccgccgttcggcgagatactgcgccagatcccggcgccggtgctgggcggcgcgacgatggtgatgtttggctgcgttgtggcggcggggatccgcattatcacccagaaaccgctgacccgccgcgatatgctgatcgtcggtctggcctttggttttggtctcggcattgaagcggtcccggcgtttctgacccacttcccgccgatcgtcggcaacctgttcggttccgcggcgaccagcggcgggctggtggcgattgtcctgaatctgattatcccggaagagaaaccggccgcggcggcggccacaaggagtactgatgatcgcgctgaatcactttaa

SEQ ID NO: 174311 - DNA, 1155 bp, Klebsiella oxytoca
atgaaagcattagttatcggcggcggaatcggcggcctgagcgcggcggtggcattaaaaaatgccggtatccactgtgaagtgtttgaagcggtgaaagaaatcaagccggtgggcgcggccatctccatctggcctaacggcgtcaagtgcatgaagcatttaggcatgggcgatattatcgaaaactacggcggaccgatgcattttctggcctacaaggagtatctgcggggagagacgctgactcaatttagcctcgctccgctgattgcgcgcaccggcggacgcccctgcccggtttcccgcgccgaattgcagcgcgaaatgctcaaattctggggacgggaggcagtgcagtttggtaaacgcgttacccgctgcgaagaaaacgccgacggcgttcgggtctggtttaccgacggatcgatggcggagggcgattttctgattgccgccgacggcagccattcggcgctacgcccgcacgtgctcggctatacgccggaacgccgctacgcgggctacgttaactggaacggtctggtcgatattgatgaagcgattgcgcccggcaatcagtggacgaccttcgtcggagaagggaaacgcgtttcgctgatgccggtttccggggggcgattttactttttctttgatgtcccgctcccggcggggctggccgaggaccgcagcaccctgcgggcggatctcagccgctatttcagcggctgggcgccgcaggtgcagaagctgatcgccgccctcgacccgcagaccaccaaccgtattgaaatccacgatattgaaccgttcgccaagctggttcgcggcagagttgcgctactgggcgatgccggacacagcaccaccccggatatcggccaggggggctgcgcggcgctggaggatgcggtggtgctgggggagttgtttagccagagccgcgatatcagcggggttttgcgtcagtacgaagcgcagcgctgcgaccgggtgcgcgacctggtgctgaaggcgcgtaagcgctgcgatgtgacccacggtaaagatatggcgctgacggaagcctggtatcaggagctgaaatccgaaaccggagagcgaattatcaacggcctgtgcgaaaccattcagggcggcccgctggggtaa

SEQ ID NO: 174312 - DNA, 933 bp, Klebsiella oxytoca
atgagcccattttcacgtttcgctatctattttaccgaagtggcgcgcagcggtagcctgcggcgggccggggagaaactgcatatttccgcttcggctatcaaccggcaaattctgcaggcggaagaggatttcggcacgccgctgtttgagcgtctgccggaggggctacgcatgaccaccgccggcgagctgctgtacgacaatctgctgcgctggcaaaaggagtttcagctgacgcggcaaaagtttgatgagctgcaggggcttaaacgcggctccgtcagcctcggcatggtgcaggcgctggcggaagggagctttgccgccgcgctggcggacattatcagcagctggccatggctggaactggatctgcaggtggcggatagtcatagcgtcagccagaaggtacggcaggcggatctcgatttcggtctgattctcgatcccgaaggccaggcggggcttagcgtgctggcttttgccgaactggagatgggggtggtgatgtgtccggatcatcctcgggcgcaggctaaaatgctgtctttgggcgagctaagcgaggagcggcatattcttcccggcgcgccgctgatcgtccacgagcgggtcgcgatgctctatcgccattatgatttttccccgacgaacagcatcagctgcaacgatattcggttgattaaatcgctggtgcttaaaggcggcggcgtgaccctcctcagccgtctggatgtgctggaggagatcgcgctcggccagctggcgtttgtcccgctgcgcaaccgtctgctgcggccgcttaccctggccctgtgcgccgcgccatcacgccagctttcacgtccggcgcagatggcgatccagaagctgaccgcggtgatggaggcgatacagggcgggacagcggcttccctcccgtctgcgtaa

SEQ ID NO: 174313 - DNA, 1038 bp, Klebsiella oxytoca
atgaacagaccacaacctaccccacccgcccactgcacctttgcgccagaggactggctgcgcctggcaaaatgctggcacccggttgcccgcgcctgcgatattggccccgccccggtgaaagccaccctgcttgatgaacagctggtcatctatcgtattaagggccaggtggtcgttgcacgcgacgtctgcccccatcgcggcgtaccgctgacgctcggttttcacgatgaagaggggattgtctgcccgtaccacggcctgcgcttcggtgaggatggccgctgcaaccgtatcccttccagccccgaccagccggtaccggcgaaactcaacctcaccagctttgcggtagaagaacgttatggcctgatctggacctgcctggccttcgatccgcaagacccgatgccgctgccggtgatgccgcactggcacgacgatggctttcagcaaatcaactgcccggcttttgaggtcaacggttttgcgggtcgccaggtcgagggatttcttgatgttgcccattttgcctggatccataccgggactttcgccgaccccaataaccaggtggtgccggactacaacccgcaggagacggcgtttgggtttatcgccgattactggagttcagtcggcaactatcccgccagcaccgaatttcgcgcgccggaaggcttccagtggctgcgccattttgaaatgcatttgccgtttaccgccaccctgacgattcatttccccgaggacgccaggctggtgattatgaacgccgcctcgccggtatcctcgcgcattactcgtatgttcgcgcccatcgcgcgcaatttcgatctgcacgtaccggtggaagacgttcacgcctttaacctgcgcgtctttgaggaagaccgcatgatggtagagacccagcgcccggaaagattgccgctggatttaacgctggaagcgcatattcctgccgaccgcagctccatcgcctatcggcgcgggctgaagaaaatgggcttcggcgattttttcctcgtgtaa

SEQ ID NO: 174314 - DNA, 969 bp, Klebsiella oxytoca
atgaatgaggtattacaggtcattgtcgacggcctctggcgtcagggaagccagagcctcgccgtcaggctggtggcgccggagggtcagacgctccctgcctggcagcccggcgcgcatattgacgttcatctgccgtgcggcattatccgccagtattcgctgaccggccctgatagcgtcgctgacggatatctgatttgcgtggccctcgacagcgcatcccgcggcggctcgcgctacattcatcagcagctgcgccccggccagacgctgttgatttcccctccgcgcaatctgttccctctgcaggcggcagagcgggtgacgctgctggccgccggcatcgggattacgccgctgtatgccatggcgctaaggctggaggcagaaggcgtgccgtttaccctgcactactatcttaagagccgcgcgcgcggggcgtttatccgcgaactgcaacagcgatttagcgccgaaagcgtggtaattcactgttcaagcgaagggcgcagcgccaggcaaaacctggatgcggcgctgaatagtgcacatgccgggcagccgatatatctctgcgggccggcaggatttatggccgccgcgcaccgggccgccctggcgcagggatgggcggaagcgcggatccacagcgaagcctttcagcctgtcgctacgccagcggcgtgcgcagaggaaaacacctttaacgtgatccttgcctcctcgggcgaacgctggccggtacccgcgcataaaaccatcgctcaggtcctccaggagaacggcatcgccgtccccctctcctgcgaaatggggatttgcggcgcctgcctgacgccggttattgaaggcatcgtcgaccaccgcgataccgtgcagtcggaggcagagaaatccgccagcgcgcagcagatagccctgtgctgctcgcgcagccggtcagcgaatttgtgcattgatttatag

SEQ ID NO: 174315 - DNA, 480 bp, Klebsiella oxytoca
atggctgcgtcgacggccgcagaggctgatgaaatcactctttattcggttaataccggctcctggatctatcatctgtcaaacaatcacggccagtacaccgagggctttgataaccagtttgcctcggttgaacgcaagttctccgcggattcgaagtacagcctgctggtcgggacgatgaaaaacagctttgacgatcgctgtattgcgctcggggtacgccgcgactgggcgtcgttgggcaacggctgggtatttaaggggatttatggctacgtcggcgaatttttcttcgatgcttttgagcactgcggcgaccatggctcatataaggattttaaagatgcgaccggcattggattttctccctatatttaccatggtctccagtataactttaccgattatttcggcatcgaaagcggaattattctcccggccgtttttgtcatcagcgtgcagtggagttttcgttaa

SEQ ID NO: 174316 - DNA, 948 bp, Klebsiella oxytoca
atgagtgaaaatacaatatctaaaccaacctctgaaccgaaagtcctgcagcccgtattacggaaagtcgatcttaacctgctgactattttcgataccgttatgcaagagcaaagcttaaccaaggcggcacaaacgctcggcatgtcccagccagcggtgagcagcgcggtatcgcgcctcaaggtgctgtttaaggatgaactgtttgtccgcaacggtcgtgggattaaaccgaccgatcgcgcctttcagctattcggctcggttcgacgcgctctgcagctggtgcaaaatgagctaccggatacgctgttcgatccgctggactgcgaacgtatttaccatctttgcgtctgtagcccgctggataactatctgacaccgcttatttttaataaagtgagcgagattgcgcctcgggtcagtctctcctttaaatctaccctaagccagcaggtcatcaaccagcttcgctatcaggaagttgaatttgttctcgattacaacaagttcaaccacccggagttcaccagcatcccgctgttcaacgatcgcatggtgctggtggccaggcggaatcatccgcgtattgcatcgccgttgaccgagctggatatttatcgcgagcagcacgctaccgtcgcgctggatcgctacggctcattcagccatccctggtatagctctgaggaacagcaggcctgcgtcgcattccacggaaacgccatggtcagcgtgctgagcgtggtgtcgcaaaccaatatggtggccattgcgcctgagtggctggccaaagagtttgaagaacagtttgcgctccagctgctgccgctgcctttagaaatgaacagtcgcacctgctatctttcatggcatgaaacggcggcccaggagaggagccaccgctggatggcggaattgctgattaacatttgccagcgttaa

SEQ ID NO: 174317 - DNA, 207 bp, Klebsiella oxytoca
atgctttaccgctatgccgttttctccagaaaacacaacacgtttcatattcttctgctgtttaccattttactaataagtttcgtccatttgagcgtgctgctggaaaccgataacacatggctactgtggccgatgatgatttatctgcctgtttttttgctttggcgaaaggtctcagtgttacgaagcaggatcgctgattaa

SEQ ID NO: 174318 - DNA, 381 bp, Klebsiella oxytoca
atgcgcaatcgtcagcttcctggaaaatggtttttggtattgacttgcctggtcatggctatttgccttgttcagcgggcggtctatgtacaccattttttggacaacgccgcgcgccaggttcaggaacccgccgtcagcgcactgtcgcagcagccgtcagcggatgaagctgagcaagggccctctccctgtcagctgagcgccaaatctctgctctgcgcgcagccgctgttcttcgatggcgccttaccggccatcattctgttccttactctgcttcagctgactgccgcggcacgtgcctgggtcttccgggacgatcccgttcggccgcccacgctacgaattcatctcaaaaactgcgttttccgtgaatga

SEQ ID NO: 174319 - DNA, 2025 bp, Klebsiella oxytoca
atgctgaatatcttcaggggcctcgtcttcctgttgctgacctgcgcgagcgttgctcatgcggcagacaccggatggctgacatccccacagaacgaccacgcccgggtccgcttccaggcggagaaagagaacgatcggatcgacgccctgctctctattgagctggcttccggctggaaaacttactggcgctcgccgggtgagggcggcgtcgccccgcaaatcgtctggcataacggtgaacaggcgcagtggtactggccggttccctcaaggttcgagatttccggtctgacgacccagggctaccatcagcgggtcgttatcccgataatcatcaccgccgttcccggcgacctgctggacggtacgctcacgctatccacctgcagcaacgtctgtttgttaaccgactacaggctgcgtctggatttgagtcagcccgccactgccggttttcaggaggcttttgcacaggcgatgcgaaccattccgactgataaaggcgtgtcggacgatctcgccgcgcatcgggtcggcagcgacctggtgataaccgccaccacggtcggtgagtggaaaaaccccgctatcttttttgatcccatggagggcgggataatcgctggcgctccgcgcctccgtaccgagggcgccagcctcaaggtaacggtaccggtaaccgatgaatggggggaagagcccgcaacccttgcggggaaagcgctgtcgttggtgctgacaaatggcgcaaaggcgcagcagaccagtctgacgatcggcgcagatcttgcgccaacctcaacggttagcctctggaagatgctgctttttgccctgatcggcggattaattcttaacctgatgccctgcgtgttgccggtaatgggcatgaagctcagcgccgtgctgcagtccgggtcagataagcgcgcgatcgggcggcgttttcttgctaccaacgcaggtattctgacctcatttgccctactagcgctgatggtaacgatactgaagcttaccggcgcgtccctgggctgggggatccagttccagaacccctggtttatcggcttaatgattgccgttacgtttatcttttcgctcaacctgtttggcgtcttcgaggtgctgctaccgtcatcagccgttaaccggatggcgaccgccggcggcaccggcatggcgggcagtttctgtgaaggcatttttgccacgctgctggcgaccccctgctctgcccccttcctggggaccgccgtcgcttttgcgcttgctgccccgctgcaggaactgtggctaattttcctggcgctcgggctgggtatggccatcccctggctattcgtcgccctgttgcccgggtcggccgctctgatcccgcgccccggtcgctggatgaattcactgaaaatggcgctcggcctcatgatgctggcctccagtttttggctgacgacgctgctgggcctccatctgggtgagacccccggcggcattattgcgctggttcttaccctggcggcgctggccgccctacgggtaacccataagcgtacgacatctgccttctggctggtgattattgcgctggcggcgtttgccggcttccagcttcgcggcctgctggcaggggagcccgcgcgcgctaccacggaggcaatggctcagccgatccgctggcagccccttagcgaggaggctatccagaacgcgctggcggcgggcaaacgggtctttgtcgatatttcggccgactggtgcgtgacatgcaaagtgaatgaacatcgggtattaaatcagcccgccatcattagcgcgctctcccagcccgacgtagtagcgctgcgcggggactggagtctgccctccaaaccgatcgcccgtttcctgcaaagcagaaatcgctacgccattccgtttaatcaggtctacggcccaggccagccgcaaggcgacatactgtcgccgctgctcgataaacaaaccgtcctcaacgccctcagccgtgccaaaggttaa

SEQ ID NO: 174320 - DNA, 723 bp, Klebsiella oxytoca
atgaaaaaaacgctgcttgctttcactcttctttcggcctctttgccgacactggcatcttcgccgcttacccctgcgcaggaggctcgcgtccaggcactggtgcaggagacgctgcttaatcatcccgaaatcttgatcgccgccgccgaaaagctcgatcggcagaatgcccttgccgggcaggaacagcttcagcaggttcttactcagtacggcgatgttatctttcacgatcccaactcgccgcgtatcggcgcgcagcgaccgaagctgacgctggtcgtctttacggatcacaactgcccgtattgcaaaaagtttgacccgtatctgcagaagattgtcgagaaatatccggatgttgccgtggtctttaaatttctgccctggcgttctgaaagttcgctgacttcggcaagggctgcgctaactctgtggcgtacgcatcctgaacagtttgtgaaatttaaccatatcctgatggcaaaaaagggatatcacgacggcgccagcattgagcaagccaagacgaaggccggggtcagcgtagcaacgccggatgaacaaagcctggcgacgattaagcaaagcctgctggtggccgaaaagctcggcattcagggtacgccagccacaatcgttggcgacgagatgctgtcgggctggatcccctgggagcaatttgacgccatggtcagcgacgcgctgaaaaaacagtaa

SEQ ID NO: 174321 - DNA, 759 bp, Klebsiella oxytoca
atgaaatacattctactgctggcggcctggataatgccgggcctggcatctgccggggaagctctccctcagatagtgaaaaattttggcgaacagcaagggatcgccatgattaaagagatcgattcgcccggcggggtaaaagggtggatcggccagtatcaggatatgggggtgaccctgtttttgacgccggacggaaagcacgtgatttctggatatctgtatgacgataaaggtaaaaaccttagcgaggcctattttcaggaagccatctataccccttcaggccgcaaaatgtggcagacgctgaataatgctcgtccgctgaaggaaggcgcggattcggctgccagaaaaatcattgtctttgccgatcctttctgcccctggtgcaaagcgttctggtcggcggcgcagccgtgggtaaaagcgggcaaggtccagctaaataccctgctcgttgcttttctcaatccgaaaagcggcagatacgcaacggcgatcctgaacgcgcgcgatccggccgccgcgtggcgagagtatgagctttcaggcggcaaaaaagtgccgcattttgagggcgttactccacgcgacacctttaatcttcttcagcatcatcaaaaactgatggatgatttgggcgccagcgcgacgccggctatttattatatgaatgagcagaatgagctccagcaggtcatcggcatgcccgacgaacagcagctgcgggagatgttcgggccagcgccctga

SEQ ID NO: 174322 - DNA, 336 bp, Klebsiella oxytoca
atggaacgcttatttgtctacggcacgctacgcccgggccactctaacgcccatattatggacaacattggcggagagtggcagccaggctacgtcaccggcaccttttatgaacgcggctggggagcagcggcagattttccgggcattgttctcgacaaaaacggcccccgggtgcccggctttctgtttctgtcggcgaatctcgaggcccattgggccatgctggatgcgttcgaagagggctacgatcgcgttgctgttgaagtcaccaccgatgagggtcagcgagtgaccgcctggacctaccagctacagccgaagaggaccctgtag

SEQ ID NO: 174323 - DNA, 1029 bp, Klebsiella oxytoca
atgaaaaagattggctttttatcatttggtcactggacgccgtcgccgcagtccggaacgcgttcagccgctgatgcgctgttacaatccatcgaccttgccgtcgccgccgaagaactgggcgcggacggcgcctatttcagggtgcatcattttgctcgccagctcagttccccgtttcccctgctggctgcgataggggcgaaaaccaaaaaaattgaaatcggcaccggcgtgatcgatatgcgttatgaaaacccgctgtatatggcagaggatgcgggtgcggcggacctcatctccggtggccgcctgcagctgggtatcagccgcggctctccggagcaggttattgatggctggcgctattttggttacgtcccgggcgaaggcgaaaacgagtcggatatggcgcgtcgtcacaccgaagtgctgctggacgtcctgcgcggagaaggttttgcgaaacccaatccgcagcctatgttccccaacccgccggggctgctgcgtctggaaccgcattccgaaggtctgcgcgaacgaatctggtggggcgccggttcgaatgctaccgcgaagtgggcggcaacgctgggtatgaacctgcaaagttcgacgctgaaggatgatgaaaccggggaaccgtttcacattcagcaggcgaaacagatccgcgcctatcgcgaagcctgggcacaggcgggccatacccgtacgccgcgcgtctcggttagccgcagcattttcgccctgatggacgatcgcgatcgtctctatttcggttcaggccgtgacgagagtgattcgatcggtttccttgatgagaaaacccgcgctattttcggtcgcagctacgccgcagagccggacaagctcatcacgcagctgaaacaggatgaggccatcgccgaagcggatacgctgctgttgacggtgccgaaccagctgggcgtggaatataatgcgcatgtcattgagtcgattctgaagcacgttgcgccggcaatgggctggcgcgatgcctga

SEQ ID NO: 174324 - DNA, 378 bp, Klebsiella oxytoca
atgagcaaggtggtacggaaaaattatcctcaactgggtgaagtcaaggctccctacgttcactcggtaacgcacggaaacacgctctatatttcagggttaaccgcgttcggcacgcaggcgcagcaggggagcatcgccgcccaggcggaggagatctttaagcagatcagaaccgtcgctgacgcagaaggcgttgatttttcatccctgattaaagtcactatatttataacctcatttgctgagatcgacgcattacgccgggttctttatcaaaactacggtgaccacctgcctgccagctctctcgttgaagtcagccgcctcttttcacccgaccttaaaattgaaattgaagcgattttcggcctctga

SEQ ID NO: 174325 - DNA, 453 bp, Klebsiella oxytoca
atgggattattaagttttgtgaaagacgcgggcgagaaaatctgggatgcggtatctggcggcagcaaggaagatcgggccgaaaagctgaaaaaacacattgataaccttaacctgcccggcgctgaaaaagtgaatattgatgtcgcggacgatggcaccgcaacgataacgggcgacgtcggctcacaggaagataaagaaaaaattctggtggcggtgggtaacgtcaccggggtaggccaggtcaatgatagcgttaatgtgacgcagagcggagcggaaagccgttattacacggtgaaatccggcgataccctgagcgccatctcaaaagcgatgtacggctcggctaatgactatcagcgtatttttgaagccaataaaccgatgctgacgcatcccgataagatctatccgggtcaggtgctgattatcccggcgaagcagtaa

SEQ ID NO: 174326 - DNA, 228 bp, Klebsiella oxytoca
atgtcctcaagaattaaaggtctggtgaagtggtataatgaatcgaaggggtttggtttcatctctcctcttgatggcagcaaagatatcgccgttaattactcagcgcttcacggcgataactttaataccctctttgaagggcaaaaagttgaatttgccatacatcgcggtgataaaggtccagcggcgacgaaagttattctgtgcgataaagagatattttag

SEQ ID NO: 174327 - DNA, 213 bp, Klebsiella oxytoca
atgtctaataaaatgactggtttagtaaaatggtttaacgaatcaaaaggttttggtttcatcactccggacaacggtagcaaggatgttttcgtccatttttctgctatccagagcggtggctttaagaccctgagcgaaggccagaaagtcgaattcaccattgaagatggccagaagggtccttcagcgggtaacgtctacgctgtttaa

SEQ ID NO: 174328 - DNA, 903 bp, Klebsiella oxytoca
atgccctacctgttacttacgctggcagccctgttttggggagggaattatgttgtagggcatattctcgttcagggcgcagatccgattgttatgacggaagcaaggtgggcgctaaccgccatgctgctggcagggctttatcaacgtcaaatccgcgagagttggcgtttattgcgtggaaatgcatcgatgctgctgattttaacgctgtgtgggcaggtgagtttcccgctaaccctctatatcggtctgcagaccacctccgcgctaaacgccgcaatttatatgtcggcgaccccctgcatggtgctgatgattaaccgtctgattttccatgaccgggtttcagcgcgtaactggtgcggcgttgcgtttagcaccgcaggcgtactgctgcttctgctgcacggcaatctgaccaacgccgagggactcaaaggatttagccagggcgacctgtgggccatggggtctgcgctaagctgggcggtttattgctctctgctgcgtaataaagatcggcgtattcccgccaacgctttcgtcgccgtcagttcacttatcggcgccctgattctgcttccggtggtcattttctggctatggcgacaccccgccacctcgttcgccgcgtaccacgatatctctttcctcaccggcctggcgtatctggttatcttcccctcgtggctggcctatttattctggaacaaaggcatcgccgccattggcgcgactcgcggtgaaatttacactcaccttattccgctatctggcgggatattgagtattctgtttttacatacccggccgcacctctatcacttactgagcacgctgttaattttaattggcatcgcgatttgttcgatcgcaaaaaaggaaacggtgcattcgtaa

SEQ ID NO: 174329 - DNA, 1179 bp, Klebsiella oxytoca
atggactttaataaaataattgatcgccaccataccggatcgctgaaatgggattttatgacgcgctattttggcgaagaagccactgaactgttgccgatgtgggtttccgattttgactttagctgcccgccggacgttcagaaagccttagttcagcgtattgaacacggtatttttggttacagcgaacgaccgcaaacctactacgacgcattaatctcatggttcttaatgcggcatcagctggctataaaaccagagtggatatgcagtattgaaggggtggttcccggattatccctccttgtgcaaatgctgagccaccccggtgaaggggtggtggttcagggaccctattatggatcttttgccaaaattatttcgctcaacggtagacgcctgctggataatccgctgtatgaggagcctgaccagggctacagaatggatctcgatcatctggaaaggctgtttcgtacagagcgcccgccgctaatgatcctctgtaatccgcataatccaaccggtcggtgttggtcagctctggaactgagcgagttgctccggctgtgtgaagagtatgatgttattttaatttccgatgaaatctgggccgatttactgcttccaggggaagcatttacttcggtcttgcatttagaggagcgctggcattcgcgcgtgatatccgccacctccgccagtaaaacgtttggtttatctaccctacgcattgcgaactttctcataccgtcgccggcgctgcgtgaacaatttatgcgccgtctcgatgctcatggactggacgtcttcaatgcgttgtccattgaagcgagcacagctgcgtggcaacacggcgctccctggctggatgagctactgcgctatctggcagaaaatcgacggtggtttattcagcaggttgagcaatatctaccgtgggcgcgcatcatccctgctcaagggacgtacctgctatggatagactgcaaacggctgggactggacgatgaacagctgaaatggctcatggtggatgttgcgggtattgccccttcaatgggaaacagctttggcgcaaccggcagcggttttattcgccttaatctcgggtgtccgcgcgcgtacctcgaaaaagcggtggagggactgaaacgcattgcttttacagcataa

SEQ ID NO: 174330 - DNA, 1476 bp, Klebsiella oxytoca
atgaatgcctctcaaaagcagaaaaaaacgctctcatttggcctggccaccgtccctattttagccatgctaatgctgttaattattggctacggcatcatggggttgcgaatcgaaccgctactgctctgttccgctgccgtagccgccgtattagccttatggcagggctttacgtgggaagagatcattagttcggtcgtggataaactggcgaaagcgatgccagtcattatgatcctcatctgcgttggcgctttaattggcacctggatgttcagcggcaccattccttatatggtgtattgggggcttaaattaatcagtcctgagtatattcttattgccgcattctttttgaccagcgtcgtctcggtgtgtaccggaacatcatggggatcggcgggaacggtgggggtggcgctgatgggggtcgcggccgggctggacgtctccctggcggctgctgccggggcggtggtatccggggcttacttcggcgataaaatttcaccgctgtctgactccaccaacttcgccgctattgtcgccgataccacgctcttcgagcatattcagcacttactatggaccacaatccccagctttctgcttgccgcggcggtatatcttatcgccggtcacagcaatatgctgggcgaggtcgcgacgccgcagcgggtcaccgatattgtcaatgcgctggagtcgctgtaccgctttaatatcgttttgattttaccgcccgtcattgttctgtggggagcggttcgcaaaaaaccggtcattcctttaatgctgggcgcctgcgtgttagccctgattctcggcgtcgtgatgcaggggcttagccttaagcaggggctggatgcctttattgacggtttcaacatctccatgttcccgcaggggagcgaaggcatcattgctgatgtgccgcgactgctcaaccgtggcggtatgttctctatgatgagcaccattctgctggtattttgcgctttctcctttgccggcgctttaaccttaaccggggcgctcaacattattatcaaccgcctattgacggttattcacagcgtcggtcagctcatcgccgccaccattggcaccactattctggtaactggcgcaacgagcgatggaaaactggctcttctggtacccgctgaattattcaaagatgcctaccggcgtatggggctggataccaaaaatctttctcgaaccatcgaagatgcgggcaccgttattgagcctttattaccctggacctctgccggggtctatatggcaacgacgctgggagtgagcaccctggatttactgccctgggcggttcagtgctatgccgccatcttctttgccttatttttcggctttaccggaatcggtatcgcgaaaacctccccagccgcagaaaatgcaacgaatatgctggccacagaacaggaagggaagccagatggactttaa

SEQ ID NO: 174331 - DNA, 1011 bp, Klebsiella oxytoca
atggcaacaataaaggatgttgcacagcttgcgggggtttcaaccgcgacggtttcgcgcgttattaatcaaactgcctgggttgaaccggtaacgcgtgagcgtgttgaaaaagcgatgcgtgaactgaattatcatcgcaatgccgcggcgctggcgctggcgaaacgcagcggcgatatgctcgggttattgaccggcaaccttgccgatccctttttcgctcgcctcgcccgcggcgtcgaggaggtctcacggcaggaacaattccgcttgatggtatgcagcggcgggcatgatgaagggatggaaaaagccgggctggattttctaatcaaccagggctgtgaggcgatcgtggtccatgcgagcagattggcggaaaaggagttgctacgttatgccgcccatttccccgcgatggtggtggtaaatcgctatattgccgggatggccaatcgctgcgtctggctggagaactgcgaggcctcaaaaaaggcaacgctgcatttacttgagcaggggcaccgctgtattgcctgcgtgacgagcgacttaccgataatcgatcgtcgcgagcggctggaaggctatcgccaggcgttagcggaatacggtattaccccggacaggagctgggtgataagcgttccttttaacgaagaaggcggcgaacgcgcggcgcatcagcttcttaactgcgggatcccttttaccgcggcggtaacctttaatgatgtgatggcggccggcatcatgcgtatcctgcatctgaaaggcattacgctaccgcagcagctttcaattgtcgggttcgatgatgtggtgatggcgcgttatctctatccggcgctgacaacaatgcattacccggttgagcgaatggcgcgttgcgcttcgcaactggcgatccagctctttaaaggcgccacccagcagccctgcgttaatagcttcgctgcggagctggtggtccgcgattccgttcttcctcccgggagcggtagttaa

SEQ ID NO: 174332 - DNA, 1518 bp, Klebsiella oxytoca
atgaaagtgctcagtaaaagacaaatatcattaatcaatcatttaacgcaggaaagtggctggctggccacctcccgggcggcaaaaatgctcaatatttcagtcagtacgctcagacgagatgttgaagctattaacctttatttcactgataaaggtcattctgtactcagtaaacccggtctgggcctgaagcttgaggcgaacgacgttgtccccctcccccttatctccggggatgcgcaggttgtaaacatacttaaaaacaagcggctggtgggcattgcgaccgatttgctgacgcattctcccacgccattatctatcagctttttagctgagaaatacttcatcagtcgctcttccattgtggaagacctaattaaaattgaaaaatggctagagtgtttctcccttagaatgataaaaaaccataccggtacgtttattgacggtaatgactatgacatccgcatggcgcttaaggagatcattactcatagcgttttatgtaactatcacatgaccgatagcagaatcgataggttctctcgcgtacagcttatcaaagaatttggtaaagacaacgtggccaactgtatcaatttgattgcatttatcgaggatgaattaacctgcgccattagcgagccctactataccaatctgttttcacatttactggtcaccatcagacgtctggagaagagaatcgtttgcccggctgatgaagctgcgccagtgcatgacaacaaggaatggcagattgctgaaaaagctatcgtatggcttgagcagaaatatacgctcaggttcccgcaaatcgagattaattatatttatcaatatcttgtttcatccggcaagcatcccgttcatgccgtccatcctgacagaggagtgcaggaccaggaagcgttacattatgccattaagttaaccagtctactttcgcagctgcttaaatatgatttaatctccgatcagccgctcttgaacgctctggttatgcatattaagccgatgttgaaccgtctggctttccgcatcattattcataaccctttgctggatgagataaaaaaagaactctctccggtatttttggcggtcagaaacgcaactatgcaaatcaataattacagtaaacacgatcccccctctgaggatgaagtcgcctatttaacggtatacatccaggcggcaatcgaaaagattaaagaaaataagaaaatcatccttgtctgttcaagcggagtcggtacatctcagctcctgtacagccggattaccaaagccttccccgactgggagattatcgacattgttcccggcagtcgattaaaggagacgttagctgaaaaaaagtgcgacctaatcatatccaccatccgaatagaggaaatgatgatccctgttgcctatgtttccgcactattttctgcgaaagacatcattcgggtgaccgaagccttattcagcaaacgccagactcaggagagtgaatatgttaaataa

SEQ ID NO: 174333 - DNA, 474 bp, Klebsiella oxytoca
atgttaaataaaatagtaatcagcgatctgttaagtaaggcctgcgttattactgagatgcaggcaaaaagtaaaatcgacgtcattgagcagttgactcaggcgctgtgcgatgaaggcatcattgataataaacaaggttttattaaagatgtcctggctcgtgaagccctgggatcgactggttttgaaaaccaaatagccattcctcatggcaaatcctgttgggtcaatgaaacaaggatagccgtcgcaaaactgaaggataatgtcgactgggaaaccatggatagttcagatgttaagctggttattctttttgcggtaaaagaagccgatagcggagcgggacatataaaagttctcgctcgtatatctatcgccctgggtgacgatgaggttgttgaaaagctaattaatgccagttcgccagaggaactctaccgcttaattattaacaataccggagagtag

SEQ ID NO: 174334 - DNA, 1407 bp, Klebsiella oxytoca
atggaaataattgccattaccgcctgtccaacaggcgttgcacatacttaccttgcagaagccaatcttaaaaagaacgcccttaaaaaaggcatccctttactcgttgaaacgcatggcgccgtagacagtgaatatatttttaccgaggaggatattcaacaagcagatattgttttaatcgccgcggataaggtcatcgatctctctcgtttccataacaaaaatataatccgcgtctcggtgactcgcgccgcaaaggatgcagcaggattactggacgagattgtcaccggtaaattacagccacaacgacacctggcggcagacgatgctcaggaatcgccgaaaaaagataaagataaatcactggtgtctcaaatttatattcatcttatcaccggcgttaacctgatgatcccgttcgtcgttgccggcggtattttaatcgcgctgagcttctcatttggtattaccgcggcaacgccgggagatgaaaattttaacccgctggcgaaaatgctctctgacattggcggtggcgcggcctttgcgctgatgctacccgttctctcgctcggaatcagtaaatcgattagcggcaatatggggatagtgtcgggcgcggtcggcggcatgatggccattcagacagggtcaggttttttgggggctttgctggcgggttttctggccggatacgccacgctgctcatcgtcaaatatatcaaccttcccaaatcgatagcgggcctgaagcctattttaatcgtgccattgctgagcgtttttattaccggggcgttaatggtgctggtgattggcgaaccgatcaagtttcttctcgactcgctgacagcgttcctcgaaaacctgggcaatacccacgcagcaattatgggccttttgataggcatgatggtggcgtttgatatgggcggtccccttaacaagactgtctgcatgtttgcaattggcttgatgtcgacagggatctacgaacctatcgcggcctgtatggcggcaggaatggtaccgccgttgggtattgcgctcgccaccacgctgttcgggcggaaattctcccgtcaggagagggacaccggcaaagtcacctatgttctcggcctgtcgtttatcactgaaggcgctatcccttatgccgtagccgatccgctacgcgttattcccgctatcgtcgccggctccgggctggcaggcgcgctctccatggctctgggatgtgcctccagagccccacacggcggcatattcgtcatgtttattcccaatgtgatcacccacgttgtgggatatatcgtcgccatcgccgccggcgcgttactcaccgcgattattctgcgttttattaaaaaagacagccctgaaactgtacaggagatgtag

SEQ ID NO: 174335 - DNA, 861 bp, Klebsiella oxytoca
atgcttatgaatatgaaagagttattatctgtagctcagcaacataaatttggtattggcgcttttaatattgcttctgccgaattcgccagagcggttattgaggttgcagaaaagctgcgttcgccggttattcttgaaattcatcctgatgaacatgatttcaccggcgatgattttattttctatcttcgtgaactggctatcaaagcaacggtaccggtcgtcattcacctggatcatgggcagactctggagcaggttatgcgggcgattcgcaccggctatacctcagtgatgattgatgcttcagcgcacccgctggaagacaatatcgctatcacacgccgcgtgacggaagtcgctcatgctgcaggtgtttccgttgaagctgaactgggtaccatcggcgtggcacaaggcagcggcgaaggcgggcatggcgaaatactgtataccgatccgcagcaggctgagcaatttgtcaacgagaccggggtcgatacgctggcggtcgcgattggtacatcgcatggcttatatcctgcaggaatgcagccaaaactggatatcgaaaggctgaaatccattaaacagcggttaaccatcccgctggttcttcatggcggatcgggaaataaggatgaagaagtcgccgagtctatccagcacggggtcggaaaaatcaatatttccagcgacatgaaaaaagcattctttgttgctctggaagaagagctgaaatcaggcagccacgaacctaacagcttatttatcaggccaatggaagccgcaaaagccgttgtggttcgcaagatgcatttgttttcatctatcggcaaggcggcgctctacgtctga

SEQ ID NO: 174336 - DNA, 1629 bp, Klebsiella oxytoca
atgaaatcacaaaaatataatcacatcacgcgggtactgctggctgtcggtctgttctcaatcactctcccggcgctggccgcgcaggtgccgccgggaacggtgctggcagagaagcaggagctggtcagaaataacggcagcgagccgtcgtcgctggatccgcataaagtcgaaagcgacgttgaaaacaatatcattagcgatcttttcgaagggctggtcagcgtttcgccagcaggcgacattcagccccggctggcggagaagtgggagaataaagataacaccgtctggaccttccacctgcgtccaggtgcgacctggtctgatgggacggcgattacggcgcaggatatcgtctggagctggcagcgtctggtgtcgccgctcacggcgtccccttacgcgagttatcccggcaatatgcatatcgtcaacggtgcggagatagcacggggtcaaaaagcgcccgagacgctgggcgtcagagcggttgatgatgcgacctttgaggtgaccttaacccagccgaatgcggcgtttttggccatgctggcgcacccgtctctggttccgctcgataaagtcctcatttcgcgctacggcgacaagtggaccaaaccggaacatatggtaaccagcgggccctacaagctgtcgcagtgggtggtgaacgagcgtatcgtcgcagagcgcaatccgcgttactgggataacgcgcataccgtcatcaataaggtgacctatctgccgataagctctgaagccgccgatatcaaccgctacaaagcgggggagatcgacatcgtctataccgtgccgattaaccagttcgcccagcttaaaaaaactctgggcgaacagctgaatgtttcgccgcagctggcgacctactattaccagttcaatacgacccggccgccgtttaatgacccgcgcgtacggcgggcgctgaatatggccctcgataaagagattatcgcggagaaggtactggggcaggggcagcgtcctgcctggcttgtcagccagcctgatatcggtggggtgaagctgcacaatcccgaatatgccagctggtcgcgcgataaacgtatcgccgaggcgaaaaaactgttgagcgaggccgggtataacgagacccatccgctggtatttaatttgctctataacacttcggaatcgcaccagcgaattgccatcgccgccagctcaatgtggaaaaagaatcttggcgtcgaggcgaagctgcaaaatcaggagtggaagaccatgctcgacaccatgcacacgcataattttgacgccgtgcgctacgcgtggattgccgactatgacgatgccgcgacttttctcaataccttccgtaccggcgatagtgaaaataccactcagtacagtaatccagcctacgatgaggcgttgcgcaatgcggcaaaagcgtctgataccgcggcgcggggtcagttctaccagcaggcggaggatttactaggccaggatgtcccggctattccggtctatcactatgtgcgtacccatctggtgaagccatgggtcgggggttttacgccggataaactggggtattactacaccaaagatatgtacatcaaaaaacattag

SEQ ID NO: 174337 - DNA, 660 bp, Klebsiella oxytoca
atggatcgtataattacatcgtcgcgtgaccgttcatcgctgcttagcacgcataaagttctgcggaacacctattttttgcttagcctgacgctggcattttccgccattacggcgacggccagcacggtactgatgctgccttcgccgggtctgattctgacgctggtcggcatgtatggcctgatgttcctgacctataaaacggcaaataaacctaccggcattatttccgcgtttgcctttaccggcttccttggctatatcctggggccgatgctcaatgcctacctgtctgcgggcatgggcgatctgattggcctggcgctgggcggaaccgcgctggtgtttttctgctgctcggcctacgtgctgacgacccgtaaagatatgtccttcctcggcggcatgctgatggcgggcgtggttgtggtgcttatcggtatggttgccaatattttcctgcagctgccggctctgcatctggcgatcagcgcggtgtttatcctgatttcttcaggcgccatcctgtttgagaccagcaacatcatccgcggcggtgaaaccaactacatccgcgcgaccgtaagcctgtacgtctcgctgtacaacatcttcgtcagcctgctgagcatccttggcttcgccagcagagactaa

SEQ ID NO: 174338 - DNA, 330 bp, Klebsiella oxytoca
atgtttatctttgaaggcaacgaaatagagaccgatagcgaaggctatctgaaggatacgaccctgtggagcgaggcgatggcgaccgttattgctgaacaggagggcatcgccctgtccgttgaacactgggaagtcgtgcgcttcgtgcgcgatttttatctggaattcaacacctcaccggcaatacgcatgctggtgaaagccatggcgaacaagttcggcgaagagaaaggcaacagccgctatctttaccgcctgtttccgaaaggcccggctaagcaggcgacaaaaatcgccggtctgcctaaaccggtaaagtgtatctaa

SEQ ID NO: 174339 - DNA, 282 bp, Klebsiella oxytoca
atggcaacggtttgcacgatggcgtgggtatacggttccgttcagggcgtcggatttcgctattctacccagcgcgaggcgctacagcttgggctaacgggatacgcgcgcaacctagacgacggcggcgtggaggtgcttgcctgcggagagccggagcaggtggagaaacttatcgcctggctgaaagccggtgggccgcgcagcgcgcgggtggacagggttctgaccgagccgcatcagcccaccagagagtggcagaaattcgccattttgtattag

SEQ ID NO: 174340 - DNA, 789 bp, Klebsiella oxytoca
atgcggaatatcaattttcaccataatgcgctaacggcggcggaaattaccacccgccgtctatgcaaactgcaccgcgtcacgctgttctcgcccgcgatctgccgggtaaaccgcggcagtaaggtcattgtgcagggagccagcgagatgctggcaacgccgcagcagctgatcattttgcccgccgaggtggaactggaggtcataaatcagccggaaaacgagctgttttgctccgatctgctgtcactaacgcccgagctgttggccgattttaagcatcgctatatgagcgaaccgcaggtcggtcgtttgacttcgctttgcgcgccgctggcgccggaactgtcgtttatgtggcagagcgttctgcaggcggtgcgggaagggctttcggcggagttacagcatcatcaggcgatggggttgctgctggcgttgtatcaggccggatacgccggaccgctgcttaacgaacggcgcgacgacataaccggtcaggtcaggcagattattatgctgtcgcctgccgaagcgtggagcgtggcgaaagtcgcaaaaatgctgtttcttggcgaatcgacgctgcgccgccgtttgcagcaggagtcccggagctttcgccagatcgtggaagaggtgcggatggcctacgcgctggggcaattacagtcgacgtcgcggcccattggcgacattgcgcaaagcagcggctatctgtcaggctcgcgctttaccgcccgttttcgtcagcactatggattattaccaaagcatgtacgctga

SEQ ID NO: 174341 - DNA, 555 bp, Klebsiella oxytoca
atgaaaacaggattgaaatgggctgtcgcaataatggttattatgagcggaacggcgaatgccgcagcgtttagcgtcagcagcgtagatatgcgcgatggcgggtctctggcgcagaatcactggtttggcggctttggctgcaccggcggcaatgtatcaccgcagatcgcctggcaaaatgccccggcgggtacccgtagtttcgcggtgaccgcttatgacccggatgcgccgaccgggagcggctggtggcactggacggtggtgaatattgcccaacaggtgacaagtttagccgctggcgccggagacaaaaataacgctaaactgcctgccggggcggtacaggggcgcaatgactttggctatgcgggttttggcggcgcgtgcccgccggccggagataaacctcatcgctaccgctttacggtctgggcgcttgataccccgacgctgcccattgatagcgcggccagcggggcgttagtcggatttatgttacacagccacgccatcgccagcgcgcagttaacggcgctggccgtaagataa

SEQ ID NO: 174342 - DNA, 1203 bp, Klebsiella oxytoca
atgacagactccattttcccccgcttagtgttaaccaaaggacgcgagaaatccctgctgcgtcgccatccgtggattttctccggcgccgtcgcccggatggaaggtaaagcccgttcaggtgaaaccatcgatattgtggatgcacagggaaaatggctggcccgcggcgcctattcgccttcgtcgcagatccgcgcccgcgtctggagcttcgatcgcactgaagccattgataacgcctttttcgagcgtcgcctgcagcaggcgcacacctggcgtgagtggctggcggcccgcgacgggctcgatagctaccgcctgattgccggagaatccgacggcctgccgggcgttaccatcgatcgttttggcgacttttttgtgctgcagctgctgagcgccggcgctgaatatcagcgcgcgtcaattgtcagcgcgctgcaaacgctgttcccgaactgcgccatctacgatcgtagcgatgtcgcggtacgtaaaaaagagggcctggagctggcgcaagggccggtgatcggtgaactgccgcctgccctgctgccgattaccgagcacggtatgcagctgctggtcgacattcagggcggccacaaaaccggctattaccttgaccagcgcgacagccgcctggcgacgcgtcgctatgttgcggataaacgtgtgctgaactgcttctcctataccggcggttttgccatctctgcgctgatgggcggctgccgtcaggttgtcagcgtcgatacgtcgcaggaagcgctggacgtcgccagacagaacgttgagctgaataagctggatttatcgaaagcggaattcgtccgtgacgatgtgttcaagctgttgcgtaaatatcgcgattcaggcgaaaagtttgatgtcatcgtgatggacccgccaaagtttgtcgaaaacaaaagccagctgatgggcgcctgccgcggctataaagatatcaatatgctggcgatccagctcctgaaccccggcggcattctgttgaccttctcctgctccggcctgatgaccaccgatttatttcagaaaatcatcgccgatgccgccctggatgccggacgtgatgtacaatttatagaacagttccgtcaggctgccgatcacccggtgattgcaacctatccggaagggctatatctgaaagggtttgcttgtcgcattatgtaa

SEQ ID NO: 174343 - DNA, 318 bp, Klebsiella oxytoca
atgatagccagcaaattcggtatcggccaacaagttcgccacacgcttctgggctacctgggcgtaatcgtcgatgtcgatccagaatattcgctcacggagccggaagtggacgaaatcgccgctaacgacgatttgcgtcttgcgccctggtatcacgtggtgatggaagatgacgatggccagccgattcacacttatcttgcagaagcgcagctaagcagcgagcccagcgacgagcatccggagcaaccgtctctggacgagctggcgagaaccatacgccagcagctgcaggcgccgcgattgcgcaactaa

SEQ ID NO: 174344 - DNA, 969 bp, Klebsiella oxytoca
atgaggcgagtcgtcgcgctgctgctggcctgcggcggctgtgcgccgctgctggcccgtgacgtggtgcaggttgcccgctgcgtgccaggatcgctgctgcacaatcatcatctggaaaaagcgcacgttgtcgatgagtttcatatttattacagcctgcagggtaaggacgccctgcaatatccgcaggatagtaccggcgatggcgtgccggatgtcgtgaaagacatcgcgagccagctccaggctgcaaaatatctttacacctcgctgctgggtctacgcccgccgctgcagcagaaaatttatacccaggcccgacaaattaatatctacctgctgacgcttcccaaaggtcacggcctggcctttgaccgcgtggcggcggaaaccatgagcgatggcgcaacgctcccctgcggtttaaaaattgtcctcaatgcggcccggcggccggcgcgcaacgttacgcccgcccatgaattgttccatttgtatcagtacggctacgcggtttttaaacagaaatggtatctggaaggcatggcgcgctggatggaaaatgcattcaggcccgcggagcaaagcatcttgccgttagccgccccgcccgtttgcgaaaattatttctcgcgcggctacggcgcggcaagcttttgggccagctacgcgcagcagtcgtttgccgccaccatattgccggaccacgcgctggcgtatcgctacatcgacggtagcccggtgtttaaaattcaggttttaccgggtggggcgatgctcgcgccgttttttcaacagcttgcgcttaatagcgagggcatttcacgtgagatgaagctggctaatacccgctggagtgaaaaacagcagcgtgacggacggttcaataaccagatatgccaggcgctggcagcgactgcaaaaagagagggtaataaaaaacccgcagcgcgggttttagattag

SEQ ID NO: 174345 - DNA, 3144 bp, Klebsiella oxytoca
atggcgctaagtgacttactgcaacaagcttgctttcaggccaaaaaattgaaatccaccgtgttgccctctgactatccggcatgggtgatcttctttagcgtcagcgatggcaaagagcgggcgcatatgcatatcgccagcggaaccagcttcgatctcgcctggctggcgggggccagagcgctgcaggagtggcgtaaaaagcaggccaatgaaccgcagtggctgcgtatcgacgttgtggacagcgtggaaaagctcagctggcactccctcaatgagaaattcagagtcaccaagcgcaactattttcgctttggactcgcgtttgacccgcagtttagctgtgcgatgctagagcaggaaatcgccggcaacgcgctgctctacgacggcgacaatggcgtcgtcgcgccgaatagcgtcaatttgcaaaactacggccagcggcggtttaagcagacgcttagctggccggaggatccgcagcagcctctgtggcgttttaaaacccaggcggtcttttgcgatcgctttggcgtaaaagtcattgaacatgccgggaggggctccggctatcgcgccattggggaaaactggcagcaagcgtgcctggctgaggtgattaaaaaaggcagcgattatctggcccgtcaggtcaggaaagacgggctgtatcattatggctggtttccctgtttcgatcgcccggtccgttcctataacgcgctgcgccacgccagctcgacctattcgctgatcgaaggctgggaagcgacgcgcctgccgtcggttcgccaggccatagaccgggcgattgcgtatctggtaagcacgctgattgaggtgcggacgttggatgatgggcgcgaggcagcgttcctctgcgacgttggcgaggagatcaagcttggcggtaatgccgtcagcatcctggcgctggtaaaatataccgaaacgaccggagaccggcagtacctgccgctgatggcgcagctggcgaccggtattgcctggatgcaggatccgcaaagcggccaatttgttcatgtattaaatagccacgatctgtcgttgaaggccaaattccgcattatctactacgatggcgaagcggcgtttgccttgatgcgcctgtacggcctgaccaaagagccattgtggctggacgtggtggaaaaagccttcgcctatttcattcaaaacaaacactggcagcatcacgaccactggctgagctactgcgtaaatgaattaacccgcttccgcccggaggagaagtactttcgttttggtctcaataatgtgcgcgatcatcttgatttcgtactgcatcgtgtgacgacctatcccacgctgctggagctaatgatggcggcgtcggaaatggtcacccggctgggcgcctcgcccgagcaccgccacctgctggatgattttgaccagcaaaaattctggcaggcgctggaaacccgcgcccgctatttgctgaacggcttcttctggcccgagctggcgatgttctttaaaaatcccgcgcggatcgttaacagcttctttatacgccaccacagctaccgcgtacgtatcgatgacgtcgaacactatctctccggctttatcgcctatcagaaataccacttagcggcaaaaaagccgtcgctccagcaggacaacgcgccgtcgtcgattgatgcgacgcccgtttttctgctggagacgctacgcgatgtcggtaacggtatcgaggtggccgccatgcggcgggcgaagctgttcaccgaacatctgcgcgccgtaccctggctgattaccgcgacgtggaatcccgaattacccacggtggtcaaggcgctgaaggcgcggggggcgctgcccaaagaggtaccggtttataacctttaccagtggttaagcgactgcctggagatgaacgcgattgcgacgctggagccgctggtggggagtattgaactcaggcatgtcgtcaatcccgacgcggacctgccggtgggaaaacagaacttcctgctacgcccgcaggggaaaattatcgaagattatatcgatagcgccggcaatattctgctgcgtaaaagctttgatgagaagaaaggcaacctgcggctcagcgctctggaaattgccctcgccgggggcgacgtcaaacgctttactctggaggaggactttttttcgtggatgctggaaaccatgctggcggggaaagggcgttggcactttatcgtggataaaaataaaacgtggaaaaacttcgtctgttcacggccagctcagcgtatggcctgctcattaagcgccattattcactcccatcatcagctctctaacggcgcgctgaaaagctcatatcgacacctcctggagcagccggatctcgtcgaccagttgattatcctcaccgatgagcagtggcaggatttgcagcaggagggattcccggctacgcagatggcggtgatccccaaccatctcgataacggcaatattccggcgaacccgcagaaagtgccgtcacaaacggttatctacctcgcgcgttactcggaggagaagcagcacgccttactgctgagcgcctttcgtaaagtgctggcggttatccccgatgcgcagctgcacacttatggcgtagggccgctgcggcgcagcctgagcgcgcaggtggcggagtgggggctggcgcaggcgatccatatcaatggcttcacgtccgatatcgcccaggcgcataaaacggcctgctgtaccgtgctttgttcgactcaggaagggcagtctatttccgccgtggaggcgatggcctacggtaccccgctgattagctttgctatcaaatacggtccgcgcgacatcctgcaggacaggcaagcggggatgctggttccctgcggcgatgaagaagctctggcggcggcgttgatcaaggttatcgcggacaaaacgctacagcaaagtatgcggcaggccgcgctgcgcaacgctcaacgctattatgccagcgccatcgccgaacattgggcggcgtggctgcaggccagcgagcggctgatggcagcgcaggcgaaggcggatttcggcctggccagcaagagtccacaggcggctagcgttgggtaa

SEQ ID NO: 174346 - DNA, 1206 bp, Klebsiella oxytoca
atgaataagcttcccctgatggcggatcatgacccggtggcgctgctgccggataacgaacaagacgaagcgaagatcgtaaaatcgcggcggctgatactgctgctggccggtatgctgctggtgggcgctgtctgggcctggttcgccgtgctggatgaagtctctacgggcaccggaaaagtgatccccagctcccgggagcaggtgattcagaccctcgatggcggcatcttaaccgagctgaacgtgcaggagggcagcaaagtgcaagccggacaggtcgtggcgcgcctcgaccccacccgcagcgaatctaacgtgggggaaagccaggcgaagtatcgcgcctctctggcggcgagcattcgcttaactgctgaggtcaacaatcagccgctggtgtttcccgacaccctgaaagcctggcccgcgctgttggcggaggagacccgcctttaccatagccgcaaggagcaactgagcaaatcgacgcgtcagctggatgagtcgttaaagctggtcaatagcgaactggccattactgaaaaactggcgaaaaccggggcggcgagcaacgtcgaagtgctgcgtcttcgtcagcaggtcgcggatattagttttaaaaaaatcgatctcaatacgcgttattttgttgacgcgcgtgaacagctgtcaaaagccaatgccgatgtagccagcctggcggaagtgattaaagggcgcgccgattcggtgacgcgtttaaccgtccgctcgccggtacagggaattgttaaaaatattaaggtcaatactattggtggggttattgcgcccaatggcgaattgatggaaatcgtgcctatagacggccgtttattaatcgaagcgcggatctcccctcgcgatattgcttttatccatcccgaccagcaggcgctggtcaaaattaccgcctatgattatgccatctatggcgcacttaacggcgtggtggaaaccatatcgccggataccactcaggatgaagctaaacccgatatttactactaccgggtatttatccgtactgataatgattacctggagaataagagcggcaagcgctttttaattggcccggggatgatcgctaccgttgatattaagaccggtgaaaaaacggttatggattatctggtaaaaccatttaatcgggccaaagaagcattacgggagcgctaa

SEQ ID NO: 174347 - DNA, 2148 bp, Klebsiella oxytoca
atgaccccacaagatgaacgtgccggaataccgcacttgtccgattggtcgaatgcgattgcctttattgccaaccactatcgacaaagtttttctcccggaacgctacatgcggctgccgaatgggcgacgcagaaaacgctgcccgaagcgctccggcacctggcgcgccacgccggattacactgccagtttttatccgccaccgatcagaaaatgtcggcctggcggctaccgctcgttatccagctgcgcgatggccaggtggcgatagttgaaagctttgacgtcaataatgccgtcggggtgcggttcgtgaaggagctgtcgctgctcagctactgcccgctggaaactctgctgccggaaattgacaagaccgttgcttttcgcccgtcggctccggaaagggatattcgcacagaaagctatctgacccgctttcagccggactggctgcgtaaaattgtgctgaaagatcttcgcccctatatgcacgtcatgctggcttcgttcgccattaacgttctggcgctgagcgggattctgttttcgatgcaggtatacgatcgggtgatcccggcccagtcttatcccactctttatgtcctgttcagcggcgtattgctggcggcggtatttgcttttgcgctgaaaattatgcgcggacacgtcacggatctgctcggcaaacgtggggatattcgggtctcggaccgggttttcggccacgcgttgcgcctgaaaaacagcgcagtgccgcgctcaacggggagctttatttcgcaaatccgcgagctggagcaggtgcgcgaaatgatgacctcaacgatgatgaccatcgtggcggatttaccgttctttttgctgttccaggtggtgctgtttatcgtctcgccgtggctaagctggatagcgccggtggcgacggttctgatgatcctgcccggcctgctattgcagcgcaagctcgcggcgctggccaacaaaaatcagcacgaaaataccttacgaaacgccattctggtggagagtattcagggtttgcaggacatcaaaatgatgcaggcggaaagccgctttttgcatcagtggaatagctatattgcgattaccgccgagtcgggggtcagaacgcgcaggcacacacacggcctggtcagctggggaatgtcggtacaaaacctgctgtatgccacggtagtggtggtcggcgcgccgctggtgattaatggcgacatcaccaccggggccatggtagcggcatcaatgctttcaacccgcatggtcgcgccgatgaccgcgctgtgcggcgtgcttgctcgctggcagcaggtgaaaacggcgaaggccagcctcgataatctgatggcgctaccggtcgaaggcggccaggacgaaccccgggttcaccgcgccgtgctgcacggtaactatgagttccgccaggcggaattccgctacggccttaacgacgccgcgattccgctgcgaattaaccagctatcgattaaagccggtgagagaatcgccatccttgggcgaatcggcgccggtaaatcgaccctattgcaggcgatgatgggcaacgtcgagctggtcgccggcgaactgcggctggatgatttaagcctgccgcagatcgaccttgcggatattcgccgcaacgccactttgctcacccaggaggcgcggctgtttcacggcactctgcgcgagaatttaatccttgggcggccagcggcgacggatgatgaaatcttctcggtgcttaccctgtgcggcgctctggagtttgtacgcaaactgcccctcggcctcgaacatattgtcatggaaggcggggtggggctttcaggcggccagcgccagtcgctgctgctggccagaaccctgctgcgcgatccgaacatcgtcctgcttgatgaaccgacctcttatttcgacgagcgaacggaaaaggcctttgtggaacagctggcgctgtgggccggcgagcgaacgatgattatcgccacgcataaagcggcggtgctcaatatcgttgaccggattctggtcatccaggatggacagctggcgctggataaacctaaagccaccgtctttgaacaagagaaagcccgcggccaggtggtgaatatatga

SEQ ID NO: 174348 - DNA, 1437 bp, Klebsiella oxytoca
atgcgtctatttatacaaaaaaggaatgtcataacctgtggctatacagctctattaatcacgttaaatccgtcgctttcagctcatgcggaaaattcatatttgctaccgaatgatattagcagccagcgtttaaccgataatcagcaggtcgcggggtataacgacgagattattaacagtcaaacccgaatatccagtccgctggatattaaaaaggcggtaaaaaacgcggtgaactggcatccctctattacgcaggaggtcagtaagcttcaggagatggcgcaaaaagttgatgtggcgaaagcaaaatattacccgcaaataagtgcgggtatgaataatggttatacaaacacttattctgatgccggatatacgccatcgctggtcgtctcagtgtcgcaaatgctttacgacttcggcaaagtgtccagttcggtgagagcagcagactccggcgtggctcagcagcaggccaccgtgatgctgaatatcgatcaggtcgctcacgataccgccgcggcggtagtccaggtgcagggctatcaaaagctggttgaaatcgccaaagcgcaggttaactcgctacagcagatcggcgatcttattcgccagcgcaacgatgcgggggcatcttcattatcggacgttgtgcagaccgatacccgcgtggaaggcgcgcaatccacgctcctgcaatatcaggcggcccttgaacgctggaaagccacgctcgcgacctatatcggcatcggcggaatcgcgacggtaacggatgatgtcccgcagggaatggatgccgcctgcgcggtatccaaaatcgattaccgttccgttccagcggtactggcggcgctggcccaggccggtcaggcgcaggcgcagctggataacgccaacgcgcaaatgctgccgacgatttccctggaaccggaggtgacccattaccttaacgataactacgccaacagcgcggtgctgaataaaacgcaatattccgcttgggtaaaagtgcaaatgcctatctaccagggcggggcgatgaccgcctcccgagacgccgcccaacaaagtctggcggcggcgaatgcggcgatcaaaaccgcccagctggacgccagccagaagctgaacgcctctcgcgatgaagcggtcaatcttgcccagtcgctggggattcagaaacgacagcagcagctgggcgagcaaacccgggcgctgtaccaggatcagtatctccagctcggttcacggccgctgctggatctgctcaacgtcgatcaggaaatttaccaggccagatttagccaggtcctgacggaatcacaactgcgctcgctggagctggactgcctgttcagcaccggcaagatgcgcacggtgttcgcgctggaaaatcaaaatatccagggcgtggagatccgcccatga

SEQ ID NO: 174349 - DNA, 2850 bp, Klebsiella oxytoca
ttgctcagcaccgtcgatgtctcgctgctggcgggcaataatctgcgctttagcgtgggagccggcaccgtggaggatatgacggtatcggtgaacggcaactcgctgctgacggcgagcggattgctgaccactatcgtcaatctgctgggggcaggaaataccctgaaggccgatctgtcggtggtgaatacggtcaccggtgaagttgtggcgatagcggaaaacagcgtctctatctcggcgagcctgcttggcgggctctcctacaacggcacggtctccttcgccaatctgccggccggcgactacaccatggttatctctgcgccggaaagtaacggcaccctggtatcgttgatcaacgcgctggcagcggcacaggtggcaagcttcgtcaacgtagatgtgacggattcggttggctacagcgtcgacgccattgaaggtaacgtgctggatacaaccgccagcggcgatatgcaggatagcggtcagggcatctcggtcaccagtgcggtatcggattccgtcgacggctcgaccccggtcaatgtgaccagcgctggcgtcgatatcaccggagcttatggggtgctgacgattcactctgatggcagctatagctaccagttgaccaaaggcggggccgctatcggtaaatcggatgtctttagctataccattaccgatgaagcgggtaatacatcgacgacgaacctgacgattaatatcggcggcaatatcgaaccggcgcaggccaatccggatgctcaggaaacggatctgaccgcgacgttcgataccctcaacggagaaagcggtactgtcgggcagctcgtcggcgtctcgttactcggtaacgtcaatgttgggttacttaacggtaatagctttgactttgatgtggccgccggcgcgaacgaaaaagtgctgctgacggtctcagggagcaccggactgagtctgggcgcggcactgacgacgctgctgagcctgttgggcggcgcatcgtccttcacggcggatctctctatcatcgataaggctaccggagaagtcgtgcaggtcctgacaaacgccgtcaacattaacgttaacggcatcgggctcagcctcggctatagcggaggcggctggtcctcgatgttaccttcaggatcgtatacggcggtggtctcctcaccgaataccggaggcctgctgggggccctgctggacctgaacctggggacctttgtcaacgtctcggtcaccgattctgagggctatcacaccgacagcctgacgggcaacgtgctgcaaagcgatggtgcaggcgacgtagcggatacaggggtcaatattaaggtgaccagcgtcaccgccacctcggttaacggcgctgaacctaaggaggtcagcggcagcggaacgacgatagagggcgcatggggatcgttgaccatccacagcgacggtagctatacctatcagccttatggcggagtgaatagcgtcggtcaatcggaagtctttacttacaccattactgacagcctcggccacacggcgagcaccacgctgacgatcgatatcgatagcccggcttcgctggcggtcaatgaccaggtcacgctgaacgtagcaacggcgctggcaacggtgaatgttccggcgattgacactgcggggctgaacacaagcggtaaatcaaccacgggaggcgtatcagcaaccaggaccatcaacttcagcgttggggccgatcgcgaaatggatacgctctcggtgaaagtgaactacaccgcgagtggctcggtggtcaataccgtcaaaatagacagcacggtcagcatttatcacgtgctcagcgatggcagtaaggttctggtatggcagggcacgccgacagagagcttgaccaccgttatcggcactacaacaaacgctgcggatacgttaacgctgacgaatgtggcattgagcgaaggtaattacgagatggttctggtgtctaaggcaaccgccactcttgatactttcttaacgccggcaccgaattataccgtcggggcttcgataaccggtacgaccattgacaccgcgacgcactacacggtagcgggaactaacgtcagtggaaatatacagaacggaaataactcaggcggtacggaagatttccatggcgtactgtactcgtcttacagcgtctccggacacacttccagcggcgctgcggaaacctggactttccacagcaatggcagtatcacgaccagcaacgggactaacgtaagcgcaaccagcgtcacaatttacggtgactatggcaccctgacgatggcgaataatggttcttacacctacagtctgaaggcaggaatggatgtgtcgaccatcacgcataaggaagtctttgcctactcggtaaacgacagcaatggcgcttcttccgcggcgacgctgactatcgatctgcatccgcagattaccggcagcgtgaacggcgacgacatccacagtaccgcttacgacgataccttcaccctgggcatcggggccgacacggtaatctacaacctgctggccgatgataataccggcggcaacggaagcgatacctggaaggacttctcggttgcgcaaggggatcatatcgacgtatcggcgctgctggtcggctgggatggtaacagcagtagcctgggcaattatgtcaccttgagctacgtgggcagtaatacggtggtatctatcgaccgcgacggtggcgcaggcggccatcaatcgacaaccttaatcacgctggaaggggtgcatatcaattcgctcaacgagctgcttgataccaataactccaattaa

SEQ ID NO: 174350 - DNA, 639 bp, Klebsiella oxytoca
gtgattcggattctgacagcgactctgactccgacagcgactctgactccgacagcgattccgactccgacagtgactcggattcggacagcgactcggattctgacagcgattccgactctgacagcgactccgattccgacagtgactcggactccgacagtgactcggactccgacagcgactcggactcggacagcgattctgactctgacagcgactcggattcggacagtgactcggactctgacagcgattcggattccgacagcgactcggattccgacagcgactcggactctgacagcgactcggattctgacagcgactcggattctgacagtgattcggattccgacagtgactccgactccgacagcgattcggattccgacagcgactccgattccgacagcgactcggattctgacagcgattcggattcagacagtgactcggactctgacagcgactccgactccgacagtgattctgactctgacagcgattcggattcggacagcgattcggactctgacagcgactcggattccgacagcgattccgactctgacagcgatattgaggccaactccgatagcaacagcccggacgttgtcgcgctggaaggtaacctga

SEQ ID NO: 174351 - DNA, 1656 bp, Klebsiella oxytoca
atgagtgccgaacaaacgacgggacgcgtctggaaccgtcgccgtacggaaaaacagcggcgactggccgaggccagggtctcaggcaaagtgatccccaccgaccagctggttgcggcccttgagcagctgctggcccccggcgaccgcgtggtgctggaaggtaacaaccagaaacaggctgatttcctctcgcggatgctggcggaagttaacccgcaaaaaattcacgacctgcatatgattatgccgagcgtcgggcgcagcgagcacctggacctcttcgaaaaaggtatcgcccgcaagctcgatttctccttctccggtacccagagcctgcgtatttcgcagctgctggaagatggcctgctggaaatcggcgctatccacacctatatcgagctttattcccgtctttatgtagacctgtcgccgaacgtcgcgctgatagccggttataaagccgaccgcaagggtaacctgtacaccgggccgagcaccgaagacactccggcgctggtagaagccgccgcgtttcatgacggcatcgttattgcccaggttaacgaactggtggatgacgaatgcgatctgccgcgcgtggatatccccggttcgtggattgactacgtagtcgtcgcggataaaccgttctttatcgagccgctgtttacccgcgatccgcgcctgattaaacaggaacatatcctgatggcgatgatggcgattaaaggcatctacgccgagcatcaggtgcaatccctgaaccacgggatcggctttaacaccgccgccatcgaactgctgctgccgacctacggcgaacagctcggtctgaaaggtaagatctgtaaacactggacgctgaacccgcacccgacgctgattccggcgattgaaagcggctgggtagagagcgtccactgcttcggcggcgagctggggatggaagagtacattcgcgcgcgtccggatatcttctttaccggcgccgacggctccatgcgctccaaccgcgccttctgccagctggcgggacagtatgcggtagatatgtttatcggttcgacccttcaggttgacggctacgctaactcctccacggtgacccgcggccgcctctccggcttcggcggcgcgccgaatatgggccatgatccgcacggtcgccgccacgccacgccggcatggctcaacatgattaccgaaccggacccgatgcagcgcggtaaaaagctggtggtacagatggtggaaacattccaggcgggcgtgaaaccgaccttcgtggaaaaacttgacgccgttgaagtcgccaaaacctccgggatgccgctggcgccggtaatgatttacggcgatgacgttacccatgtactgaccgaagaaggcatcgcctatctctatcgggcggaaagccttgaagagcgccgggctatggtagccgccgtggccgggatcaccgatatcggtctcggcgttgatgccaaacgcgtggccgcactgcgccaaagcggcaaagtcgtgtatccggaggatatcggtatccgccgcagcgatgccacccgctccctgcttgccgccggtagcgtggccgatctggttgagtggtccgacggtctgtacaacccaccggcaaaattccggagctggtaa

SEQ ID NO: 174352 - DNA, 843 bp, Klebsiella oxytoca
atgaaaaaactctctccccagtttgctgaaacccgggcccgctggctggcccataccgccagcgcctgcctcgttgacgaggcgcgactcagccctaaaccgggcctggtcgatagccgcggcaacggcgcgcatcaggatctgagcctggcgctgatggagcgttcagcccgcagcctgcagccaacgtttcatgcgctagcccagcagagctggctgcggccggcggacgttgccctgcgtgaaaccgttggccggctgggccgcgaaggcgaagcgcagatgatgcaggcgactgccggggtcaatacccatcgcggcgctatctgggcgctgggcctgctggtcagcgcgacggcgatgctgggaggagagggtcatgcacagaggattgcggaaaccgccgccgccctcgcccgtctgccggatgcctgcgcgccgaagactttcagtaaaggcctgcgcgccagccgccgctggcaggttccgggcgcgcgggaagaagcgcagcgcgcttttccgcacgtcactacccttggcctgccgcagctattgcgcagccgggccgagggagccagtgaagagcaggcccggcttgatgcgctgatggcgattatgacttcgcttagcgatacctgcgtgctctcccgcgccggaatggcgggccttgaagcgatgcggcaaggcgctggcgaggtgctggcagcgggaggatgtgcgacagccaggggacgcgccgcgttggcgcgtcttgatgcgcagatgctggcgcagaacgcctcgccgggtggcgcggcggatcttcttgccgccaccctgtttctcgaccgggtttccgcttaa

SEQ ID NO: 174353 - DNA, 300 bp, Klebsiella oxytoca
atggaacagattaaattgtcattccctgccaaccgcgccctcagcggcaaagcgctggcaggcgttgtaggctccggcgatatggaagtgctctatactgccggacagagcgatacgcttaacgtagaaatcaccacctccgtggacaacagccaggcgcgctggaacgcgctattcgaacggctgagcctgattaacggcctgccgggcggacagctgatcatccacgacttcggcgccacgcccggcgtcgcgcggatccgtattgaacaggtttttgaggaggtggctcatgcgtaa

SEQ ID NO: 174354 - DNA, 834 bp, Klebsiella oxytoca
atgcgtaacgatcgcagctttattgaactccgcgctcgtgaacgcgcccgcaccctgctggatgacggcagctatcgcgaactgctggatcctttcgacggcatcatgtcgccgtggctcggcgcgcagggcatcgtcccgcaatccgacgacggtatggttgttgcaaaagggaccatcaatggccagccggcggtggtgattgccattgaaggtaccttccagggcggcagcatgggtgaggtctccggcgcgaaaatggccgccgcccttgagctggcggcggaagataaccgcaacggtattcccactcaggccgtgctgtgtctggaaaccggcggcgtgcgcctgcaggaagccaacctgggccttgctgccatcgccgatattcatgccgcaatagtcgacctgcgccgctataccccggtggtcggcatcgttgccggcgccgtcggctgcttcggcggaatgtccatcgccgcggcgctgtgtagctacctgattgttacccgtgaagcgcgtctgggcctcaacgggccgcaggttatcgagcaggaagcggggattgaagagtatgactcccgcgaccgtccgtttatctggagcatgaccggcggcgaaattcgctacgccagcggcctggtcgatgccctggtaggcgatggtatcaacgcggtgaaaagcgcgatgaacgaggcgatcgccaaaggcgtgcccgcgcagcatcgcagcgacaaatatgaagatttcctgacccgtttgacccgattcgatacccgccagcaggcggacaccgcgcagatcaaacagctattcgcccgggaggtgaaataa

SEQ ID NO: 174355 - DNA, 801 bp, Klebsiella oxytoca
atgagccagttcactaatcgcgccgcgctgtggctaaatcagctggcgccgaatgccccgctaatgaccggtctgtgcccatcggtgcaggttgccgacgccgattttaacggtgaaagcgcccgttttatcgccgtggtaccggatgcaaataaccattacccacgcgccgctcagggtgaagttggcctgctcgaaggctggacgctggcaaaagtggtcaacgaaaccctcgacgccgatgccgataaaacggtgaagcgcccgattatcgcggttatcgatgtccccagccaggcctatggccgtcgcgaagaagcatttggtattcatcaggcgctggccggcgctgcaggcgcatacgcgaaggcgcgtcttgccgggcatccggtgattggcctgatcgtcggcaaagcgatgtccggggcgtttctcgcccacggctaccaggctaatcgactgatcgcgtttaacgacgccggggtactggtgcatgcgatgggtaaagagtcggccgcgcggatcaccctgcgtaccgttgaagcgctggagaaactggcggcaaccattccacctatggcttatgacgtcagcaactacgcgacgctcggcctgctctccgctctgctggatatcagtaatcctgacgcaccggacgcccgcgatctgacgctggtcaccgataccctgcgcgacgccatcgctgacgcccgtcgggatgcctcactgaagtgccgccttggcgcggagaaccgccgtagttcccaactagtacgcgatcgcatgcgcgccagctggtag

SEQ ID NO: 174356 - DNA, 960 bp, Klebsiella oxytoca
atgacttatgtgattattcatgccctcgcgccgatttttgtcatcatgctgctgggcttctgggccggcaaggccaaaatggtcgataacaaaaacgtctctttactcaatattttcgtgatggattttgccctccccgcgacgctgtttagcgccacggtgcaaaccccatggaacggtatcgtcgcgcaatcgccgctggtactggtactgaccggggccatgtggattacctatgcggccatctacttcctcgctacccgcgtattcaagcgctcgccgcaggatgccgccgtgttgaccctgaccgtagcgctgcctaactacgccgctcttggtctgccgattctgggcagcgtgctcggcgaaggcgcatcaacctccctctccgtcgccgtttccatcgcttgcggctcggtactgatgacgccgttctgtctgctgattctggagcgtgaaaaagcgcttgccgccggcgagaacagcggttcgacgctggcgatgctgccggtactgatgtggcgttcagtgaaaaaaccgatagtctgggggcctctgctgggggttgtcctttcggcgatcggtctcaaaatgccggatctgctgctggcctctattaaaccgctgggcctggcggcgaccgccgcggcgctgttcctgaccggtgtcattctgtcggcgcgtaagctgcagctcaatgcgctgattgccacttccactctcgtcaaactgctggttcaaccgtttatcgcctggggtctggtgatgctgctggggctgcacggttctatcgccattaccgccattctgatgattgcgctggcggccggtttcttcggcgtggtcttcggcaaccgctttggcgtacagtcgccggatgcggaagcggtgctgctgttaagctcggttctgtgtatcctgtcgctgccgctgtttatcactttaacttcagggatctaa

SEQ ID NO: 174357 - DNA, 621 bp, Klebsiella oxytoca
atgctatcaacgccgcgtcctcacgatttagtctggttgaatagtgccgccgcgctggaggcgatcgaggaacattgggtcgctcagcactggcgcaccagcctgccggtggtggtacgacgcgacgttgacatcagcgcccgcattccggtaggcgtgcggggcatgaagcgcgaacagcgcgctgcggggtgggtacggagggagaatatcgtccgaaccattaccccggaaacgctcgccgatcgcctgctgcttctgcgttcgccgtttgtctctcagccgccggtacaggcggcgatatcactgaccttgcacgactggccgtggcgctggggcattaccggcagtaccggctatgcgctggccaccgaaattcccgtgcttcacgccgccagcgatctcgatctgctgatccgcgcgccgcagccgctcgaccgcgaagcgctgctcgcctggcagtcccgcgtcgcccgtctgccctgccgggcggatacccaggtcgaaacgcccgcaggggcattcgcgttaaacgagtggctgcgagatggccgcgccctgctgaaaacgtcccgcggcgcgcgcctgaccgctacgccatggaacagggaggaagcatga

SEQ ID NO: 174358 - DNA, 903 bp, Klebsiella oxytoca
atgaaaattctctttacctttcccggtcagggaaaccagcggccggatatgctcgccgcccttcccgaccgccagaacatccttgccgaggcgcgtaccgtgctcggcgatgaagtagaccatttagataccgccgctgcgttaaaacatacccgtgcagtgcagctgtgcttgctgatcgcaggcgcagcctgggcgcgggagctacagcgtcaaggtgtgaagccggacatggtcagcggcctgtcgataggggcttttccggcggcggtcattgccggcgcgctggatttcaccgacgcccttcggctggtggcgctgcgcggcgatttaatggagcaggcttatccccacggctacgggcttactgcgattatgggcctgacggtcaaccgcgtggaaaagctgattgccgatagcgacctctatattgccaaccttaacgctgaaacgcagattgtcattgccggacgcgacgacgagatggcccgcgtggcccagctggcgctggcggctggcgccagtaaagctcagcggctggcggttagcgtcccttctcactgcgcgctgctgaatgaaccggcggctaagctggcaaaagccttcgctgacgtcacgctgcaacgaccgtgctgtgcatatctgagcggctccacggcgcgcgttttatgggacccattaaaaatcgccgacgatctggcgctgaatatggcgcgaaccgtgcgctggcaggaagcgatgatcgccgctgatgaacgggacgcgcggctggcaatcgagatgccgcccggcggggtgctaacctgcctcacccgccaggcgggctggcggggagagagcatttcgctggagcgcagcggtatcgacgtcgcccgtcacctggcaaaccggcttaatggctaa

SEQ ID NO: 174359 - DNA, 927 bp, Klebsiella oxytoca
atgaaagacgatattaatcaggacatcaccttccgcaagctgtcggtatttatgatgtttatggcaaagggcaatattgcccgaaccgcagaatcaatgcagctgagcggcgtcagcgtccaccgggcgctgcatacgctggaagagggcgttggctgcccgctgtttattcacaaagggcgcaacctgctgcccctcccggcggcgtggacgctgctggagtactgccaggacgtgatcagcctgatgacccgcggactggaagctacgcgtaaagtagcgggtgtcggacaagggcggctgcgaatcggcacgctttactctctgacccttgaaaccgtaccgcgcattattatgggcatgaagctgcggcggccggaactggaactggatctcaccatgggttccaatcagatgctgctggatatgctggaagatgacgcgctcgatgcgatcctgatcgccaccaacgaaggtgaattcaacaattcagcttttgatgtggtcccgctgtttgaggatgatatctttcttgccgccccggcgacggaacaactggacacctcaacgcccgccgagctgcgcgactatgcgcggcgtaaattcgtttctctggcggaagggtttgccacctatgccggttttcaggacgcttttcaggtggcgggatttcaacctgaaatcgtcacccgggttaacgatattttttcgatgattagcctggtgcaggcgggcgtgggctttgcgctactgccgggacgaatgaaaaaggtgtatgaaaatgacgttcagctgttgaagctggcggagccctatcagatgcgccagctgatctccattgtctactcacaccagcgcgagcgcgacgccgacctgctggcgctggcggcggaagggcggatgtacgcccgtagccttagccattaa

SEQ ID NO: 174360 - DNA, 1698 bp, Klebsiella oxytoca
atgcaggctcttattacacttgtgctatgtgatatttctattatgcctgcaattaaaaatacgattatatctatgaccgcattagcgatgttcgtcagctcggcgaccttcgcaaatgacgatacctcgaaaaaaaccgatttcctgctgatcggcggcggcatcatgagcgcgtcgctgggaacctggctgcatgagttacagccggactggaatcaggtcatggttgagaagctggatggcgtcgccctggagtcctctaacggctggaacaatgccggtaccgggcactccgcgaatatggagctgaactatacgccggaacgcccggatggcaccattgacgtcagcaaagcgctggatattaacgaacaatttatgatctcccgccagttctggacggcgcaggtcaaacgcggcattttgcacgatccgcactcctttattaactccaccccgcatatgagttttgtctggggcgataacgtggattatctgcaaaagcgctatgccgcgctgcagcaaacgaccttattccaggggatgaaattctccaccgatcaccaacaaataaaacagtgggcgccgctggtcatggagggtcgcgatccgcagcagcgcgtggcggcgacctggacaccggtgggtaccgacgttaactatggggaaataacccgccagctgatcggtagtctgaagaaaaataacaacttcaccctgcaaacgtcttctgaagtgaccgcctttaaacgcaatgctgataattcctggcacgtgacaatcaaaaacgttaatagcggcgaagagcgggcgatcgatgcgaaatacgtatttatcggcgccggcggcggtgctctgaaattactgcaaaaaaccggtattccggaggcggataactacgccggtttcccggtgggcggctccttcctgatgaccgaaaacccggcggtaaccaacgagcatcgtcaaaaagtttacggtcaggcttcggttggcgcgccgccgatgtcggtgccgcacctggatgcccgcttccttgacggcaagcgcgtggtgctgtttgggccgtttgcgaccttctcaactaagttcctgaaaaacggttccttcctcgacctgctgagcaccacgactaccagtaacgtgctgccgatgactcatgtcggtctggataactttgacctggtgaaatacctcatcagccaggtgatgctcagcgacgatgaccgctttgccgcgctgaaagagtactatcctggcgcgcgcagagaggactggaagctgattcaggctggccagcgcgtgcagatcatcaaaaaagatgccgagaagggcggcgtactgaagttgggtaccgaagtggtggtggatgaacagaaaaccatctccgcgctgctgggcgcttcgccgggggcttccaccgccgcgccgattgccctgaacgtgatcaagcagatgttcccggcgcagtttaattccccggaatggcagagccgcattcgcgataacgtaccgagctatggccagaagctgaacggcaacgtcgcgctgacccagcaggtgtgggatgataccgcagcggcgctacagctcaccaaaccgccggtgattgaaatgaacgtctccgctccggtaatgaccgccaaaccggcagagccgaaggcggaaacatcgccgcagcacgatatggcgctgtaa

SEQ ID NO: 174361 - DNA, 906 bp, Klebsiella oxytoca
atgagcagtaagccaaccgcttcaatgatggaacgacgccaccctgaaactacccatatagagagtcttgccaccctcgatatgctgacgctgctgaataaggacgatcggcagattgccgaagcggtcgaagcatgtttgccggagatcgcgcgcctgatggataacgccacggcgacgctgagtcggggagggcgactggtgattatcggtgccggggcgtcaggtcgtgccgccgtgcagacggtaagtgagtttacgccggaggggaaacattcgctggtcggacttatcgccggcggccctgccgctgcgctgcaggagatggaaaccgcggcgaatgattacgatcttggcgcctttgaactacaggcgttacagttcagcaaccaggatatgctgctggcgctgacggtaagtggcaagacgccgtgggtctggggggcgatgcgccatgcctggtcgctgggcgcgccaattgcggttctgacgcagcaggccaatagcgaagccgcccagttggcggatattattatcgccccgcaaaccgggccggaagcggtggctggctttggcaatccgaaggcgcaaattgcgcagcgacagatcctcaatatgctgaccaccgggctggctattcgtagcgggcgagtgtacgaaaacctgcgcgtcgatctgcaggccagcacgccgcgctgggccgagcggcagattgccatcgtaatggcggcgacggcgtgctcgcgcagtgaggccaaagccgcgctggccagctgcaatcagcactgccggacggcaatcttgatgcttctcagcgggctggatgcctggcaggcgcgcgagctgctggcagagcataacgacagtctgcggattgcgctacgggcagcgcagccggtggcctga

SEQ ID NO: 174362 - DNA, 1620 bp, Klebsiella oxytoca
atgaatgaattagcgcagcaggcagcgcccgcgcgtaaacgcccgatgagtatgaagctgagcaccgccgtgaccttaatgattggcagcgtcatcggttccgtattgattctggtctacgccctgtggtttatgcagataagcggcgcaacccgcgatggcgtcaaggatacggcgctggcggtggcgcggacgctggccgactccccggaagttaagcggggtctgacgctgccgcctgaacgcggaatcattcagccgctggctctggccgtcagcaaacgcaatggcctgctgtttgccgtcgtgaccgatatggacgggattcgctactcgcatcctgatggccagattatcggcaaaccctttatcggcgatgacatcctgcctacgctgaagggcaaagagaatgtagccgtcaatcacggcgtgctggcccccgcgctgcgggtattcaccccggtctttgacgatagccgccggcaaatcggcgtggtggcgattggtatttcgctgagcaaagtcgatacgcagatcgccgacagccgctgggatgtgctcctcaccgtgctgttcagcgcgctggtttgcgccgtcggtacctggagcctggttcgcggcctgaagcgcgttctgctgggcctcgagccgcaggagatctcaacgcagttccagcaacgccaggcgatgctgcattcattaaaagagggggtggtggcggtagatgccgacggcaaggtgacgctgattaaccccgccgcgcgcgacgttctgtttagcggccctggacgcgatatcgcgcaaacgccgctgctggctgatttgcaggaagttttacataccggcgagccgatctacgatcgggagctcggctgtaatggtctgctgctgatcagtaatacggtgccggtccgcagtcaggatgaggtggtcggcgcgattagtaccttccgcgacaagaccgaagtcagccagctgctgcagcggcttgacgggatggtgaactatgtcgacgccctgcgcaccacctcacatgagtttatgaacaagctgcacgtaattctcggcctgttgaatatgaaaagctacgataagcttgaagagtacgtgctgcagaccgcccacacctatcaggcggatatcggcgaaatccagcatcggatcaaatcgccagtggtggccggctttttgatcggcaaaatacagcgcgccaaggagcgaggttttaccctcacccttgccgaagagagcctggtgccggactgcccgaatgaaaaacaggtcaccgtgctggtcacggtgctgggcaacttaatcgagaacgcgctggatgctatgagcggccaggccgaaggcgaagtcggcctgctgctgcattatcagaacggctggctgagcggcgaagtcagcgatgatggccccggcatcccggcagactttatcgaggatatttttaataaaggcttctccaccaaaggcgaaaatcgcggcgtcgggctgtttctcgccagccagcagcttcgtgaactgggcgggtcgctggccgtagaatccgagcccggtgtgtttacccaattttttgttcacctcccctgggacagtaaaaggaaaagtgcgtga

SEQ ID NO: 174363 - DNA, 720 bp, Klebsiella oxytoca
gtgataaatgtgttaattgttgacgatgatgccatggttgctgaactgaaccgcctgtacgtgggacgagtcagcggcttccgctgtagcggcaccgcgtctacgttgagtaaagccagggagatgattaacgacaaggatctggagatagacctggtgctgctggatgtctatatgcagcaggatagcggcctggatctgctgcccgctatccgcgcctcgggacgggccatcgacgtgattatgatcacctcagccgctgacgccgcgacggttcaggcttctatgcgctacggcgtggtggactatctgatcaaacccttccagtttccgcgttttgaagaggccctgactgcctggcgcgaaaaacgtaagctgatgaccggtcaaccctattacgaacaagcggacgttgaccggctgctgcacggcaatgtgccggatgccgcggatgcccgtaaattgccgaaaggcttaaccccgcagacgctgcgcaccctctgtcagtggattgatgcccacccggacgtagagttttccaccgacgaactggcggcggcggtgaacatatctcgggtctcgtgccgtaaatatctgatttggctggcgcaaattaacattctctataccagcattcattatggcgccaccggacgtccagtgtatcgctatcacctgatagccgagcagtacaatctgcttaagcagtacagtcactaa

SEQ ID NO: 174364 - DNA, 951 bp, Klebsiella oxytoca
atgtccgacaaccgcgtctacagctactccgccgtgctgatgggttcgcccattctcctcaagctctacgttcacgatgaaccgctcgcttcacgcgtttttcagctgattaagggctacgaagatcttttcaccgttaaccgcgcgcactcccaggtgatggatatcaaccaggccgccgggcggcatccggtgacggtaagccgtccggtctacgcgctgatcaaatgcgccaaagccgccagcatggtgcgcgacagcgcgtttaacctggcgattggcccgctggtgaagctgtggcgcatcggctttcagggccgcagcgtgcccgcggcacccgatattgccgcccggctggcgctaacgcgtccgcaggatgtgatcctcgatgatgccgccagtagcgtctaccttgcgcggacggggatggagatcgatctgggggccattgccaaaggctatatcgccgatcgggtgcgcgactatttgcagcagcaaggcataaacgccgcgctgattaatctcggcggcaacgtccacacgctcggtgagtggtctatcgggctgaaaaagccgtactcagcggcggatgcgctgatcggcagcattgcggtggcggggcagtcggtggtgacctcgggcatttacgaacgctatttcgagcaggatggcaaacgctgtcaccatatactcgatccgcgcagcggttatccgctggataatgagctggaaagcgtaaccattatttccgccgactcgctggacggcgatatctggacgaccctgatttatggccttggcgtcgagaaaggctgcgcggccctgcgccagcgtgaggatatcgaagcgattttcgttaccaaaaaccgcgacgttatcctctcttcacagcgccggttccgctttcagctgctggatgacggctaccggcttagtgactgtactgcttaa

SEQ ID NO: 174365 - DNA, 2778 bp, Klebsiella oxytoca
atgaccagttatccacgaattttgcgtccttttactttaccgaacggtaccgagcttaaaaaccgcctgttaatggcgccgatgacaacctgtaccggttattttgacggaaccgtaaccagcgaactggtggagtactatcgcgctcgcgccggcagtatcggcaccatcattgttgaatgctgctttatcgatgattacggcctggcgttcccgggcgctatcggcatcgataacgatgaaaaaatagccggactggcgaaaatcgccgccgctatcaaagcggaaggctcaaaagcgattctgcagatttaccacggcggccggatggtcgatccgcagcttatcggcggacgccagccggtcgcgcccagcgccattgccgcgccgcgcgatggcgctgcgacgccgcgcgcgctgagcggtgatgaagttgaaggcatgatcgcgaagtttggcgacggcgtgcgccgcgccattctggccgggttcgacggcgtagaaattcacggcgcgaatacctatctgatccagcaattttattcgccaaactctaaccagcgcgacgacgagtggggcggcagccgcgacaatcgagcgaaattcccgctggcagtgctggatatcactcataaaatggcccgccagtacgccgacgatgcctttatcatcggctatcgtttctccccggaagagatggaagtcccgggcatccgttttgatgacaccctgtatctgctggaaaagctggccgcccgcggcgtggattatctccacttctccgttggcgcaacgctgcgcccgtcgattgtcgataccaccgatcccacgccgctaattgaaaaatattgcgccatgcgctctgaaaccctggctcaggtgccggtgatgggcgtgggcggggtcgttaacgcagccgatgcggagcaggggctggatcatggctatgatctgatggcggtggggcgtgcctgcattgcttaccctgactgggcggcgcgcattgccgccggcgaagagctggaattgtttattgacagcacccagcgtgaagctctgaacatcccggaaccgctgtggcgcttctcgctggtggaggcaatgatccgcgatatgagcatgggcgacgccaaattcaaaccggggatgttcgtcgaaaccgttcagcacgacgccaacgagctggttatcaacgtcagccttgaaaacgaccgcatcgccgatatcgagctggcggcaagcccggtgcagaccgtcgagttcaccaccagctttgaagagatccgcgaacgtattctcagcgctaataccccgcacgtggatgcgatttccggcgcaaccagccagagcgaagcggtgaaaaaagcggtgtccaaagcgatgctgaagtccagtaaagcgctggccgccgaagagggcgcgggcgaagcggcgccgaaaagctacgatgtggtggtggtcggcagcggcggagccgggctggcggcggcgattcaggcgcacgatgaaggcgcgagcgtgctgatcgttgaaaaaatgccgaccattggcggcaacacgattaaagcttcagccgggatgaacgccgcagagacccgcttccagcgcgtgaaaggtattgaagatagcaaagagctgttttaccaggaaacgctgaaaggcggtaagaacaaaaacgacccgcagctgctgcgccgcttcgtggaaaatgcgccggaagccattgagtggttggcgcgtcgcggcattatgcttaacgatatcaccactaccggcgggatgagcatcgaccgcacccaccgtccgcgcgacgggtcggcggtcggcggctacctgatcagcggcctggtgcgtaatatcactaaacgcgggatcgatgtcctgctggatacgtcggttgaagagatcctgatgaccgacgatgaggtgagcggcgtacgcctgcttaacgatgaacaagaaaccgttgtggtacagacgaagagcattgtcgtggctaccggcggcttcagcgccaacagcgcgatggtggtgaaataccgcccggatctggccggcttcgtgaccaccaaccatagaggggcgacaggcggcggtatcgcgctgcttgaacgcatcggggccgggacggtggatatgggcgaaatccagattcacccgaccgtcgagcagcaaacctcgtatctgatttccgagtcgatccgcggcggcggggcgattctggtgaaccagcagggcaaccgcttcttcaacgaaatggagacccgcgataaggtttccgccgcgattatcgcgctgccggagcacttcgcttatatcatctttgacgagcacgtccgggcgaaaaacaaagccgccgacgagtacattgctaaaggtttcgtcaccagcgccagctcgccgcgccagctggcggagaaactggggatggattaccatgccttcctcgatacgctggaacgctataatggctttgttgaaaaacagcatgacgatgattttggccgcactaccgcgctgcgcgcgccgattaatgaaggcccgtaccatgcgattcgcatcgccccgggggttcaccacacgatgggtggcgtgaccatcaatacggaaaccgcggtattgaacgccggtcaacagccgattgcgggcgcttttgccgcaggtgaagtggttggcggcatccacggcggtaaccgcatcggcggtaacgcagtggccgatatcattatcttcggtaccctcgcgggccatcaggcggcgaaacgcgccagaggttaa

SEQ ID NO: 174366 - DNA, 1506 bp, Klebsiella oxytoca
atgaaagagaaaaagacaaccataccgcctgccggtgcagccccccaggctgcttataaacgtctactgatgatggcgatgcccattatcgttgccgtcctgctgttgttcatcccggtgcccgagggcctgcccccttacgcctggcactactttgccattttcgtcggcgtcatcgtcggtctaatctttgaaccgctgcccggcgcggtcatcggtattaccggcgtggtggtgattgccctgtgcagccagtggctgctgttcagtcctgaacagctcgccgcacccggctttaagcttgccggcgcctcctttaaatgggcggtgagcggtttcggtaactccaccgtgtggctgatcttcggcgcctttatgtttgccgcaggctacgataagacccagtttggccgccgtctggcgctcattctggtgaaatatcttggccgccgtagcctgacgctgggctacgccatcaccttcgccgatctgctactggcgccgttcaccccctccaacaccgcgcgcagcggggggaccatctacccgattatcgctaacctgccgccgctttatggctcaaaacccaatgacccaagcgcgcgccgcatcggctcctacctgatgtgggtggcgatcaccgccgcctgtatcaccagctcgatgtttctctcagctctggcgccgaacctgctggctctggcgctggtgaaaagcattgttggaatcaatatctcctggggcacctggtttatcgctttcctgccgctgggtatcctgctgattctggcaatgccgctgctggcctactggttctatccgccagaagtcaaagtcaacgatgaagtgccgctgtgggccgcccgcgagctggaaaaacttggccgcctgtcgcgcaatgaaatcctgctgctggtcttcgtctgcttcgcgctgatgatgtggatcttcgccgccgagtggattgaaccggcgctggccgccctgctggttatcgtgctgatgctatggaccggcgtactctcatggaacgatatcaccagtaataaagcggcatggaataccttcgcctggtttgcgaccctggtggcgctggccgacggtctctcttccaccggctttatcgcctggctgggtaaagaaggcggcgcgctaatgagcggcatctctccgggcgtggctaccgttatcctcctgctggcgttctatctgctgcactatctgtttgccagtaccaccgcccacaccaccgcgctgctgccggcgatgctgactatcgcctccaccatcccgggtatgaacatgcaggtcttcgtgctgctgatggtgacctcgctcggcgtgatggggattattaccccctacggtaccggccccagcccgatttactacggcagcggctatctgccgaccaaagactactggcgtcttggtacgattttcggcgccatcttcctggctgccctgctgctgattggctatccgtggatgtccatgatgttctga

SEQ ID NO: 174367 - DNA, 1656 bp, Klebsiella oxytoca
atgtcgactaaaccttttgtctatcaggaaacctttccgttagcgcaagataagactgaatactatctgctgagcaaggatcacgtttccgtgaccgagttcgaaggccaggagatcctcaaaatcgatcctcaggccctcactctgctggcgcagcaggccttccacgatgcggcatttatgctgcgggtggatcatcagaaacaggtcgcgcaaatccttctcgaccctgaagccagcgacaacgataaatacgtggcgctgcagtttctgcgcaattctgaaatcgcggcgaaaggcgtgctgcccacctgccaggataccggtacggcgattattatgggcaagaaaggccagcgcgtatggaccggcggcggcgatgaggcggccctcacccgcggcgtctataacacctataccgaagacaacctgcgctattcgcagaacgccgcgctggatatgtataaagaggtcaacaccggcaccaatcttccggcgcagattgatctctatagcgttgacggcgacgaatataaattcctctgtatggccaaaggcggcggctcggccaacaaaacctatctgtatcaggaaaccaaggcgttaatcaccccagcgaagctgaaaaactatctcgtcgagaaaatgcgcacgctcggcacggccgcctgtccaccgtaccatattgcctttgtgattggcggcacctcggcagaggccacgctgaaaaccgttaagctggcctcaacgaagtattacgacggcctgccgaccgaaggcaacgagcacggccaggccttccgcgatattcagctggaaaatgagctgcagctcgcagctcaaaacctcggcctcggtgcgcagttcggcggtaaatatttcgctcacgatattcgcgtcatccgcctgccgcgccacggcgcgtcgtgcccggtaggcatgggcgtctcctgttcagcggatcgcaatatcaaagccaaaatcaaccgccacggtatctggattgagaaactggagagcaatccgggccagtatattcctgaacacctgcgccagcagggtgaaggcagggtcgtcagcattaaccttaatcagccgatgagcgagattctggcccagctttccgcccacccggtttcaacgcgtctgacgctcaacggtaccattattgtggcccgcgatatcgcccacgcgaagctgaaagagctcatcgataacggtgaagaattgccgcagtacgtcaaggatcatccgatttactacgcgggcccggcgaaaactccggaaggctatgcgtcaggctcccttggcccgactaccgctggccgtatggattcctacgttgatctgctgcaatcccacggcgcaagcatggtcatgctggccaaaggcaaccgcagccagcaggtgaccgacgcctgccgcaagcacggcggtttttacctcggcagcatcggcggcccggctgcggtactggcgcagcagagtattaagagcctggagtgcgtggcctggccggaactgggtatggaagccatctggaaaatcgaagtggaaaacttcccggcatttattctggtggatgacaaaggcaacgatttcttccagcagatccagaataagcagtgcgcgggctgttcacagcaaagagggtga

SEQ ID NO: 174368 - DNA, 384 bp, Klebsiella oxytoca
atggatgataaacagcgttatcagcagggaatgacggttcgtcgcaaggtgcttggcgatacgcatgtcgataagacgctgcaaaagctgacgccgctgaatgaagagttccaggacttcattacccgctacgcctggggagaaacctggacccgaccggggctcgatcaccatacccgcagtatgattaccatcgccatgctgattgccctgaatcgcgaggctgagctgaaaatgcatctgcgggcggcgtttaataacggtgttacccgcgatgagttaaaagagttaattatgcactccgcgctttactgcggcctgcccgcagccaacgcgacgatgcatctggcgcagcaggtgtttgatgagatgaatgctgtttag

SEQ ID NO: 174369 - DNA, 768 bp, Klebsiella oxytoca
ttgaatgttgattatcagattgacgggccgcaagacgcgccggtcatcgttctctctaactcgctgggcaccacccgggcgatgtggcagccgcagatcgaggcgttgacgcagcattttcgcgtgctgcgctacgatacccacggtcatggcgccacgcgtaaaaatggtaaagtgacgctggcgcagctcggcgaagatgtggttgcgctgctcgatcatcttaatattgccaaagcctggttttgcggaatttccatgggcggtctgaccggtctgtggctgggacgctttgctccggaacgtttttacgggctggtcgtcgccaacaccgccgcgcgtattggtgaccaggcaagctggctgtcgcgcgcccgcgcggtgcgtcaggaaggtatggaagtggtggccgcaggcgcggcggatcgctggtttacccacgcgtttcgtcagaagacgccggaagtggtggcagcgctctgtcaccagttgacccatatcgatgcggaaggctatgcggtctgctgtgaagcgctggccgccgccgatctgcgcgctgaggtcgggcagattgccgttccggtgctgatcgttgccggtgaaagtgaccctgtcactacagtggccgatgcgaactttctgcatcagcagatcgcgacctctgaggtagtggtgctggcggcatcgcatttatcgaatatcgaagcgccgcgggcgttcagctcggcgctgctgggctttattgagggggaacaacagcatggatga

SEQ ID NO: 174370 - DNA, 1353 bp, Klebsiella oxytoca
atgagtttgttgaccccgatgctgcgtaccagcccgctgacagactggttcagcgatgtacagcgggtgcaggggatgctggactttgaggccgctctggttcgcgccgaggtcgaatgcggcctcgtgccgcagacggcgctcaatcccatcatcgagagctgccggcacgaaaaaatcgacttttccgcgctggggcaggccgccgccagcgccgggaatctggcgatcccgctggtcaaacagctgaccgctcgggtcaaagagcggaatgaggcggcagcgcgctacgtacactggggggccaccagccaggatgctatcgataccggttttattctacagctgcgcggcgcgctggcggaaacggagtctctgttacagcgtctgctcgacgcattagcccgtcaggcggagcgccatcaggatacggtgatgcctggccgtacctggatgcagcatgcgctgccggtcactttcggcctgaagcttgccgggacgctggatgcgctgctgcgctggcaggtgcgtctgcgagagatgcgggcaagggtgctggcgctgcagtttggcggcgcagcgggcaccctggattccctaaaaacgcaggcgccgccgatcgccgccgcgctggcgaaagcgctcgacctgcagcttccggacgcgccctggcacagccagcgcgaccggctgctggaagtcggggcatggtacgcaggcgtctgcggtacgctgggtaaattcgcgaatgatttttctctactgatgcaaaccgaagtggcagaggtgggtgaaccggttgccgaagggcgcggcggttcgtcaaccatgccgcacaaacgtaacccgatctcctgcgccgctattttgaccgccgctcagcgaacgccgggcctggtggcgacgctgtatgctggccagatccagcagcatgagcgggcgttgggcggctggcaggcggaatgggaaacgctgccggagctcatcaccctcgtcggcggcgcgctgacgcagagcgaggcgctggtcagcgacatgcaggtcttcgcgcacaagatgcgcgccgaccttgagatgacccacggcctgattatggctgaggctgttaccctggcgctggcggaatttatcggtaaagccgaggcccatcaccgggttgaagcgctgtgtcgtcaggcgctggatacgtctcgctcattgctgagcgtgctggaaaacgatccgctggtcagcgagcatctttccgccagccgcttaacccaactgctggacccggcaacggcgaccggcagctcagcactcttcgtgcgccaggttgtggcacgatataaggagcaacgtcttgaatgttga

SEQ ID NO: 174371 - DNA, 1203 bp, Klebsiella oxytoca
atgaatcaggcatttatctgtgatgcggtgcgtacgccgtttggtcgctttggcggtactcttgccaccgtacgcgccgacgatctggcggcactgccgctcaaggcgctgctggagcgcaacccgggcctcgatccggcgcgcattgatgatgtgatttatggctgcgctaaccaggcgggtgaagataaccgcaacgtcgcgcggatggcgctgctgctggctggcttgccggaaagcgtgccgggcagtaccgtcaatcgcctgtgcggttccagcctcgatgcgatcggcatcgcagcgcgcgcgattaaaagcggcgaaactcagctgatggtcgccggcggcgtggagagcatgtcgcgggcgccgtttgtgatgggcaaggccgaaagcgcctttagccgcacgatgcagatggaagataccaccatcggctggcgctttatcaacccgcagatgaaagcgctgtacggcgtggattcgatgccggaaacggcggaaaacgtggccggtgatttcgccatttctcgtgccgatcaggatgcgtttgcgctgcgcagccagctgcgcacggcggcggcgcaggaagcggggcgatttgccgacgagctgatcgccgtctcggtgccgcagcgtaagggtgaaccgctactctttagccgcgacgagcacccgcgcagcaccacggcggaggcgctggccaggctgcgcggcgtggtgcgcgccgacggtacggtgacggcaggcaacgcctccggagttaacgacggcgcctgtgcgctgctgttagccaacgagcaagcgctgaccgccaatgatttacagccgctggcgcgcgtagtgggcgtcgcgacggcaggcgttgcgccgcgaattatgggatttggtccggcgccggcggtgcgtaaagtgctggcgcaaaccgggttaacgcttgggcagatggacgtcattgaactgaatgaagcctttgccgctcaggcgctggcggtcacgcgcgatctgggtttgcccgacgatgcggcgcacgtcaatcctaacggcggcgcgattgccctcggtcatccgctgggcgcctccggcggtcgtctggcaatgaccgcagcgtatcaactgcgtcgtaccggcgggcgctatgcgctatgcactatgtgtatcggcgttggtcaggggatcgcgctgataattgaacgcgtttaa

SEQ ID NO: 174372 - DNA, 657 bp, Klebsiella oxytoca
atgcaaaaactgactcgcgatgagatggcccagcgcgtggctcgcgatatacctgaaggcgcttatgtcaatctggggatcggcttgcctacccgcattgctaactatcttcccgcagataaagaaatctttctgcacagcgaaaatggcctgctggggatggggccgaaaccgctgctgggggaagaggacccggagctgattaacgccggaaaagagtatgtgactttgcttgaagggggctgctatttccatcacggcgactccttcgccatgatgcgcggcggtcatctcgatatctgcgtactcggcgcttaccaggtctccgccagcggcgatctggcgaactggagtaccggcgcgcccgacgcgatacctgccgttggcggggcgatggatctggccattggcgctcgtcaggtcttcgtgatgatggatcatctgacccgcgacggtgaatgcaagctggtagagcactgcacctatccgctgaccggcgtcggctgcgtaagccgcatctataccgatctggcggtcatcgatatcagcgaaagcggcccggtggtacgggaaatctttaacggcctctcttttgaggaactgcagcgcatcactccggtgacgctgacttttgcacaactggcggaaagcgcgtaa

SEQ ID NO: 174373 - DNA, 687 bp, Klebsiella oxytoca
atgattgataaaagcgtgtcgacgctaagtgatgccatcgccgggatccacgacggggcgacgattatgattggcggttttggccccgccggccagccaacgtacctgatagatgccttgatagaacagggggcccgcgatttaaccattatcaacaacaatgcgggcaatggcgaagtgggactggcggcgctgctgaaagccgggcgggtgcgcaaaatgatctgctcgttccctcggcaggttgactcgcagattttcgatgacctctatcgccgcggcaaagtcgagctggagctggttccgcaggggaacctcgcggcgcgtattcaggcggcaggggcgggcctcggcgcggttttcactccaaccggctacggtacgccgctggcggaagggaaagagactcgcgagatcgacgggcgtcactatgtgctcgaatatcctatcaaggccgactttgcgttgatcaaagcccatcaaggcgatcgctggggaaacctggtataccgcaaggcggcgcgcaacttcggcccgattatggcgaccgccgcgaaaaccactatcgtggaagtctcgcagctggtgcccctcggtagccttgacccggagagcatcattaccccgggcatttttgttcagcgcgtcttctccctggaaaacctgattgccgctaaaagcgcctga

SEQ ID NO: 174374 - DNA, 807 bp, Klebsiella oxytoca
atggagaaacatccagacgatttattgaccggcgatagcgagccgtttaagggcgatcccaacttcatggcctcgctggcgcgcgggctggaagtgatccaggcgttcactccgcagcgcccgctgctctctatttcgcaaatcagtcaaaaaaccggcattccgcgcgcggcggtacgtcgctgtctgtatacgctgagcaagctggggtttgtgtacgccgaagatggtaaaaatttccagctgcggccgaaaattctggcgctgggccacgcctggctggcctccacgccgctggcgcgctcggcgcagccggtactcaagcatttaagcgaaatgctcaatgaatcctgctctatcgccaccctcgacggcgacgatattctttatatcgcccgcgcctccagctcgcgaattatgaccatcgacctggacatcggcagccgcctgccggcatgggcaacgtcaatggggcgcgtgctcctgagctatcagccggaagagaagctgaacgatatgctgggtcgggttacgatgattcgctacaccccgcaaaccgttgattcggtcgccaggctgcgcgctgagctcaaacgcgtacgtcagcagggttatgcgctcaacgatcaggagctggagatggggctgcgctcgctggcggtaccgctgtttaatccccagggccagattcaggcggcgctgaacgtcggggtgcacgccggacaggtttccgcccaggagatgctcgaacgcgtattacccgagctccagaaggcagcccgggaattaacgctgctgatgcgctag

SEQ ID NO: 174375 - DNA, 564 bp, Klebsiella oxytoca
atgaaccttgacgacaaatccctttttcttggtgccatggaggacgttcagcctctgaaacgcaacaacgacgttcactggcatcccgaacggaaaacccgcgccgtacagcgggttgacaccctgcagctggataactttttgaccaccggttatctcgatatcgtgccgctggccaccgcgctggagtttaaacgcgaagggctgcaaagcggcgtgctggagaagctccggcgcggcaaatatggccagcaggcgagccttaatctgctgcgtcagccggtggaaaagtgccgacagatgttatttgcttttgtggttcaggcgcaaaaagaggggctgcggaatctgctgatcgttcatggcaaagggcgcgacgacaacgcgcacgccaatattatccgtagctacctggcgcgctggctgggggagctaccggaagtccaggcgttctgcgcggcgctaccgcaccacggcggcagcggcgcctgctacgtggctctacgaaaatcgcccgaggctaagctggagaaccgggagcgccacgccaagcgcagccgctag

SEQ ID NO: 174376 - DNA, 909 bp, Klebsiella oxytoca
atgtcatttcagattaaatttcatcagattcgcgcctttgttgaggtcgcgcgtgaaggcagtattcgcggcgccagtcgggcgttggcgatttcgcagccggcgttaactaaagcgattaaagagctggaagaagggctctccgcacagctgtttgtgcgccgtagccagggggtggcgctgactgaaaacggcgaaagcttttatcaacatgcgagcctgattctggaagagctacgggcggcgcaggatgagttgctgcagcgccagggagaaaaggccgggcagattaatatcggccttggcgccagcgtagcgcgatcgctgatgccttcggtcatttgccgttttcatcagcagcatccgctggtgaaggtgcggattatggaaggtcagctgctggcgatgattaatgaactgcggcagggtgagctggacttcactatcaatacttactatcccggtccgtacgatcatgaattcagttttgagaagctatttgagaaaccctttgcggtattcgcccgcgccggtcacccggcggcaaaagcgacttcactcaaggcgttgctcgaacatcactggacgatgccgacgccgcgtggcagctatttcaaacagttacaggaaatgtttaaccaggccggactggcgccgaaagtggatatcgtttgcgagaccttctcttcgtgcatcagtctggtggtgaaaagcgattttctcagcattctgccggtagaactagggaacgacccgatgatggcggataagctggtgatgatccccatctgcgaagcattacccaaagccacctactatctgattcagcgccgcgatatgcggcaaacgcctttgacggcatcattaatcaccctgtttcgtcgccaaagccgtcaactgtttccctga

SEQ ID NO: 174377 - DNA, 1311 bp, Klebsiella oxytoca
atgccgcaacttaatgaattcatccgccagctggcgccaaaaatgatcgaatggcgtcgcgattttcacctgcatgcggaatccggctggctggagttccgcaccgccagcaaggtggcggagatattagacgctctgggttatcagctggcgctggggcgcgacgttatcgatgccgatagccgtatgggtctgcctgatgaagagacgctggcgcaggcgttccagcgcgctcgcgcccagggtgcgccggagcgctggctaccagcgtttgaaggcggcttcgccggggtggtagcgacgctcgacaccgggcggcccgggccgactttggcgtttcgcgtcgatatggatgcgctcgatctcaacgagcagcacgacgataatcatcgtccgcatcgcgatcgttttgcctcctgcaacgaaggcatgatgcatgcctgcggccacgacggtcataccgcaatcggcctggggctggcgcacgtgctcaaggaatatgccgcgcagctcaacgggacgattaagctgattttccagccggcagaagaaggtacccgcggcgctcgcgccatggtggcggcgggcgtacttgatgacgtggactacttcaccgccattcatatcggtaccggcgtccctgccggcaccgtcgtttgcggcggcgataactttatggccaccaccaaattcgatgtgcagttcagcggcgtcgccgcccacgctggcggtaaacctgaagatggacgtaatgcgctgctggctgcggctcaagccgcccttgccctgcatgccatcgcgccacatagcgccggggcatcaagggttaacgtcggcgtcatgcaggccggtaccgggcgtaacgtagttccctcctccgcgctattaaaagtcgaaacccggggcgaaaccgacgctattaaccagtacgtatttgagcgggctaagcaggctatcgccggcgcggcgacgatgtatgcagccagctaccagttgcacctgatgggcgcggccacctccagcgccccgtcgccggcgtgggtggactatctgcgtcaacagacagcgcaggtccccggcgttaagcaggccgtcgatcgtatcgctgccccggcgggttccgaagatgccaccctgatgatggcccgggtccaggagcgcggcggtctcgcctcatacatgatattcggcacggaactgagcgctggccaccacaacgaaaaatttgatttcgacgaaagcgtaatgacccaggccgtcgccacgttagcgcgcatcgccctgaactttccctggcagcgaggtgtgtaa

SEQ ID NO: 174378 - DNA, 1446 bp, Klebsiella oxytoca
atggaacaggtttatcaatttgtcgatgacattattgaggggcggcgcaacgatttttgcgccattgccgatgatatctgggatcatccggaaacccgctttcaggagttctggtccgccgcgcgtttggccgatgcgctggaagcggaaggttttcaattgacccgcaatgcgggcgggatccccaacgcctttatcgccagctttggtgaaggccaaccggtaattgccctgctcggcgaatttgacgccctggcggggctcagccagcaggcttactgcgcagcgcccgcatcttcaacgccgggggaaaacggccacgggtgcgggcataacctgcttggtacggcggctttcgccgcggcggtcgccgccaggaactggctgctgcaacaaggcggcgtcggcacgcttcgtttctacggatgtcccggcgaggaaggcggttccgggaagacctttatggtccgcgaggggttattcgatgacatcgacgccgccctgacctggcacccggaagcctgggccgggatgttcagcaccagtacccttgccaacattcaggcggcatggcggtttaccggcaccgcggcgcacgcggcaaactctccgcatcttggccgcagcgcgctggatgccgtgacgctgatgaccaccggcagcaacttccttaacgagcatattatcgaaaaggcgcgggtgcactacgccatcaccgataccggcggcgtctctcctaacgttgttcaggcgcaggcggaagtgctgtatctcattcgcgccccggaaatggccgacgcacagcaaatcttcgcccggatcgaaaaaatcgcccagggcgccgcgctgatgaccgagaccagcgtcagctgtcgcttcgaaaaagcctgttccagctatctccccaaccgcaccctggaagcggcgatgtatcaggcggtatgccattacggcacgccgcactggagcgaggaagagcgcgctttcgccgccgaaattcgcgcgaccttaagcgctaacgatattcataacagcctgaaaaacattgccgataccagcggagacgaggggaaagcattcgcccgccgccaccgcgagacgatccttatcgatgaagtggcgccgtgggcggctaccgataacatccttgcgggctctaccgacgtcggcgacgtaagctggaaagctcccgtagcccaatgcttcagcccctgctttgccgtcgggacgccgctgcatacctggcaactggtgagccagggcagaacctccatcgctcacaaaggaatgcttctggcggggaaaatactggctgcaacggccattcgtttgttcagcgacaggtcgctactgactaccagtcagcaggaactggcacaggttttagccgaaaggccctaccggtgtccgatcccgcaggacgtcaagccttcgattttaaaataa

SEQ ID NO: 174379 - DNA, 1527 bp, Klebsiella oxytoca
atgagtatgtcatccataccgtcgccttcccccaccggtaagctctatggctgggttgaaaaaattggtaataaggtcccgcatccgtttttactgtttatctatctgatcgtggtattaatggccgccaccgccatcctgtcggcgctgaacgtcagcgtccagaaccccaccgacggctcgcgagtggtggtgaaaaatctgctcagcattgaaggattacattggtttttgccgaacgtgattaaaaacttcagcggtttcgcgccgctgggagccattctggctctggttctgggggctggatttgctgaacgagtgggcctgctgccttcgctgatggcaaaaatgtcatcacacgttagcgcccgttacgccagctatatggtgctgtttatcgccttctttagccatatctcttccgatgccgcgctggtgattatgccgccgttaggcgccctgatgttcctcgccgtcggccgccacccggttgccgggctgctggcggcaatcgccggggtcggctgcggcttcacggccaacctcctcatcgtcaccaccgatgtcctgctctcaggaatcagtaccgaagcggccaaaacccttgacgcctcgctgcacgtcagcgtgatcgataactggtactttatggcaacttcggtgatcgttctcactctggtcggtgggttgattaccgataagctggtcgagccgcgcttaggtcaatggcaaggcaaaagcgatgaaacgctgcaatcgttaacgccagaacagcgcttcggcctgcgcgtggccggtattgccgcgctgttattcatggcggttatcgcgctgatggtcgtgccggaaaacggtattttgcgtgaccccattaagcataccgtgatgccttcgccatttataaaagggatcgtcccgctcatcatctttttcttcttcgtcgtctcactggcttacggcattgccaccggcaaaattcgccgccaggccgatctgcctccgctgatgattgaacccatgaaagagatggcaggttttatcgtgatggtcttcccgttggcccagttcgtcgccatgtttaactggagcaatatgggaaaatttatggccgtcggtttaacggacctgctggagagcgcgggaatgagcggcgtgccggcgttcgtcggcctggcgctgctatccgcctttttgtgtatgttcatcgccagcggttcggcaatctggtcgattctggcgccgattttcgtgccgatgtttatgctgctgggctttcatccggcattcgcgcaaattctgtttcgtattgccgactcatcggtgctgccgctggcgccggtatcgccgtttgtgccgctatttctcggcttcttacagcgctaccggcccgaggctaaactgggaacctactactcgctggtcttgccttatccactcattttccttgtcgtctggctactgttgctggtggtctggtatctcgcgggactccctatcggaccgggtatttatccgcggttgccttaa

SEQ ID NO: 174380 - DNA, 516 bp, Klebsiella oxytoca
atgctgacgctgctacaagataaaattgacaccccgctggggccgctctgggtgatttgcgatgagcagttcaacctgcgggccgttgagtgggatcagcatcgcgagcgcatggagcaactgctggatgttcattatcggcatgaaggttaccaacgcgttgattcccgcaatcccggtaacctgagcagtaagctcagtgattatttcgcgggcgatctcgccattattgatacgcttcctaccgccaccgcaggcaccccttttcaacgggaagtctggaaaacgctgcgcactatcccctgcggtcaggtcatgcattacggtcaactggcggaggcgctgggccgaccgggcgcagcgcgcgccgtgggcgctgctaatggttcaaatccggtcagcatagtggtgccctgccatcgggtgatcggacgcaacggaaccatgaccggctatgccggcggcgtacagagaaaagagtggttattgcgccatgaggggtatctgcttctttga

SEQ ID NO: 174381 - DNA, 753 bp, Klebsiella oxytoca
atgatcccggaaaagcgaattatacgacgcattcagtctggcggttgtgcaatccattgccaggattgcagcattagccagctttgcatcccttttactctgaacgagcatgagcttgatcagcttgataacattatcgagcggaaaaagcctatccagaaaggacagaccttgttcaaagccggtgatgagctgaaatcgctgtatgcaattcgttctggcaccattaaaagctacaccattaccgaacagggtgatgagcagatcaccggtttccatctggcgggcgatctggtcggctttgacgctatcggcaccggccaccacccgagctttgcccaagcgctggaaacctcaatggtctgcgaaattccgttcgaaacgctcgacgacctttccggcaagatgccgaatctgcgtcagcagatgatgcgtctgatgagcggtgagatcaaaggcgatcaggatatgatcctgctgctttctaaaaagaacgcagaagagcgcctggcggccttcatctacaacctgtcccgccgttttgcacagcgtggtttctccccgcgtgagttccgcctcaccatgacgcgcggcgatatcggcaactatctgggcctgacggttgaaaccatcagccgcctgctgggtcgtttccagaaaagcggtatgctggcggttaaaggaaaatacatcaccatcgaaaacagcgacctgctggcgcagcttgctggtcaggcccgcaacgtcgcctga

SEQ ID NO: 174382 - DNA, 951 bp, Klebsiella oxytoca
atggcgaagtatcagaacatgctggtagtaatcgaccccaatcaggacgaccagcctgcattgcggcgtgcggtgtatctgcaccaacggattggtggacgcatcaaagcctttttgccgatctatgatttttcctatgaaatgaccaccctgctctccccggacgagcgtaccgctatgcgccagggcgtaatcgggcagcgtaccgcctggattcgcgagcaggccaaattttatattgagtccggcgtacccattgacatcaaagtggtgtggcataaccgccccttcgaagccattattcaggaaatcataagcgagaagcatgatttggttctgaagatggcgcaccagcacgacaagctggaagcggtgattttcacgcctacggactggcatctgctgcgcaaatgtccgtgcccggtctggatggttaaagatcagccgtggccggaaggcggcaaagcgctggtggcggttaatctcgccagtgaagagaactaccacaacgcgctcaatgaaaagctggtaagagaaaccattgagctggcggaacaggttaaccatactgaggtccatctggtgggcgcctatccggttacgcctatcaatattgccattgagctaccggattttgaccccagcgtctacaacgacgccatacgcggccagcacctgttggccatgaaagcgctgcggcagaaattcggcatcgatgaaaaccgtactcatgttgaaaaagggttacctgaagaggtcattccagacctgtcggagcatctccaggcggggatcgtggtgctgggtacgattggccgtaccgggctttcagcggccttcctcggcaataccgctgaacaggtaatcgaccacctgcgctgcgatctactggcgctgaaaccggatcagtatcagacgccggttgagcttgatgacgaagaagacgattaa

SEQ ID NO: 174383 - DNA, 189 bp, Klebsiella oxytoca
atggataccgagttaacccccacgcaactggctattgaatttctgcgtcgtgaccccgctgcactaacccccgcgcagtatctgaaaaagctgaaactactggaacttgagtttgctgatttgatggcgctctcatccatggagcttaaagaagagatcgatcacgcctggcgtttaggtatccactaa

SEQ ID NO: 174384 - DNA, 1389 bp, Klebsiella oxytoca
atgtctggtggattagttacagctgcatacattgttgccgcgattctgtttatttttagcctggcggggctttccaaacacgaaacctcccagcagggcaactactacggtattgccgggatggcgattgcgctggtggcgaccattctggggccggacagcagcaacgtcgcgtggatcctgctggcgatggtcatcggcggcgctatcggtattcgtctggcgaagaaagtcgaaatgaccgagatgccggagctggtggcgattctgcacagcttcgttggcctggcggcggtgctggttggctttaacagctatctgcagcacgaaaccggtatggaacagattctggtcaatattcatctgaccgaagtgttcctcggcatcttcatcggtgcggtcacctttacgggttccgtggttgcctttggcaagctgtgcggcaagatgtcctctaagccgctgatgctgccgaaccgccacaagctgaacctggcggcgttggtcgtatccttcctgctgctgatcgtcttcgtgcgtaccgacagcattggcatgcaggtgctgtgcctgctggtgatgaccgtcatcgcgctggcctttggctggcaccttgtggcctccatcggcggcgcggatatgccggtggtggtgtcaatgctgaactcctactccggttgggcggcggcggcggcgggctttatgctcagcaacgacctgctgattgtcaccggtgcgctggtgggttcttccggtgcgattctgtcttatatcatgtgtaaggcgatgaaccgttcgttcttcagcgttattgccggtggttttggttctgacggtacggcgtccacaggagatgaagaagtgggcgagcatcgcgaaatcagcgctgaagaaaccgctgagatgctgaaaagttcccagtcggtcattatcactccgggctacggcatggcggttgcgcaggcccagtatccggtagcggaaatcaccgaacgactgcgcgcgcgcggaatcaaagtccggtttggtattcatccggtcgccggacgtctgccgggccatatgaacgtcctgctggcggaagcgaaagtcccgtatgacatcgtgctggaaatggacgagatcaacgatgatttctccgacactgacaccgtgctggttatcggcgctaacgataccgttaacccggcggcgcaggacgatccgggcagcccaatcgccggtatgccggtactggaagtgtggaaagcgcagaacgtgattgtattcaagcgttcaatgaacaccggctatgctggcgtacagaacccgctgttcttcaaagagaacacccacatgctgtttggcgatgccaaagccagcgttgatgcgattctgaaagcgctgtag

SEQ ID NO: 174385 - DNA, 1530 bp, Klebsiella oxytoca
atgcgtattggtgtaccaagagagagactcgccctggaaacccgggccgccgcaacgccgaaaacggtggagcagctgctgaaactcgggttcagcgtcgcggtagaaagcggcgccggtaaactggccagtttcgacgacgaagccttcgttcaggctggagcggagatcgtgagcggtaatgacgtgtggcagtctgacgtcattctgaaagttaacgcccctgatgacgatgaaattctgctgctgaatccgggcacgacgctgatcagcttcatctggcccgcgcaaaatccgcagctgatggaaaaactggcggcgcggaatattaacgtgatggcgatggattcggtgccgcgtatttcgcgcgcgcagtcgctggatgcgttaagttcgatggccaacatcgccggctaccgcgcgattgttgaggccgcccatgagtttggtcgcttctttaccgggcagattaccgcagcaggtaaggttcctcctgcgaaggtaatggtcatcggcgcaggggttgccgggctcgcggccatcggcgcggcgaacagcctgggcgcgattgtccgcgcgttcgatacccgcccggaagtcaaagagcaggtgcagagtatgggcgccgagttccttgagctggattttaaagaggaggcgggcagcggcgacggttatgccaaagtcatgtccgaagcctttatcaaagccgagatggcgctctttgccgcgcaggccaaagatgttgatattattgtcaccaccgccctgattccgggcaaaccggcgccgaagctgatcacccgcgaaatggttgactccatgaaaccgggcagcgtagtggtggatctggcatcacaaaacggcggcaactgcgaatacaccgtaccgggcgaagtggtcaccaccgctaacggcgtgaagatcatcggttataccgatctgccgggacgtctgccgacgcagtcgtcgcagctgtacggcactaacctggttaacctgcttaaactgctgtgtaaagagaaagacggcaatgtcgttatcgattttgatgatgtcgttatccgcggcgttaccgtggttcgcgagggtgaaatcacctggcccgctccgcccattcaggtttctgctcagccgcaggcggcagcgaaaaaggttgaagcgccaaaaacagaggagaaaccgagctcgccgctgcgcaagtatgcgctgatggcgctggcgattattctgttcggctggctggcaagcgtcgcgccgaaagagtttctcggccactttaccgtcttcgcgctctcctgcgtggtcggttattacgtagtctggaacgtctcccatgcgctgcatacgccgctgatgtcggtcaccaacgccatctccggcattatcgtcgtcggggcattattgcagataggccacggcggctgggtcagctttctgagctttatcgcggtgctgatcgccagcattaatatttttggtggtttcaccgtcactcagcgcatgctgaaaatgttccgcaaaggataa

SEQ ID NO: 174386 - DNA, 951 bp, Klebsiella oxytoca
atgaagcttaagaactcactcctggcgtctgctcttctggctacaaccgcgttgtctgcccacgcagcgaccgagctgaccccggagcaggcggcggcgctgaagccctacgatcgcgtagtggtcaccggtcgttttaacgccattggcgacgccgtgcaggcagtttcccgtaaagcggacaaagaaggcgcagcttccttttatgttgtcgacacgtctgattttggcagcggcggcaacctgcgcgtaacggccgatttttataaagaaaacgccccgcaggccgacgcgcctaaaaatcgcattatcaacggcgtgatggaattaccgaaagaccaggccgttgagctggaaccgttcgataccgttaccgtgcaaggtttctaccgcagccagccggaagtcaacgacgccatcactaaagcggctaaggccaagggcgccgcctctttctttatcgtgcgccaggttgatgccaaccagggcggcaaccagcgtatcaccgcttatatctacaaagcggatgccaaaaagcgcgttctgcaaagcccggatgcgatcccggccgattcagaagccggacgcgccgcgctggcagaaggcggagaagcggctaagaaagtggaaattccgggcgttgcgacgaccgcagcggtcggttccggcactggcgtaggccgtttctttgaaacgcaatcctctaaaggtggacgttacaccgtcacgctcccggacggcaccaaagttgaggaagtgaacaaaattaccgccgcgcagatggttccttatgacagcatcaagttcaccggtaatttcggtaacatgacggaaatctcctaccagacggctaagcgcgccgcgaagaaaggcgcgaagtactatcacatcacacgccagtggcaggagcgcggtggcaacatcactatcagcgccgacctgtataaataa

SEQ ID NO: 174387 - DNA, 1383 bp, Klebsiella oxytoca
atggaaaagaaactgggccttagcgccctgaccgcgctggtactcagctcgatgctgggcgcgggtgtattcagtctgccgcaaaacatggcggccgtcgccagtccttccgcgctgctgattggctggggcattaccggcgtggggatcctgttcctcgccttcgctatgctgctgcttacccgcatccgccccgacctcgatggcggcatatttacctacgcccgcgaaggcttcggtgaactgattggtttctgctccgcctggggctactggctgtgcgcggttatcgcgaatgtttcctatctggttatcgtgttctcggcgctaagcttttttaccgatactcccgagcagcgcctgttcggcgatggcaacacctggcaagctatcgtcggcgcatccgcgctgctatggattgtccatttcctggtgctgcgcggcgtccaaacggcggcgggtatcaatctcgccgcgacgcttgccaagctgctaccgctcggcgcatttgtcgcgctggccgcctttgcgtttcgcatggagaccttccggattgattttagcggtctggcgctgggcgtaccggtatgggagcaggtgaaaaacaccatgctgatcaccctgtgggtattcatcggcgtggaaggcgcggtcgtggtttccgctcgcgcgcgtaataaacgggatgtcggacgcgcaacgctgttggcggtactctccgcgctggcggtctacctgctggtgacgcttctctctttaggcgtcgtaccgcggagcgagctggcggaaatacgcaatccgtcaatggccgggctgatggtgcaaatgatgggcccgtggggcgagatcgtgatcgctgccgggctgattatctccgtctgcggcgcttacctgagctggacgataatggcggcggaagtcccctatctggctgcaacccataaagcctttccgcgtctattcgcgcgcaccaacaaaaataatgcgccgtcgtcttcgctgtggctcaccaatattagcgtgcaggcttcactggtattgatttggctgaccggctcggattacaacacgctgctgacgatcgcctccgagatgattctggtcccttattttctggtcggcgcatttctgctgaagattgcccggcgcccgctgcacaaggcggtaggcgtcggagcctgcatttatggcttatggttattatatgcgtccggccctgtgcatttattgttgtcagtgatactttacgctccgggtcttctggtgttcctgtatgcccgtcgtacacaccagcacgatcgcccgcttaaacgccgtgacctggcattaattggttttttgctggttgccgccgtaccggcaacgtggatgttggtagggtaa

SEQ ID NO: 174388 - DNA, 726 bp, Klebsiella oxytoca
atggctgacatccagcctcgcccgatcctgattaccggtggaggccgtcgcatcggtctcgccctggctcgccattttctggcccggcagcagcccgttatgatcagctaccgcacatggtatccggccatcgacgaactgcgtaatgcgggtgccgtttgtctgcacgcggatttcagcactgacgacagcattctggcgttcgccgaagaagtaaaagcgcaggccgccgccggcctgcgcgccgtcattcataacgccagcggctggatggctgaaaaaccggggatcccgttaaccacggtgctcgccagcatgatgcaaattcacgtcaacgccccttacctgctcaaccatgcgctggagagcctgctacgcggtcacggacaggccgccagcgatattattcacattaccgactacgtcgtggagcgcggcagcgacaagcatattgcctatgcggccagcaaggcggcaatggataatatgagccgctcgttcgctcgtaagctggcgccggaaatcaaagttaatgccatcgccccatcgctgattttatttaatgaaggcgatgatgcggagtaccgcaaacaggccctcgacaaatcgctgatgaaaatcgcgccgggtgaaaaagagatcgttgatctgatcgagtatctcttcggcagtcactacgttaccgggcgctcgtttgccgtcgacggcggacgacatctgcgctag

SEQ ID NO: 174389 - DNA, 336 bp, Klebsiella oxytoca
atggggctgttgataaaagcgctgctcggcgcgctggtcgtcgtgttgatcggcgtactttctaaaacgaagaattactatatcgccggcttgattccgctctttcccactttcgccctgattgcgcactatatcgttgccagcgagcgggggatcgaggcgctgcgaaccaccatcgtattcggaatgtggtcgatcattccgtactttatctatttgctttcgctatggtatttcaccggcatcatgcgcctgccgtttgctctggcaggcgcggtggtgtgctggagcctgtgcgcgtggctgttgattatcggctggagccgttttcactag

SEQ ID NO: 174390 - DNA, 348 bp, Klebsiella oxytoca
atggagtggaatattgaaaatagtcttgtatgtcctttaactggaacaggattttcagttgcggccagtgccagaaatctgaaattaattatatggtataatggagattattttttgaacatcggttcggttattaacatcacgcaagatgacgtcttcataaacggtgagcccggcgacttacaggttattcatgcttttccctatagcgaaaagctatggtcaacgctgacaaagtttatccagtgccccggcaatcaaaatccaacgctgctaatttgcaaccgaagaagcatctgcaaattcgtcctctgcccctacggcgccaggcaaaagagcatggaataa

SEQ ID NO: 174391 - DNA, 720 bp, Klebsiella oxytoca
atgaataaaattgttttcgttgaggatgatgccgaagtaggcgcgctgattgcggcctatctcgggaaacatgatatggacgtcgtggttgagcctcgcggtgaccgtgccgaagaggttatcgcgcgcgaaaagcccgatctggtgctgctggatatcatgctgcccggtaaagatgggatgacgttgtgccgggatttacgcggccagtggcaagggcccatcgtgctgcttacgtcactggatagcgatatgaaccatatcctgtcgctcgaaatgggcgccagcgattatattctgaaaacaacgccacccgcagtgctgttagcccgactgcgtctgcatttgcgccagcatgtccccccccaggacagtagcggcgtcccctcctcgctgacgccgcataaagcgatcgcttttggttcgctgagtatcgatccggtcaatcgtcaggttatgctcagcggggaaaacgtcgcgttgtccaccgcggatttcgatctgttatgggagctggcgacccacgcaggacaaattatggatcgggatgcgctattaaaaaacctgcgcggcgtaagctacgatggtatggaccgcagcgtcgacgtcgccatttcgcgtttgcgcaaaaagcttctcgacaacgcgactgagccttatcgcatcaaaacggtacgcaataaaggctatttattcgccccgcacgcgtgggacaattaa

SEQ ID NO: 174392 - DNA, 1302 bp, Klebsiella oxytoca
atgaaaaagctgtttgtgcagttttacctcctgctgttcgtctgttttctggtaatgacgatgatggtcggcctggtgtacaaatttaccgccgagcgagcaggccgccagtcgctggatgatttgatgaagagctcgctgtatctgatgcgcagcgagctgcgcgagatcccgccgcgcgactggagcaaaacgctcaaagagctggaccttaatctttcattcgatctgcatatcgagcctatcagcaaattcaagctctcggaaaactcgatgcagcatctgcgcgctggcgatatcgtagccctggacgatcagtacacctttattcagcgtatccctcgtagccactacgtgctctccgtcggcccggtaccgtatctctattttttgcatgagatgcgcctgctggatctggctctgatggccttcattgctatttcgctggcctttcccgtattcatctggatgcgcccccactggcaggatatgctgcgtatcgaaaccgccgctcagcgcttcggcgacgggcatcttagcgagcggatccacttcgatagcatgtccagcttcgaacggctgggcgtggcgtttaatcagatggccgataatatcaacgcgcttatcgccagcaaaaaacagctgatcgacggtattgcccatgaactgcgcaccccgctggtgcgtctgcgctaccgcctggagatgagcgagaaccttacagaagccgaatcacaggcgttaaatcgcgatatcggccagctggaggccctgattgaagagctgctgacctatgcgcgcctcgatcgcccgcagaatgaactgaagctgacgacccccaatttcccggcgtggctcggcgatcgcgtagaagatattcaggcggtgaatccccagcgcgacgttgcgctaagcgaagtcgtggacggaaattacggcgcgctggacatgcgcttaatggaacgagtgctggataacctcgtgaacaacgccctgcgctacagtaaccagcgtattcaggtcagcctgacgctgcagggttcgcgcgcaacgctgcgcgtcgaagatgatggtccaggtatcgcgcccgctgagcgggagaaagtgttcgagccgtttgttcgtctcgaccccagccgcgatcgcgccaccggcggctgcggtcttggtttggctatcgtccacagtattgcccaggcaatggctggcgaagtccattgccaggcgagcgagctcggtggcgcctgtttttgttttagctggccggtttatcatcagctgccgaattttacctcggcctga

SEQ ID NO: 174393 - DNA, 933 bp, Klebsiella oxytoca
atggccagctatgacctcgttgaacgtttgaacgacacctttcgccagctcgagcgtgaactgcaggcgcttaaacaggccctgagccagtgccgtctgctggctgcgcgcgtctttgagctgccgccggtcagcaaagatgccgaacaccagccgctggagaacatcaacgtggttcagcacaccggtaaacccgcgctggagatggcgctcaaacactatagccacctgtttatccagcagcagtcggaaacccgcagcagtaaggctgccgtgcgtttgcccggcgcgatctgcctgcgaactgaggccagcgagcaggcagaactattacgcaagatcgcccatatcaacgttcttaaagcgaccttcgagaagattatcaccgtcgattccggtcttcccgctaccgcacgatttgagtgggtccatcgccacctgccgggactgatcacgctgagcgcctatcgcacgctcaccccgttaattgacccgagcactatccgcttcggctgggccaataagcatgtgattaaaaatctcacccgcgaccaggttctcatgcaactggaaaaaagtcttcagtcgccccgcgcggttccgccgtggacgcgcgaacagtggcaaagcaagctggagcgagagtaccaggatattgccgccctgccgcagcgggcgaagctgaagataaagaggccggtaaaggttcagcctatcgccagggtgtggtatagcgggcagcaaaagcaggtgcaatacgcctgtccagggccgatgatcgcgctgatatccggcacgcatggcgttagcgtgccggacctcggagagcttctgaactatgacgccgggaacgtgcagtatcgttataaaccgcaggcgcaatcgctcaggctaatgattccgcgactgcacctgtggctggctagcgaatag

SEQ ID NO: 174394 - DNA, 1401 bp, Klebsiella oxytoca
atgacaacgcatcgcagtgaaaaagactctatgggcgcaatcgatgtgcctgccaataggctttggggcgcgcagactcagcgctcgctggaacatttccgcatctcgacggaaaaaatgccgatcgagcttattcatgcgctggcgctgaccaagcgtgcggcggcgaaggtgaataacgatctcggtcttctgagcgcagaaaaagcgcaggtgattattcaggctgcggatgaagtgctggcaggcaagcatccggacgagtttccgctggcaatctggcaaaccggctccggtacgcaaagcaacatgaatatgaatgaggtgctggctaatcgtgcgagtgaactgctgggcggggtacgcgggatggagcgtaaggttcatcctaacgatgatgttaacaagagccagagctctaacgacgttttcccgacggcgatgcacgtagcggcgatgattgcgcttcgggtaaagctgatcccgcagctcaacattctgaagcaaacgcttaatgataaatccctggccttcaacgatattgtcaaaatcggccgcacccacctgcaggatgcgacgccgctgacgctcggccaggagatctcaggatgggtcgccatgctcgagcataacctccggcatattgaccatagcttgccccatctggcggaactggcgctgggcggcacggcggtgggaaccgggcttaatacccatccggaatacgcggtacgcgtcgccgccgagctggcggccctgagcggccaaccgtttgtgaccgcgccgaacaagtttgaagcgctggcgaccgttgatgcgctggtgcatgcccacggcgcgctgaaagggctggccgcttcgctgatgaaaatcgccaacgatgtgcgctggctggcctccggtccgcgctgcggcatcggcgaaattgcgatcccggaaaatgaaccggggtcgtcgattatgccgggcaaggttaacccgacccagtgcgaggccctcactatggtctgctgtcaggtgatgggtaacgatgtcgcggtaaacatcggcggcgcttcgggcaactttgagctcaacgtttaccgcccgatggtgatccacaatttcctgcaatcggtgcggctgctggctgatgggatggcgagctttaatgagcactgcgcgacaggcattgaacctaaccgcgagcgcatcagccagttgctcaatgagtcgctgatgctggttaccgccttgaatactcatattggctacgacaaagcggcggaaattgccaaaaaggcgcataaagaggggttaacgctcaaggcctccgcgttggcgctcggctacctgacggaagaggaatttgaccgctgggtgcgccctgaagatatggtaggcagtatggctattcgctag

SEQ ID NO: 174395 - DNA, 1647 bp, Klebsiella oxytoca
atgtcgaataaaccctttgtatatcaggatccttttccactgaaaaaggacgataccgagtattacctcctcagcagtgattacgtctccgtcgccgaattcgccggccaggaagttctgaaagttgaacctcaggcgctaactttactggcacagcacgctttccacgacgcctcctttatgcttcgcccggctcaccagcagcaggtcgccgatattctcaacgacccggaagccagcgacaacgataaatacgtggcgctacagttcttgcgcaactcggatattgccgccaaaggcgtgctgccgacctgccaggacaccggtaccgcaattatcaccggcaagaaaggtcagcgcgtgtggaccggcggcggcgatgaagccgcgctggcgcagggcgtgtacaacacctatatccaggataacctgcgctattcgcagaacgcgccgctggatatgtataaagaggtcaacaccggcactaacctgcctgcgcaaatcgacctctacgctaccgacggcgaggagtacaaattcctctgcatcgccaaaggcggcggctcggctaacaaaacctatctgtatcaggaaaccaaagcgttaattactccggcgaagctgaaaaattacctcgtcgagaagatgcgcacgctggggaccgcggcctgcccgccgtaccatattgcttttgtgattggcggtacgtcggcggagtctactctgaaaaccgttaagctggcctcaacgaagtattacgatggtctgccgaccgagggcaacgagcacggccaggccttccgcgatattcagctcgaaaacgagctgttgctggaagcgcagaaccttggcctcggtgcgcagtttggcggtaaatatttcgcccacgatattcgcgtcatccgcctgccgcgccacggcgcctcatgtccggtgggcatgggcgtttcctgctccgcggatcgcaacatcaaagcgaagatcaaccgcgaggggatctggattgagaaactggagagcaatccgggcaagtatattcccgagcatctgcgtcaggccggcgagggagaagcggttaaggtcaatctgaaccagccgatgagcgatattctggcgctgctgtcgcagtatccggtgtcgacccgcctgtcgctgagcggtacgattatcgtggcgcgcgatatcgcccacgccaggctgaaagagctcatcgataatggcgaggaattgccgcagtacgtcaaggaccacccgatctactacgcgggcccggcgaaaacccctgacggctacgcttccggttctcttggcccgaccaccgcaggccgtatggactcctacgtcgatctgctgcaggcgcatggagcgagtaaaatcatgttagccaaaggtaaccgcagccagcaggtgaccgacgcctgtcacaagcacggcggtttctacctcggcagcatcggcggtccggcggcggtactggcgcagcagagcatccgtagtctggagtgcgtggcctggccggagctggggatggaggctatctggaaaattgaagtggaagacttcccggcgtttatcctcgtggatgataagggcaatgacttcttccagcagatccagagttcgcagtgcgcccgctgcgtgagataa

SEQ ID NO: 174396 - DNA, 1179 bp, Klebsiella oxytoca
atgcaaaaactcatcaactcagtgcaaaattacgcctggggaagtcataccgccttaaccgaactttatggcattgctaacccaaacaacctgccgatggcggagctgtggatgggcgcgcatccgaagagcagctcgcaaattctcgatgacgccggaacgccgcgttctctgcgcgatgcaatcgacagcgataaaacgaccctgcttggcgccaaagttgccgagcgttttggtgaactgccgttcctgtttaaagtgctgtgcgccgcccagccgctctctattcaggttcacccgaacaaacgggcctcggaaatcgggtttgccaaagagaatgccgccgggatcccgcttgatgccgccgaacgtaactataaagatccgaaccacaagccggagctggttttcgcgttaacgccgttccttgccatgaacgccttccgcgagttttccgaaatcgtgaagctgctgcagccggtagctgaagcgcatccggcaatagcgcagttcctggcgcagcctgacgccgcccatctgagccagctgtttgccagcctgctgaacatgaaaggcgacgaaaaagcgcacgccctgagcgtactgcagagagcgctggacagcgagcagggagaaccgtggcagactatccgcctgatcgccgagttctatccggacgatagcggccttttctctccgctactgctcaacgtggtcaagctgaatcccggcgaggcgatgttcctgtttgcggaaacgccgcacgcctacctgcagggcgtggcgctggaggtgatggccaactccgataacgtcctgcgcgcgggattgacgccgaagtacattgatattccggagctggtggcaaacgtcaaatttgaacccaaacccgctggcgaactcctgacccagccggtcattcacggcgcggagctggacttccccatcccggttgacgattttgctttctcactgcacgacctttcagcgcaggcatcaaccatcgcccaggatagcgcggcgatcctgttctgcgtcgagggtgaagcaacgatcgtgaaaggcgaacagcgtctgacgctgaagccgggcgagtcggctttcgtggcgcacaacgaatcaccggtacaggtcagcggcagcggtcgcgtggcgcgcgtgtttaataagctccagtaa

SEQ ID NO: 174397 - DNA, 1548 bp, Klebsiella oxytoca
atgaaaaaatcgctggtcgcagcaggaattatcatcgcgctgggcgtcgtctggacgggcggcgcctggtacacagggaagcagctggaaagccgcattgccgatatggtgcagcaggcgaatgctcagctgcaaagcagcgcgccgcaggctggcgtagagctcacctatcaggactatcagcgcggtctgttcagcagccgtttacaactggtcctgaaacccatcgccggcaaagcgccccgctggctggccgccggacagtcgctggtgtttgacgaagttgtcgatcacggccccttcccgctggcttcactgaaatcctttaacctcgccccggcgatggcatccgtcaaaaccaccttagtgaacaacgaggccagcaagtcgctgtttgacattgcaaaaggcgaaacgccgtttactatcgatacccgcatcgcctacagcggcgacaaccagtccgctatcgtgctgaaaccgcttgattacgcgaaagacgacgagaaagtcacttttagcggcggccagttccagcttaacgccgatcgagagggaaaaaccctcagcctgagcggcgaagcgggcagcgggcaaattaacgcggtcaacgaatacaatcagaaggtacagctcacctttaataatctgaaaaccgacggttccaccgaaatggccagcttcaacgagcgtattggcaagcaggccatctcgctggaaaaactggcgattggcgttgaaggaaaagagctggcgctgtttgaagggatgaaaatcgacggcaactcttcgctgaccgcagacggcaaagggattaacagccagctggactacaccgtcaacagcctgaagctgcaaaatcaggatatcggtagcggcaggctgaccctgaagctggacaatattgatggtgaagctttccatcagttcagccagaagtacaatgccgacgcccaggcgctgatggcggaccctcagctggcgcagaatcctgagctgtaccagcaggcgctaacgcaaaccttctttagctcactgccgatgatgctgaaaggcagcccgtccctgaccatttctccgctgagctggcgcaacgcgaagggcgaaaccaccctgaatctatcgattctgctcaaagatccgtcgctgactaccactccgccgcagacgctggccgaggaagtggatcgtagcgtcaaatctctcgacggcaagctggtgatcccggtcgatatggcgacggcgtttatgactcagattgccgggctggaaggctatcagcccgccgacgccgctaagcttgcagagcagcaggtgaaaggcctggcggcgatgggacagatgttccgtattaccactatggaagataacgccatcacctccagcctgcagtatgctgacggccaggtgacgctgaacgggcagaaaatgccgctggatgagtttgccgggatgttcggtttagcgcttccccctgtcccggcgcccgctgagccgcaggagacgctgccgcaagaagtggtaccgccagtcgcgccgcagcaataa

SEQ ID NO: 174398 - DNA, 1029 bp, Klebsiella oxytoca
atggctatcgtgaaaaaaattaccattaatgatgtcgcgcaggcggcgggggtatccgtcagtaccgtctcgctggtactgagcggcaaggggcgtatttcgtcggcaaccggcgagcgcgtcaatcacgccattgaacagctgggctttgtgcgtaaccgccaggcggcgtccctgcgcggcggccagagcggggtgattggcctgatcgtcagcgacttgtcgaagcctttctacgcggagatgaccgccggattgaccgatgcgcttgagtcgcagggcagaatggtcttcctcacccagggcgggcacagcggagaaaaaatgctccagcgttttgataccctggtttcacagggggtcgatggcgtagtgattgccggcgccatcgatcgggggggcgaactgcgcgatcgcgcggcggaagccggaatgccgctggtcttcgcctcccgcgccagctatctcgacgatgtggacctgatccgcccggataatatgcaggcggcgcaaattgtcaccgagcacctgatccgccgcggtcatcagcgcattgcctggctgggagggcaaagttcatccctgacgcgcgccgaacgggttggcggctactgcgctaccctgctgaaatatggcctgccgtttcatagcgagtgggtggtggagtgcggctcaagccagaagcaggcggcggaggcgatgacggccctgctgcggcaaaacccgaccattagcgccgtgctctgttataacagcgtgatcgcgaccggggcgtggtttggcctgatgcgcgccgggcgacagagcggagaggatggcgttgaaagctatttcgaacagcgggtcgcgctggcggcatttgcggaattacccgaggaggcgctggatgatctgccgctgacctgggttacgactcccgcccgggagatggggcaaagcctggcggagtgtattttacggcgtatggaagaggggcagggagcggcgcgaaaccagatcatctctcctcggctgattacgcgtaaatag

SEQ ID NO: 174399 - DNA, 1593 bp, Klebsiella oxytoca
atgacggcgaaaacagcaaacaaaattaccttgtgggagtttttccagcagctcgggaaaaccttcatgttacccgtagcattactctccttttgcgggatcatgctggggatcggcagctctctgagcagccatgatgtcctgacgcttctgccgtggctggacgtgccgctgctgcagaccgttttcgtctggatgggcaaagtcggctcctttgccttcagctttctgccggtgatgttttgtatcgccattccactgggtctggcgcgagaaaacaaaggcgtcgccgcgtttgccggttttgtcggctacgcggtaatgaacctggcggtaaacttctggctgacggccaaaggtattctgccgaccaccgatgccgccatcctcaaagccaataacatccagaacattatcggtattcaatcgatcgacaccgggatcctcggcgcggtgatcgccgggatcatcgtctggatgctgcacgaacgtttccataacatccgcctgcccgacgcgctggccttttttggcggtacccgctttgtgcccattattacgaccgtggttctcggcctggtcggtctggtgatcccgataatatggcccgttttcgccatggggattaacgcactcggtcaggtcatcaatagcgcaggtgatttcggaccgatgatcttcggtaccggtgaacgcctgctgctgccttttggcctgcaccatattctggtggcgctgatccgctttaccgaagcgggcggcaccctggacgtttgcgggcatagcgtcagcggcgcgctgacgattttccaggcccagctaagctgcccgaccagccacggcttcgccgagagcgcgacccgcttcctgtcacagggtaaaatgccggcattcctcggcggcctgccgggcgcagcgctggcgatgtatcactgcgcgcgtccggaaaatcgccataagattaaaggcctgctgatttccggcgttatcgcctgcgtggtaggcggcaccaccgaaccgctggaattcctgttcctgttcgtcgcgccggttctctacgttatccatgcgttactgaccggcctgggctttaccgtaatggcgatcctcggcgtgacaatcggcaacaccgacggcaacgttatcgactttgtggtattcggcattctgcacggtctgtccaccaggtggtacatggtaccggtggttgcggccatctggtttgcggtttactacggtatcttccgtttcgcgatctcccgctttaacctgaaaacgccgggacgcgatattgaaacaacgagcgcatttgagaaggctgtcaccggcgtgaccggcaaatcagggtataacgttccggcgattctggccgcgctcggcggcgcggaaaatatcgtttcgctcgataactgcattacccgcctgcgtctgtcggttaacgatatgagcaaagtcgacagcgccgcgctgaaagcgaatcgcgccatcggcgtggttcagctcaaccagcataacctgcaggtagtgattggcccgcaggtgcagtcggtaaaagatgaaatggctgtcctgatgaataccgtcgaggcataa

SEQ ID NO: 174400 - DNA, 1173 bp, Klebsiella oxytoca
atgtttgatttttcaaagcagatcgaccgtcacggtacctggtgcacgcagtgggattacgtcgccgaccgttttggcgtagccgacctgctgccctttacgatctccgacatggatttcgccaccgccccctgtattcttgatgccgtcagcaaacgtctggggcacggtgtttttggctacagccggtggaaaaatgatgaattcctcggcgcggtgagccactggttcgccagccgttttcatagcccaatcaaccgcgaagcgattgtttacgggccatcggtgatctatatggtcgcggagatgattcgtcagtggtcggcagtgggcgacggcatcgtggtacacactccggcctacgatgccttttataaaaccattgaaggcaaccagcggcgcgtcgcggccgtgccgctctctctcgacaaccatcactggcgctgcgatatggcggccctggagcgggtactggctcagccgcgtaataccgttctgctgctgtgcagcccgcacaaccccaccggcaaggtctggacccgtgaagagctggaaaccatggcgcagctgtgtgagaagcatggggtaaaagtgattagcgacgagatccatatggacatggtctgggacgggcagcagcacatcccgtggtgcgacgtggcccgcagcccctgggcgctcttcacctccggctcgaaaagcttcaacattccggcattcaccggcgcatacgggttgattgacgatcccgccgtgcgcgaaagctatctgcacgcgctgaagagccgcgatggcctctcatcaccttccgtgccggcgctggtcgcccatattgccgcctatcgcgagggagcgccctggctggatgccctgcgcggttatttgcaggaaaatatgcgcttcatcgctggcgaactgaatcaggcgtttccggagctaggctggcagccaccgcaggcgacttacctggcgtggattgacctgcgcccgctggccgttgacgatcgcgctctgcaaaaagcacttatcgaggagcagaaggtcgccattatgcccggctacacttacggcgaagagggtaagggctttgtccgtctcaacgccggttgcccacgcgagaagctggaaaaaggcgtgcagggattaatcgccgccctgcgttcgctgcgctaa

SEQ ID NO: 174401 - DNA, 204 bp, Klebsiella oxytoca
atgaaaacttacgatcgtaaccgtaatgctatctctaccggcagcatggttatggtagccgatagcggcgcgacgggcgtcattaaggccatccacgctgaaggtaaaacggcggagcagatccgtcgtgctgattgcgtggaaatagacggacacgaagggttatttagcccgctgaacctgattcgtctgggctttaactga

SEQ ID NO: 174402 - DNA, 1212 bp, Klebsiella oxytoca
atgacatggcaacaattcaaacagacgtggctgattaaattctggtcacccgttcccgccgttatcgccgcggggattctctcaacctactacttcggcattaccggcactttttgggccgtcaccggcgaatttacccgctggggcggacaattgctgcaacttatcggcgtgcacagcgaagagtgggggtactacaaactcattcatcttgagggcaccccgctcactcgcatcgacggcatgatgatcatcggcatgttcggcggctgtttcgccgctgcgctgtgggcgaataacgtgaagctgcgttttcctcgcagccgggtgcgtattctgcaggccgtcgccggaggcatcattgccggcttcggcgcccgtctggcgatgggctgtaacctggccgccttcttcaccggtatcccgcagttttctctgcacgcctggttctttgccatcgcgacggctatcggcacctggttcggcgcgcgttttaccttgctgcccatcttccgtattccggttaagatgcaaaaagtgtcgcaggcgtcgccgctgacgcaaaaacctgaccaggcgcgacgccggttccgtctcgggatggtggtcttttttgccatgatcgcctggggtctgctcaccgcagctaaccagccgaagctcggcctggcgctgctgtttggcgtcgggtttggcctgcttatcgaacgcgcgcagatctgctttacctctgcctttcgcgatatgtggatcaccggacgcaccaatatggcgaaggcgatcattttcggtatggcggccagcgccatcgggatcttcagctacgtgcagcttggcatggaaccaaaaattatgtgggccggccccaacgcggtcatcggcggtctgctgttcggctttggaatcgtcctggcgggcggctgcgaaaccggctggatgtaccgcgcggtggaaggccaggtgcacttctggtgggttgggctgggcaacgtgataggttcaacgatcctggcatactactgggacggactctccccggcgctggccacaagctgggataaaatcaacctgctggcgacattcgggcctttcggcggcctgctggtgacctatctcctgctgctgatcgcgctgggtttggttattggctgggaaaaacgctttttccaccgcaaatctctcgccacctcaacggttaaggaaagcgcatga

SEQ ID NO: 174403 - DNA, 234 bp, Klebsiella oxytoca
atgaaaactctggtcccggactatcgcctggatatggttggcgaaccctgcccctatcctgccatcgccacgcttgaagcgatgccctcgctgaagaaaggcgaaattcttgaagtggtcagcgactgcccgcagtcgattaacaatatcccgctggatgccaaaaatcacggctataccgtgctcgatattcagcaagatgggccaaccatccgctatttgattcaaaaatag

SEQ ID NO: 174404 - DNA, 816 bp, Klebsiella oxytoca
atgatctttatgttaaaaaaaattgcagtaccgctggttgtcgcaggctcgctgctgctggcagcctgcaaacctggtgagcaggaccctaaccacatcaaagtgggcattagcgcaggcgttgaccaggaggtctgggcggtggcgcaaaaagtggcaaaagagaagtacaatctcgacgtcgaagtggtgacgtttaatgatttcgtcctgcccaacgaagcgctgaacaacggcgatcttgatgctaatgctttccagcataagccttatctggataaacaaattcaggagcgcggctataagctggttcaggttggcacgacgttcgtttatccgattgccgcctattcgaagaaaatcagttcggtcgaccaactgcccgatggcgcgcaggtggccgttcccaacgatccaactaacctcggacgctcgctgctgctactgcaaaagcaggggctgattacattgaaggagggcaccggtctgctgcccacttcgcttgatatcattaataacccgaaaaacttaaaaatcgtcgagattgaggcgccgcagctcacccgcgcgctggacgaccagcagataactatggcgataattaataccactttctcaagccaggtgggcctgtcaccgtcgcgcaacggcctgtttgtggaaagcaaagattcgccctacgtcaatatctttgccagccgcatcgaaaacaaagatagcgaaaaggtaaaaaatctggtgaaggcctaccagagcgatgaagtggccgcggcggcagaacagctttataaaggcgatgcggttaagggctggtaa

SEQ ID NO: 174405 - DNA, 1002 bp, Klebsiella oxytoca
atgattgatttaactttgccattaaccgacatccatcgccatcttgacggtaatatccgggcccaaactattctcgatcttggccgccagtataacctcgcacttccggcaaatacgctcgaaacattacgtcctcatgtacaggtcaccagcaatgagcccgacctggtcagcttcctctctaagctggattggggtgtaaaaatgctcgcttctctggatgcctgccgccgcgttgcctatgaaaaccttgaagatgccgcgcgcaacggactgcattacgtcgaactgcgtttctctccgcgctatatggcgatgacccaccagctgccggtagcgggcgtcgtcgaagcggtgatcgctggggtaaaagaaggcagccgcgactttaacgttgaagcccgtctgatcggtattctgagccgcaccttcggcgaagcggcgtgcgaggaagagctcgaagccctgctcgcccaccgcgacggcattaccgccctcgacctcgccggcgatgaacttggcttcccggggaatctgtttatggagcacttccgccgcgcgcgcgatgcgggctggcggatcacggtccatgcaggcgaagccgccggtccggaaagcatctggcaggccattcgcgagctgggagccgaacgcatcggccacggcgtgaaggcggtgcaggacccggcgctgatggactatctcgccgcgcagcgcatcggcattgagtcctgtctaacctccaatatccagaccagcaccgtgccgtcgctggcccggcatccgctgaaaactttcctcgcgcacggcgtgttggcctgcattaataccgacgaccccgccgtccagggcgtcgatattatccacgaatatacggttgccgccccggctgccggcctgagccgcgagcagattcgccaggcgcagatcaacggcctggaactcgcctttttaagcgccggggaaaaagcagcgctgatgcagcgcgttcagcaggcttga

SEQ ID NO: 174406 - DNA, 1041 bp, Klebsiella oxytoca
atgagtgatgctatccgggtaggattaatcggttatggctacgctagcaagacctttcatgcgccgctaatcagcggtacgccagggatgacgctggccgctgtggccagcagtgatgaaaataaagtgcatgccgattggcctgcattgccggtggttagcgggccagagcggattttgaacgaccccaatatcgatttggtggtgatcccgaccccaaacgacacccattttccgctggccaaggccgcgctggaggcgggcaagcacgtagtcgtcgataaaccctttaccgtgacactgtcacaggcgcgtgagcttgaagcgctggcaaaaagcggcgggcggctgctgtcggtattccataaccgccgctgggacagcgattttctgacggtaaaagcgctgatcaacgaagggctactgggggaagtaggatactttgagtctcatttcgatcgctatcgaccgcaggtgcgtaatcgctggcgtgaacaaggcggaccggggagcggcatctggtacgatcttgccccgcatctgctggaccaggtggtaaatctcttcggcctgccggttagcatgcaggttgatctggcgcagttacgtccgggctcccagtccaccgactattttcatgcggttttagcctggccgcagcgtcgtgtcgtgctgcacggaactctggtcgctgcggcggaaacggcgcgctttattatccacggttcgcgaggaagctatgtgaaatacggtctcgacccgcaggaggagcggctgaaaagcggcgaacgcctgccgcaggaagactggggatacgatatgcgcgacggggtgctgacgcgagcggagggcgaggacataaccgaggagtcgtggctaacgctgccgggtaactatccggcctattatgccgctattcgcgatgcacttaacggaagcggcactaatccggttccggcaagccaggcgattcagattatggagctgattgagcttggcctcgagtcggccagacatcgaacgacgctgtgtctgaattag

SEQ ID NO: 174407 - DNA, 1371 bp, Klebsiella oxytoca
atgtccggatttccgcagcattttttatggggagccgctaccgcagcctggcaggttgagggcggacacgatgccgacggcaaaggcccttctatctgggatatctactcccatctcccaggcaccacttttcagggcaccaccggcgatatcgccgtagaccattaccatcgctttcgcgaagatgttgcgctgatggcggaaatgggtctgcaaagctatcgcttctcaatttcatggccgcgtctgctgcccgaaggccgcggcgaggttaacgaggctggggttcagttctacagcgatctgattgatgagctgctggcgcataatattgaaccgatgatcaccctgtatcactgggatcttccgcaggcgttgcaggaggaaggcggctgggaagcgcgcagtacggcggaagcgttcgctgagtacgcccgcctctgctatcagcgcttcggctcgcgggtcaaattgtgggcgaccttcaacgaaactatcgtctttatcgggcatggctatattaacggcatccacccgccagcggtgcgcgaccctgcgcgcgcgattcaggcctgccaccacgtctttatcgcccatgcgctggccgtgaaagcgtttcgtgaaatggcagtcgaggggcagataggttttgtcaacgtactgcagccgcatacccctttaaccgacagcgaggaggatatgcaagcgacggcgatggcggatgctattcacacccactggctttacgatccggtgctaaaaggtcaataccctgaagagctcctgcaacaaacccaggcgctgtggggcgttccggcttttgcagcgggcgacgatgcgctgctgcgtgaaaaccgctgtgattttatcggcctgaactactaccgccgcgaaaccgtctcagcgcagcccccggaggttccgaccggcggcgaacccggcgtcgacgggctgttctattttgtacgcaacccgcaaagtacctataccgaatggggctgggaaatttggcctcaggggttaaccgacgggatcatgatgattaaagcgcgctacggtgacataccgatttacatcaccgaaaacggactcggggccattgacccgatcatcgatggcgaaatcgtcgacgacccgcgtattgactatctgaatagccacataactgcgctggaaaaagcgctggaactgggcgctgacgtgcgcggctattatccctggtcctttattgatctattaagctggctcaacggttataaaaaacagtacggctttgtttatgtcgatcatcagaacaatctggcgcgtaaacgtaaaaagagctttttctggtaccaaaacgttattgccagccgaggcgaacagcgttaa

SEQ ID NO: 174408 - DNA, 264 bp, Klebsiella oxytoca
atgggtatattcaacttaaattattctgattataaaatggatacgcaaatgaccgttcaggactacttattaaaatttcgtaaaatcagcacgctggaaagtctggaaaaactttttgatcaccttaactattccctgaccgataacgaagagatcgtcaacatgtatcgcgccgcagaccatcgtcgggcggagctggtttctggcggcaaattgttcaacattggcgaggtgcccaagtccgtctggcgctacgtgcaataa

SEQ ID NO: 174409 - DNA, 441 bp, Klebsiella oxytoca
atgtcctctgactctgtggaacgtattggcggatggcttctggcgccgctggcatggctcctggtggccctgcttagcgcctcattgtcgctgctgttttttgctgatgctctgatgtcttcccagacttataccctgctgcgcaatatgagtactgaacatctcgccttgtggattgcttcgctggccttcgcgatcgccatgtggtactacacgctgtggttgaccattgcctttttcaagcggcggaaaggggtgccaaagcattacattatctggctgctgattacgcttctgctggcggtaaaagcatttgccttttccccaatatcagacgctctggcgctgcgccagctgctgtttccccttctcgctgcggcgctgctggctccctatttcaagcgttctgaacgggttaagcggacctttgtgaatccgtaa

SEQ ID NO: 174410 - DNA, 582 bp, Klebsiella oxytoca
atggctgattatttactgctctttgttggcaccgttcttgttaacaacttcgtgctggtgaagtttctgggactgtgcccgtttatgggggtttccaaaaagctggaagccgctatgggaatggggctcgccaccacctttgtgatgacgctggcctcaatttgcgcctggctgattgatacctggatccttattccgctggacctggtctatttacggaccctggcctttatcctggttatcgccgtagtggtgcaatttaccgaaatggtggtgcgtaaaaccagtccggcgttgtatcgcctgttgggcatcttcctgccgctgatcaccaccaactgcgcggtgctcggcgttgcgctgctcaacattaacctcgggcataatttcctgcagtctgcgctgtacggctttgctgccgccgtcggcttttcgctggtgatggtgcttttcgcctccatccgcgagcgtctggtggttgccgatgtgccggcgccgtttcgcggtaatgccattgcgctggtcactgccggtttaatgtccctcgcctttatgggctttagtggtttggtgaagttgtaa

SEQ ID NO: 174411 - DNA, 579 bp, Klebsiella oxytoca
atgaatgctgtctggatagccgtggttgccattagcctgctggggctggttttcggcttaattctggggtacgcttcgcgccgttttgaggtggaagatgacccggtggtggagaaaattgacgccctgctaccgcagagccagtgcggtcagtgcggttaccccggctgtcgtccctacgcggaagccgtaggcactcagggtgagaaaattaactgctgcgcgcccggcggcgaagcggtgatgctcaaaatcgctgaactgttgaacgtcgacccgcagcctacggacggcgatgcgcaagaagccgtacctgcgcgaatgctggcggtgatcgacgaagcgaactgcatcggctgcacaaaatgcattcaggcctgtcctgtggatgccatcgtcggcgccacccgtgcgatgcatacggtgatgagcgatctctgcaccggctgtaatctttgcgtcgcgccttgtccgacgcaatgtattgaactgcgcccggtggcggcgacgacagaaacctggaaatgggatcttcaaaccatcccggtacgcattattcccgtggaacaacatgtttaa

SEQ ID NO: 174412 - DNA, 2202 bp, Klebsiella oxytoca
atgtttaagttattttccgcatttcgcaaagacaaagtctgggacttcaacggcggcattcatccgccggaaatgaaaacccagtctaacggtaccccgctgcgtcaggtttccctgccgcagcgttttgtcatcccgctgaaacaacacatcggcgcggaaggtgagctctgcgtccagccgggcgatcgcgtcctgcgcggccagccgcttacccgcggctggggcagaatgctgccggtgcacgcgccaacgtccggcatcgtggcggcgattgccccccactcgaccgcccacccttccgcgctggcggaaatgagcgtcattattgatgccgatggcgaagaccgctggattgagcgcgatggctggaacgattaccagaataaatcccgcgaagagctgattgagcgcattcaccagtttggcgtagccgggcttggcggcgccggtttccccaccggcactaagctgcgcgggggcggcgacagaatcgaaacattaatcatcaatgcggcggaatgtgagccctatatcaccgctgacgatcgcctgatgcaggattgcgcggcgcaaatcgttgagggaattcgcatccttgcccatattctgcaacctgcacaggtgctgatcggcatcgaggataataaaccgcaggcgatttcgatgctccgcgcggtactcgccgacacgcacggtatttcgctgcgcgtaatcccgacgaaatacccctcaggcggtgcaaaacagctgacgcaaatcctcaccggtaaacaggtgccccacggtgggcgctcctctgatatcggtgtattgatgcaaaacgtcggcaccgcctatgcggtgaaacgtgcggtgatagacggcgagccgctgacggagcgcgtagtcaccttaaccggcgaagcggtcacgcgtccgggcaacgtctgggcgcgcctgggtacgccggtcagccatctgctaaaagatgccggtttctgcccaggcgccgatccgatggtgattatgggcggcccgctgatgggcttcaccctgccctggctcgacgtgccggtggtcaaaatcaccaactgtctgctggcgccttcggcgagcgaaatgggcgaaccggaagaggaaaaaggctgtatccgctgtagcgcctgcgcggacgcctgcccggccgatcttctgccgcagcagttatactggttcagcaaagggcagcagcacgacaaagccaccagccataacctcgtcgattgtatcgagtgcggtgcctgcgcctgggtttgtccaagcaatatcccgctggtgcagtacttccgccaggagaaagctgagatatacgccattgcgcaagaagagaaacgcgcagcggaagcgaaagtccgctttgaggcgcgtcaggctcgcctggaacgggataaagccgcaaggctggaacgtcataagcaggcagccgtacagccagcagcgaaagatcaggatgcgattaacgccgcccttgcccgcgtacgtgaaaagcagcgcaacgcggcgcagccgattatcgtgctctccggcgagaaaccggataatagcgaagccatcgccgctcgcgaagcccgtaaggccgaggcgcgggcgcgcagggctgagcagctggtagtcccggctgaacctgccccggacgcagagcaacctgctaccgttgacccgcgcaaggccgccgtcgaggccgcgatcgcccgcgccaaagcgcgcaaagcgggccagcaggcagccccggctgaacctgcccccgccgcagaacagcctgctaccgttgacccacgcaaggccgccgtcgaggccgcgatcgcccgcgccaaagcgcgcaaagcgggccagcaggcggccccggctgaacctgcccccgccgcagaacagcctgctaccgttgacccacgcaaggccgccgtcgaggccgcgatcgcccgcgccaaagcgcgcaaagcgggccagcaggcggccccggctgaacctgcccccgccgcagaacagcctgctaccgttgacccacgcaaggccgccgtcgaggccgcgatcgcccgcgccaaagcgcgcaaagcagaacaacagcaacaagcagttcccccgtcggcagccaatgatgacggccgcaaagcggcagtcgctgaagcaatcgcccgcgttcaggcccggaaagcatcccggcaggcagttaacgaggattaa

SEQ ID NO: 174413 - DNA, 1053 bp, Klebsiella oxytoca
atggttttcagaatcgcaagttccccctacacccacaatcagcgccagacttcgcggattatgctgctggtgctgctcgccgccgtacccggtattgtggttcagacctggtttttcggctggggtaccgtactgcaaattatcctcgccgccgtcacggcgtggggagccgaagcggccattcttaaactgcgcaaacaaaatatcccggcgattcttgccgataactcagcgctgctgaccggcctgctgctggcgatcagtattccgccttttgcgccgtggtggatggtcgtgctgggcactgcgtttgcggtgattatcgccaaacagctgtacggtggactgggtcacaatccttttaacccggcaatgattggctacgtggtgctgctgatctctttcccggtgcagatgacctcctggctcccgccccatgagatagccgccaatgtacccggttttagcgacgcgctgacgatgattttcactggtcatacggctaccggcggggacatgaacagcctgcgaatcggcattgacggcatcagtcaggcaacgccgctggataccttcaaaacctcgctccatgccggtcatgcggtgcaagagatcctccagtatcctgtctacggcggcgcgctggccggtctcggctggcagtgggttaacgtggcttatctggcgggcggtctgttcctgctatggcaaaaagccattcgctggcatattccgctgagcttcctgctgagccttgccgtttgcgccaccctgggatggctattctcaccagaaagcctcgcctcaccgcaaattcatctgctctccggcgccaccatgctgggcgccttctttatcctgacggacccggtgaccgcttccaccaccaatcgcggtcgcctgatcttcggcgcgctggctgggttactggtgtggctaattcgcagctttggcggctacccggatggcgtcgcctttgccgttctgctggctaatattaccgttcccttgatcgattactacacgcgcccgcgcgcgtacggccaccgctga

SEQ ID NO: 174414 - DNA, 621 bp, Klebsiella oxytoca
atgttacaaagcatgcgtaaacacggcatcacgctggccctctttgctgcgggttcgaccgggctgacggccgccattaacgaactgaccaaaagcaccattgaagaccaggccgcccagcagcaaaaagccttattcgaccaggttatgccagccaatttatataacaacgacttgctgaaaagctgttatcgggtaaccgcgccggagctgggaaaaggcgagcataaggtctggattgctcagaatggcgataaagcggttgcagcggtgatggaagctaccgcgccggacggctattcaggagccattcagctactggttgccgccgactttaaaggtaccgtgctgggtacccgcgtcaccgagcatcatgagacgccgggcctgggcgataagatcgagcttagaatttctgactggatcaccctctttgccgataaagtgattcatgggcaaaacgatagccactgggccgtgaaaaaagatggcggcgatttcgatcagtttaccggggctaccattactccgcgcgcggtggtcaatgccgtcaagcgcgcgggcctgtatgcgcaaactctgcccgcgcagatttctgctttcactccctgtggagactag

SEQ ID NO: 174415 - DNA, 699 bp, Klebsiella oxytoca
atgagcgaagtaaaagacgttattgttcaggggctgtggaaaaacaactccgcgctggttcagctgctggggatgtgtcctctgctcgccgtgacctctaccgccaccaacgctcttgggcttgggctggcgacgacgctggttcttaccctgactaacctgaccatttccagcctgcgtcgctggacgccggcggaaatccgtattccgatttacgttatgatcatcgcttcggtggtgagcgtcgtccagatgctgatcaacgcttatgcgttcggcctttatcagtctctggggatttttatcccgcttatcgtcaccaactgcattgtggtcgggcgcgctgaggcctttgccgcgaaaaaaggcccggcgctatcggcgctggatggtttttccatcggcatgggggcgacctgcgcgatgtttgtcctcggctcgatgcgggaaattctcggcaacggtaccctgtttgatggtgccgatagcctgctcggcagctgggcaaaggttctgcgtatagaagtatttcataccgatacgccgttcctgctggcaatgctgccgccgggcgcatttattggcctcggcatgatgttggcggtaaaatacctcattgatgaacgtagcaaacagcgcaaagccaaagcggcgcaggccgggatcgttgcgccctctgatgtgacgggaaaagcatag

SEQ ID NO: 174416 - DNA, 636 bp, Klebsiella oxytoca
atgaacaagagtaaacgcctggagatcctcaccaggctcagggataacgacccgcaccccactacggagctgaattttaactcgccgtttgaattattgatcgccgtgctgctctcggcgcaggctaccgacgttagcgtcaataaagctacggcgaaactctacccggtcgccaacacgccggcggcgatgctggcgctgggcgtagagggcgtcaagtcgtacattaagaccatcggcctgttcaacagtaaagcagaaaacgtcattaagacctgccggatcctgcttgagcagcataacggcgaagtaccggaagacagagccgcgcttgaggcgcttcccggcgtcgggcgcaaaaccgctaacgtcgtgttgaacaccgccttcggctggccgacaatcgccgtcgatacgcacattttccgcgtttgcaaccggacacaatttgcgcctggtaaaaacgttgaacaggtggaagagaagctgttaaaggtggttccggcggaattcaaagtggactgccatcactggttgattctgcacggccgttatacctgtatcgcccgtaaaccgcgctgcggttcctgcctgattgaagatctttgcgagtttaaagagaaggtctactcctga

SEQ ID NO: 174417 - DNA, 1662 bp, Klebsiella oxytoca
atgtgtaacagattattgcaaagctattgcctgatggcacaggatagtgaacattacctgccgttttccctccagaataactataaaggcggcggtctgcgaagattgcgccccgagcaccccccgttaatatgggatgtaaaaaaagaggtatttgtgtctactgcaaacaataaaccaacggagagcgtgagtttaaacgctttcaaacaaccacgatcgttctatctcatcttctctattgagctatgggaacgttttggtttctacggcctgcaagggattatggccgtttacctggttaaacagctgggtatgtcagaagcggattctatcactctgttctcctcctttagcgccctggtatacggtctggtggcgattggcggctggctgggcgacaaggtgctcggcaccaagcgcgtcattatgctcggcgccatcgttctggctatcggctacggcctggtcgcgtggtccggacacgatgcgggcatcgtgtatatggggatggcaacgattgccgtgggtaatggcctgttcaaggctaacccctcttccctgctctcgacctgctatgaaaagaacgatccgcgtctggacggtgcatttaccatgtactatatgtccgtcaatatcggctccttcttctctatgctggcgacaccgtggctggcggcaaaattcggctggagcgtcgctttcgctctgagctttgtaggcctggtgatcaccatcgtcaacttcgctttctgccagcgctgggttaagcagtacggttccaaacctgacttcgcaccggtgcacgtgggcaaactgctggccactatcgttggcgtggtcgttctggtcgcgattgcaacctggctgctgcacaaccagggcattgcacgtatggcgctgggcgtggttgctctgggcatcatcgttatctttgctaaagaggcctttgcgatgcacggcgcgccgcgtcgcaaaatgatcgttgcgtttattctgatgctgcaggcgatcatcttctttgtgctgtatagccagatgccgacctccctcaacttctttgctattcgcaacgttgaacactctctgctgggtatcgcttttgaacctgaacagtatcaggcgctgaacccgttctggatcattatcggtagcccgattcttgccgccatttacaacaagatgggcgacaccctgccaatgccgatgaagttcgctattggtatggtcctgtgctccggcgccttcctcgtgctgccgctgggcgcgaagttcgccagcgatgcgggtatcgtcaacgtcagctggctggtgattagctacggtctgcagagtatcggtgaactgatgatctctggcctgggcctggcgatggttgcgcagttggttccgcagcgcctgatgggcttcatcatgggcagctggttcctgacaaccgctggcgctaacctgatcggcggctacgttgcgaacatgatggcagtaccggacaacgtcactgacccgctgatgtcgctggaagtttacggccgcgtgttcctgcatatcggtgtcgcaactggcgttatcgctatcctgatgctgctgacggcgccgaagctgaaccgcatgacccaggacgatgataaaacggcaaaagccagcgataccgccacggcttaa

SEQ ID NO: 174418 - DNA, 606 bp, Klebsiella oxytoca
atgaaactgttctataaatccggcgcttgttctctagcctcgcatatcgcgctacgcgaaagcgggctggactttaccctgcagggcgttgacgtgatgaaaaaacgccttgaaaacggggaggattatttgctggttaaccccaagggtcaggtaccggcgctgctgctggacgatgacgtgctgctgacggaaggcgtggccattatgcagtatatcgccgatcgcgtaccggaccgccagctgctggcgccggtaggaagcatcgcccgctaccagaccctggagtggctaaactacgtggcgacggaactgcataaaggctttacaccgctgtttcgaccggatacgccggaagatttcaaacctatcgcccgcgcgcagctggataagaaaatgcagtacgtgaacgaatgtctgcaggataaagagtggattaacgggcatcgtttcaccattgcggatggctacctgttcaccgtactgcgctgggcctacgccgtgaagctgaatatggaaggttatagcaatatcgcggcctggatgaaacacgttgccgcgcgcccggccgtagccgctgctcttgaggctgaagggctgaagtaa

SEQ ID NO: 174419 - DNA, 861 bp, Klebsiella oxytoca
atgaagaacatcctcgccatccagtcccacgttgtgtttggccatgcgggcaacagcgccgctgaatttccgatgcgccgccttggcgccaacgtctggccgcttaataccgtacaattctccaatcatacccaatacggtaaatggaccggctgcgtgatgccgccagcgcatttgacggagattgttcaggggattgccgatattaaccaactgcagcgctgtgacgccgtgctaagcggctatctgggatcggctgaacagggcgaacatattcttggcattgtgcgtcaggttaaagccgccaatccggctgcgaaatatttctgcgacccggtaatgggtcatccggaaaagggctgcatcgtggcgccgggcgtagcggagtttcacgtgcgctacgcgctgccggcaagcgatattattgcgccaaatctgattgagctggagatcctctgcgggcatccggtggcaaacgttaacgaggcggttttggccgcgcgcgagctgattgctcaggggccggaggtggtgctggtgaagcatctctcgcgtgccggactgagtatggatcgttttgagatgctgctggttaccgcgcaggaagcctggcatatcagccgtccgctggtggattttggcatgcgccagccggtaggcgtcggtgacgttaccagcgggttgctgctggtcaaactgctgcagggcgccactctgcgcgatgcgctggagcatgtgaccggcgcggtttatgaaatcatgctggcgactaaaaacatgcaggaatatgagcttcaggttgtggcggctcaggatcgtattgcgcagccggagcactactttagcgccacccagctttaa

SEQ ID NO: 174420 - DNA, 1275 bp, Klebsiella oxytoca
atggcaagcagtaacttgattaaacaattgcaggagcgggggctggtagcccaggtgacggacgaggaagcgttagcagagcgactggcgcaaggcccgatcgcgctctattgcggcttcgacccaaccgccgacagcttgcacttggggcatcttgttccattgttatgcctgaaacgctttcagcaggcgggccataagcctgttgcgctggttggcggcgcgacgggtctcattggcgacccgagctttaaagccgctgagcgtaaactgaacactgaagataccgtgcaggagtgggtagataaaattcgcaaacaggtcgcgcctttcctcgactttgattgcggtgataactctgccatcgccgcgaataactacgactggtttggcagcatgaacgtgctcaccttcctgcgtgatatcggcaagcacttctccgtaaatcagatgatcaacaaagaagcggtgaagcagcgtctgaatcgcgacgaccagggcatctcttttaccgagttctcctacaacctgctgcaaggctacgactttgcttgcctgaacaagctgcacggcgtggcgctgcaaatcggcggttctgaccagtggggtaacattacttccggtatcgacctgacccgccgtctgcaccagaatcaggtctttggcctcaccgtcccgctgatcaccaaagccgacggcacgaaattcggtaaaaccgaaggcggcgcagtgtggctcgatccgaagaaaaccagtccgtataagttctaccagttctggatcaacaccgcggatgccgatgtttatcgcttccttaagttcttcacctttatggacatagctgaaatcaatgccctggaggaggaagacaaaaacagcggtaaagcgccgcgcgcccagtacgtgctggccgagcaggtgacccgtctggtgcacggtgaagaaggtctggtggcggcaaaacgcattaccgagagcctgttcaacggcaacctgagcgatttgagcgaagccgatttcgaacagctggcgcaggatggcgtgccgatgatcgaaatggataaaggcgccgatctgatgcaggcgctggtggattctgaactgcagccgtcccgcggtcaggcgcgtaaaaccatcgcatccaatgcggtgaccatcaacggcgaaaaacagtccgacccggaatacgtatttgtcgacgccgaccgtctctttggtcgctacaccttactgcgccgcggtaagaaaaattactgtctggtctgctggaagtaa

SEQ ID NO: 174421 - DNA, 675 bp, Klebsiella oxytoca
atgactttctcaattgccatgtctgataacgacgaattgcagcaaattgcgcatctgcgccgtgaatatacccgtggtggcctgcgtcgccacgaccttcctgccgaacccctggcattatttgaacgctggctgcggcaggcctgtgatgcgaagctcgctgacccgacggcgatggttgtcgcgaccgttgatgaaaactcgcagccttaccagcgcatcgtgttgctcaagcactacgatgagaaaggcctggtgttttataccaacctcggcagccgcaaagcccaccagattgaaaaaaatccccgcatcagcctgctgtttccatggcatatgctggagcgccaggtcatggttatcggtaaagcggaacgcctgtcgacgctggaagtagtcaaatatttccacagccgcccgcgcgacagtcagattggcgcctgggtatcgcagcagtccagccgtatttcggctcgcggcatcctcgaaagtaagttcctcgagctgaagcaaaagttccagcagggcgaagttccgctgccgagcttctggggcggattccgcgtcagtattgaacagatggagttctggcagggcggagagcatcgtctgcacgatcgttttctctatcagcgtcaaaacagcggctggcagatcgaccgactggcgccataa

SEQ ID NO: 174422 - DNA, 360 bp, Klebsiella oxytoca
atgccttcccggaccgggaaagtcgaaggcatactgatgaaaaaaatacttattcttgctgtaccttttatgctcgcaggctgtagctactacaaccagtttgttgagcggatgaacacggataccctcgagtaccagtgcgagcaaaaaccgttaaccgtccatctcaataatactcgccagcaggtcagcttcatttacgacaaccagcagttaaatttacagcagggtctctccgcctccggcgcgcgctataccgatggcgtatacgtcttctggtctaaaggcgatagcgccaccgtttataaacgcgaccgtattgtgctggaaaactgtcagctgcaaaccgccaaacgttga

SEQ ID NO: 174423 - DNA, 1125 bp, Klebsiella oxytoca
atgaaatcaggccgctttatcggcgtcatgtccggcaccagccttgatggtgtggatgttgtgcttgcagcaattaatgaagatctggtcgcccagcaggccagcctgacgtatcccatccccattgcgattaaagaacagattctggctatctgtcaggggcagccgctcacgctttcgcagctagggcggctggatacgcggctggggcggctgtttgccgatgcggttctggcgctaatggctcaggaaaagctacaggcagcagatatcatcgccatcggctgccatgggcaaacggtctggcatgagccaacgggtgatgcgccgcacactatgcagataggcgacaataatcagcttgccgcgcgcaccggcgtaaccgtggttggagactttcgccgccgcgatatggcgctcggggggcagggggcgccgctggttcctgctttccatcatgcgctgctggcgcatccggtagagcgccgcatgattctcaatatcggcggtattgccaatctctctttactggcgccggggcagccggtacgtggatacgacacggggccaggcaacatgctgatggacgcgtgggtctggcgccagtgcggcaaaccctatgataaagacgcgcagtgggccagcgaggggaaaattgtgctgccgctgctgcaggatatgctcagcgatccctggtttgccctgccggcgccgaagagtaccgggcgcgaatactttaactacggctggctcgcgcagcatctggcgcgttatccggggcttcgtgcccaggatgtccaggcgaccctggccgaactgactgccgtcagcatcagcgaacaggtgctgctaagcggaggctgcgagcgtctactggtatgcggcggcggtgcgcgtaacccgctactgatggcgcgtctggcggcgctgttgtcgggaaccgaagtgtcgacgaccgatgaggcgggcataagcggtgatgatatggaagcgctggctttcgcgtggctggcgtggcgtaccctcgccggcttacccggcaatctcccttccgtgaccggcgcgtcgcaggcaaccgtactgggcgctattttcccggccaatccgcagcaaaatcagagttaa

SEQ ID NO: 174424 - DNA, 468 bp, Klebsiella oxytoca
atgattttacgtgttttggctgtctcgatgattggttttacgcttgcaggttgcgtcagcaacagcggcctgtccggcgatgtttactccgcatccgaagccaaacaggtccaaagtgtgacctacggcaccattgtgcatacccgcgcggttcagattcagggcggagatgaaagcaatgctatcggcgccattggcggcgcggtgctcggtggtttcctgggtaacaccatcggcggcggcacgggtcgctctctggcaaccgcagcaggcgctgtcgcgggcggcgtagccggtcagggcgtccagggcgcaatgaacaaaacccagggcgttgagctggaaattcgcaaagatgatggcaacaccatcatggtggtgcagaaacaaggcagcacgccgttctcagtcggacaacgcgtggctattgccggcagcggcagccaggttaccgtatccccgcgctaa

SEQ ID NO: 174425 - DNA, 1353 bp, Klebsiella oxytoca
atgtttattaatctcaaacgcttgcctgacaggctatttctttacgctgtcgtatgcggtttttctattgctacgattaatttcgttaccggctcattaattcatcgtatctctacaacttcatcaatgctgtttcctgtattgactatttcactgatgggtttccatattatgattgcctgttttatgggcatgaaatatctgtgcgataaaaagcagctgtacctggcgccaatagccttcgcttttgcctgttcggccctgttgatgctcgggaccataggcagctacccggactggctggtatgtgcccagggtcgcgtcatcaaccagaatgacgcgctaattttttattttttccgcaacgtcatgatggccgttttatttataacttcgatcgttttatatcggcttcgccaccgtaccactcattcaggaaagattcacggtctggtactgctgggttgttttattttgatcgccgcaacgctcatattgtcgtgggttcattccagcaactcaccattactgagcattgaattcattgataatctgacctatacctttacgccgctatggcataaccgggttggctgggtattaattggcacatggtcatttacgctgattttacttattagcctgacccggctacgcaatatattctggtacagcggcgcttttttttgtaccgcctatatatttacgctactggttctgctctctacggtcaacggtaacgctcattcctggaaccaggcgcggctctttgaaacgctgagcactctgtttttgattttagttctgcttgtggatgtttttatcctctaccgggagtcaaacgaaaggtacgttcgctcgtaccagaattctattcgcgatcccctgacccggctgtataaccgcagctatttctacgacaccctgaatcaacgattaacaaaagtctctgcatcacagccgctatcggtcattgtctgcgatcttgaccgctttaagcgcatcaacgacacgtacggccacgtgcagggagataaggtcattcagtttgctgccagcgtgctgcagaataacgtgcgccaggaggacattgccgcgcgtatcggcggggaagagtttgccctgctgctggtcaatatcggcgccaacgaagcgctggccattgccgaacgcatccgcctgtccgtcagtgaacagcatgaagggttaccggaaagaatgaccatcagtatgggggttttcaccactcaggatgcgcatgttgcggcggaggagtgcgtcaagcgcgctgataccgccatgtacgaagcgaaaaacaccgggcgtaatcgcgtagtcgtctggcaggcgtaa

SEQ ID NO: 174426 - DNA, 435 bp, Klebsiella oxytoca
ttggaatcgccacttggttctgatctggcacgtttggtacgcgtctggcgcgcgctaatcgaccatcgcctgaaacctctggagttaacgcagacgcactgggtcacgctgcataacattcaccagctgccgcctgaacagtcgcagattcagctggcgaaagccattggtattgagcagccttcgctggttcgcacgctcgatcagctggaggaaaaggggcttatttctcgccagacctgtgcaaacgatcggcgggcaaaacgtatcaagcttaccgaaaaagccgaacccctgatcaacgaaatggaagaggttatcggcaaaacgcgtgatgagattctggccggcgtttctaaagaagaggtggaaacgctgctcaatttgattcgtaaacttgaacacaacatcctcgatctccaggcaaaagattga

SEQ ID NO: 174427 - DNA, 237 bp, Klebsiella oxytoca
gtgaaactgagtcttaacactaccggattgccgctccaggacctggtgttcggcgcttcggtctattttcctcctgtctttaaagccgttctgctgggcttctttatctggttggtcgttcatcgtcagctgcgggactggatgtacgcaggtgaaatctggcaccccctgctcatggatctctccttctttgcgctctccgtttgtctggcgctggttttactgactatctggtaa

SEQ ID NO: 174428 - DNA, 897 bp, Klebsiella oxytoca
atgaagaaactaaaatatttatccacgctgctggtcgccgcgctggccattattgccgcctggctggtctggaattactacacgcagtccccgtggacccgcgacgggaaagtccgggccgagcaggtaggcgtcacgccgcaggtgtccgggagcatcctgcagctcaacgtacgcgataaccagctggttaaggccggtgaagtgctgttcagaattgatgatacgccttataaaattgcgctgctcaacgcccaggcccagctcgacaaggctcgagctgaagttgcccgcgcgcaggctgaacagaaaaaagccgccagcgatgccgctcgccgacgccatctctccgagaatttcatctccgcagaagatttagaaaacgccaatactgcgcttaataccgctaatactaacctggcagcggctaaggccgtcgtgggagccgccctggccaccctcgatcatgcccaatggcagctcgcgcagaccgaaattaaggccccggttgacggctgggtaacgaacctttcgacccgcattggcgactacgcaaccgtaggccatccgctttttgccctcgtcgacagccactccttttacgtgatcggttattttgaagaaactaaactgcgtaatatccgtcccggcgatagcgcgcagatcgtcctctatagcagcaaacaaaagttacagggtcacgtaggcagtatcggacgcgctattgtcgatcagagcgtagagagcggaagtggtctggtagcgaatattaaaccgaatattccctgggtacgccttgcccagcgcgtgccggtgcgcattgagtttgaccatctgccgccggatatcacgttggtctccggtaccacctgcaccgttgccattggcgcgcagtaa

SEQ ID NO: 174429 - DNA, 2025 bp, Klebsiella oxytoca
atgaagctacaggccctgacgtggcgctctcttccctggattaaggccagccgtccgcagtggcgctatgccctgcgtaacgggattgccatgtgcctggcgttgagcgtcgcctactggctgaatcttgacgaaccctactgggcgatgacttccgccgcggtagtcagctttcccaccgtcggcggcgtgatcagcaaaagctttggccgtattgccggcagcctgctcggcgcctgcgcggcgctgctgctggccggccatacgctcaacgatccgtggctatttctttttagtatatcggcgtggatagctctctgtacctgggcctgcgcgatgttcaccaataacgtcgcctatgcattccagcttgcgggctacacctgcgcgattatcgctttcccggttatcaatattaccgatgctaacgaactgtggactatcgcccagtcgcgcgtctgcgaggttatcgtcggtatattgtgcggcgggctaatgatgatgattttaccgagtacctccgacggcaccacgctactgagcgcgctaaaaaatatgcatgcccgcctgctggaacacgccagtctgctgtgggtcccggaaacaaccgatgctatccgcgccgcgcacgagagcgtgattgggcaaatcctgaccatgaatctgctgcgcattcaggccttctggagccattatcgctttcgccggcaaaatccgctgctcaactacctgctacatcagcagctacgaatgaccagcgtcatttcgagcctgcggcggatgctgcttaactggcccgccgcgcccgctcgtactcgcgagattctggagtctttgctcagcgagttagcgctttcaaacgccgatgcttacagcgttgcccgcattatcgcgccgcttgcgccgcccgccgatgccgactaccgacacatcgccttctggaagcgcctgcgctatttttgtcgcctgtatctggagagcagccgctggctcaagcgcatcgaaaacgccaccgcgatcaccgaattcaacgtaccttccgcacccgcgctggcccgccataccgatcaggccgaagctctctggaacggagttcgcgctttttgcgcgctggtgatggtcggcgcatggggtataagcacccagtggcaggcctgcgctgcagcgcttactctggcggctatctgctgcgtgctctattcggtttcaccctcaccgtttaaatcattaacgcttttaatgcgtaccctgatcctgctttcgctctttagctttgtcgtgaaatttggcctgatggtgcagataaccgatttatggcagtttttgctatttctgtttcccctgctgaccaccatgcagttgctcaaacagcagatgccaaagctcgccggactgtgggggcagttgatcgtttttatgggctcatttatttcggtcaccaacccgccggtgtacgactacgcttcgtttcttaatgataatctgggaaaaatcattggggtaggacttgcctggctggctttcgccattatcagtccaggttcagacgcgcgtaaaagccgtcggcacatccgtgcgttacggcgtcactttgtcgaccagttgagtcgtcgtccgcagcatagtgaacatgaatttgagtcgctggtttatcatcacattagccagcttagcaacagtcaggatgcgctggcgcgccgctggctgctgcgctggggcgtcgtgttactcaattgttcccacgtggtgtggcaactacgcgactgggaaacgcgctccgacccgctctcgcaggtgcgcgatctgtgcattagcctgctgcgtgacgtgatgagcgagcgcggcgttcagcagcgccctctcgcttcaacgctgcaggaactgcagcgcatctgcgacgcgcttaatcgccaccaccagcccgccgccagagagctggcggcggttatctggcgactctggtgcgccctgtctcagctggaacaggcgccgatcgcaggaacgttgacggaaaggactacttga

SEQ ID NO: 174430 - DNA, 522 bp, Klebsiella oxytoca
atgcaacgatgtattctcgccatacttaccctggccgcctgtgcgggcgcgcaggcggccagcgaaagcgtcgatatcaatcttgtgaccagccagagcgttggtcaggccatcggtagcgtgaaaattagtgaaaccgcgaaaggtctcgagtttactccggacctgaaagcgctacctcccggcgagcacggcttccatattcacgccaacggtagctgccagccggccatcaaagaaggtaaagccgtcgccgctggcgcagccggcggacattacgatccgcaaaacaccggaaagcatgaaggtcctgacggcgccggtcatctcggcgatctgccgttcctggtggttaataacgacggaaaagccacccagccggtggtcgcgccgcgtttaaaaaccctcgatgaagtgaaaggcaaggcgctgatgattcacgtggggggcgataatatgtccgacagcccgcagcctctcggcggtggcggcgagcgcttcgcctgcggcgtcatcaagtag

SEQ ID NO: 174431 - DNA, 897 bp, Klebsiella oxytoca
atggttcagcgtattgctatggctccccaggggccggaattctctcgtttcgtgatgggctactggcgtctgatggactggaatatgtccgctcaggcgctggtgggctttgtggagcaacacctggatctgggcatcaccaccatcgatcatgccgacatttacggcgactatcgctgtgaggcggcgtttggcgaagcgctaaagctggcgccccatctgcgcaaccggatggagatcgtcaccaaatgcggaattgccacgaaagcgcgggcagaaaataccatcggccactatattaccgatcgcgaccatattgtgctgagcgcggagcagtcgctgcgtaatctggcgaccgaccatctggacctgctgctgattcatcgcccggacccgctgatggatgctgacgaagtggctgaggccttcctggctttacatcatagcggcaaggttcgccacttcggcgtgtcgaactttacccccgcccagtttaccctgctgcagtcgcgcctgccgtttaccctggcgactaatcaggtggaaatttccccggttcaccagccgctgctgcttgacggtacgctcgatcagcttcagcagctgcgtatccgaccgatggcctggtcctgcctcggcggcggtcgtttgtttaacgacgaaagcttccagccgctgcgcgatgagctggcccgcgtcgctcaggagctcaatgcggaaagcattgagcaggtggtgtacgcctggatcctgcgtctgccgtcgcagccgctgccaattatcggttcaggaaaaattgagcgcgtgcgctcggcggttgtcgctgaaaagctaaatatgagccgtcagcagtggttccgcattcgcaaagcggccttaggctacgacgttccgtaa

SEQ ID NO: 174432 - DNA, 333 bp, Klebsiella oxytoca
atgctgcctggcgcagagggcgacgaacaaaatttgcgtacggcggatgaaacgtcttcaataaagacagagatgagcggctggagaggcgaagtggctgaacaactggagttcttcccggtacagagtccctgccgggggatttgtcagtctgatgaacgcggctactgccgggggtgcatgcgtagccgcgatgagcgtttcaactggcagaaaatgagcgatgcgcaaaagcaggatgttctgcgtctgtgtcgccagcggctgctgcgtaaattacgcgcagctaagcaggatagtgcggaagaaccgcagcaaccctcactgttttaa

SEQ ID NO: 174433 - DNA, 600 bp, Klebsiella oxytoca
atgaacaaacacagtgaatgcaatacccgcgaacatatcctggccaccggcgagcagctttgtatgcatcggggttttaccggtatggggctgagtgaactgctaaaaacagcggaagtgccgaaaggttctttctatcactattttcgctctaaagaagcctttggcgtagcgctgctcgaccatcactacgccggatatcttcagcgcctggttgagcattttgcccacggcgagggaaactatcgcgaccgccttttggcctactatcagcatacgctgacccagttttgccagcagggcatcattagcggctgcctgacggtgaagctgtcggcagaggtctgcgatctgtcggaagatatgcgcaccgcgatggataaaggggccagtcagatcattaccctgctgggcgatgcgctggagcaaggtcgtcaggaaggtagcctgacgtttgacggtgacgcattaacgctctcgcaggtgctttactctctgtggctgggggcgaatctgcaggccaagattacgcacagcgcaacgccgctggaaagcgccctggcccacgcaaaaaaaattattgctgcgcctgccctataa

SEQ ID NO: 174434 - DNA, 1098 bp, Klebsiella oxytoca
atgtcagaatcaaagttgtttaccccgttgaaagtaggtgcggtaaccgtgccgaatcgcgtgtttatggctccgctaacgcgtctgcgcagtattgagccgggggatattcccaccccgctgatgggcgaatactaccgccagcgcgccagctccggcctgattatttccgaagcgacccagatttccgctcaggctaaaggctacgcgggtgcgccagggctgcacagtccggaacagattgccgcatggaaaaagatcaccgccggcgtccacgctgaaaacgggcgtattgccgtccagctgtggcataccgggcgtatttcgcacagcagcatccagcccggcggcgccgccccggttgcgccatcggccatcagcgcgggcacccggacttcgctgcgcgacgaaaacggccatgccattcgcgttgacacctcgatgccgcgcgcgctcgaaacccacgagatcccagggatcgttgatgatttccgtcaggcggtaggtaacgcccgcgatgccggattcgatcttgtcgaactgcactccgcccacggttacctgctgcaccagttcctttccccttctgccaaccatcgtactgaccagtacggcggcagcgtggaaaatcgcgctcgcctggtgctggaagtggttgatgcggtgagtaaagagtggagcgccgaccgtatcggtattcgcgtctcgcccatcggcagtttccagaacgtcgataatggcccgaatgaagaagccgacgcgctctatctgatcgaagagctggcgaaacgcggtattgcctacctgcacatgtccgaaccggactgggctggcggccaaccgtacagcgatgagttccgccagaaagtgcgcgaccgtttcccgggcgctattatcggcgcgggcgcctacacggttgaaaaggccaacgatctgatcggtaaagggctgatcgatgccgtggcctttggtcgcgactacattgctaacccggacctggtggcgcgcctgcagaaaaaggccgctctgaacccacagcggccggaaagcttctacggcggcggcgcggaaggttataccgattaccctaccctgtaa

SEQ ID NO: 174435 - DNA, 408 bp, Klebsiella oxytoca
atgcgcttacttcacaccatgctgcgcgttggcgacctgcaacgttctattgagttttacaccaatgtgctgggcatgaaactgctgcgcaccagcgaaaacactgaatataaatactcgctggcattcgtgggttacggcgaagaaagcgataccgccgtgattgagctgacctacaactggggcgtggataagtacgatctcggtaacgcgtatggtcatattgcgctgagcgttgaaaacgcggcggaagcctgcgaacgtattcgtcagaacggcggcaacgtgacccgtgaagccggcccggttaaaggcggtacgacggtcatcgccttcgtcgaagatccggatggttataaaatcgagctgattgaagagaaagacgccggtaaaggcctcggcaactaa

SEQ ID NO: 174436 - DNA, 645 bp, Klebsiella oxytoca
atgtccgagaacgctcaactgaatggtctgtgcgaccgttttcgcggtttttatccagtggtaattgatgttgagactgccggatttaatgccaaaaccgacgccctgctggagatcgccgctattacgctgaaaatggacgaagaaggctggctaatgccggacgaaacgctgcattttcatgttgaaccttttgagggcgcaaacctgcagcccgaagctctggcttttaacggtattaaccccaacgatcccgagcgcggcgcggtgagcgaatacgatgcgctgcacgcgatttttaaaatgatccgcaagggcatgaaagagagcgactgcagccgcgctattatggtcgcgcataacgccaccttcgaccatagctttaccatggcggcggcagaacgtgcggggctgaaacgtaatccattccatccgttcgtcaccttcgataccgcggccctgagcggtcttgcgcttggccaaacggtattgtcgaaagcctgtatcgccgccggaatggcatttgacgggactcaggcccactctgcgctttacgataccgaacaaacggcgcagctattctgcgaaatcgtcaaccgctggaagcgtcttggcggctggcccttacccgtggccgaagaataa

SEQ ID NO: 174437 - DNA, 348 bp, Klebsiella oxytoca
atgagcacgactttagaaaaaatccaacgtcaaatcgctgaaaacccgatcctgctgtatatgaaagggtctccgaagctgccaagctgcggtttctccgctcaggccgttcaggcgctctctgcctgtggcgaacgttttgcctacgtcgatatcctgcaaaacccggacatccgcgcggagctgcctaaatacgctaactggccaaccttcccgcagctgtgggtagacggtgagctggtcggcggctgtgacatcgtgattgaaatgtatcagcgcggcgaactgcagcagctgatcaaagaaacggccgctaagtacaaaactgacgagccgaaagcagagtaa

SEQ ID NO: 174438 - DNA, 855 bp, Klebsiella oxytoca
gtggcgcgtcttaacaaaatcgcgatttcgctctgtgcattacttttcacatctatttcacttacgccgctggcgcatgcttccgggcatacgcacgcttcggccacgcccaaagcgcatccggctaaaggcactaccgcagagcgtaagaaaaaagcagccagttccaaaagcaaaaccaccgccaaaacctccagcaaaaaaacaccgaccgccagccgcagcaaaacaaccgcttcacgccagaccgccagcgccaccaaaaaatgcgtcctgcgcaagggctacaaaaagctgtgcgccagctcgacaaggtcgattgcggaaagcaagctggccgcggcgagcctgcagaaaaagtgcgtggcgcgtaaaggctataaaacccgctgcaaacccattgccgacgagccgcagctgactatcgccgatgcgcataaagcgcgggtacaaaaagcgcaaagcaccgcgatgtcaaagttgatggatcagattggcaaaccttatcgctggggcgggacctctccgcgcaccggatttgattgcagtggtctggtctattacgcctataaagacctggttaaaattcatattccgcgcactgccaatgagatgtatcacctgcgcgacgctcgtccagtggatcgcggcgagctgcaaagcggggatctcgtcttcttccgcacccgcgggcgcgggacggcagatcacgtcggggtatacgtcggcaacggcaagtttatccagtctccgcgcaccggtcgcgatatacagattacctctttaagcgacgattactgggtacgccactacgtcggcgcgcgtcgcgttatgacgccgaaaaccattcgctaa

SEQ ID NO: 174439 - DNA, 582 bp, Klebsiella oxytoca
atgtcgttcgaattacctgcattaccatatgcaaaagacgccctggcgccgcatatttcagcggaaaccctggaataccactacggtaagcaccaccaggcctatgtgactaaccttaacaacctgatcaaaggcaccgcgtttgaaggcaaaaccctggaagagatcgtgcgttcttccgatggcggcgtcttcaacaacgccgcgcaggtctggaaccacaccttctactggaactgcctggcgccaaacgccggtggcgaaccggaaggcgaactggcggcggctatcgctaaatccttcggcagcttcgcggatttcaaggccaaattcaccgacgcggcggcaaaaaatttcggcgcaggctggacctggctggtgaaaaatgccgacggtagcctggccatcgtctctaccagcaacgccggtacgccgctgaccagcgacgctaccccgctgctgaccgtggatgtctgggaacatgcgtattacatcgactaccgtaacgcccgtccgaactatctggaacacttctgggcgctggtaaactggaagtttgttgccgctaatctggcagcataa

SEQ ID NO: 174440 - DNA, 1167 bp, Klebsiella oxytoca
atgaaaatcaactttcccctgctcgcgctggcgatcggcgcctttggtatcggcacgaccgagttctccccgatgggactattaccggttattgctaaaggcgtggatgtgtctattccggcggcgggaatgctcattagcgcttatgccatcggcgtgatggtcggtgcgccgttaatgaccctgctgctctcccaccgcgcgcgcagaaatgcgctaatctttctgatggccatttttaccctcggtaatgtgctctcttcaattgccccggattacactacgctgctgctgtcgcgcattattaccagcctcaaccacggcgccttcttcggtctcggctcggtggtggcggcgagcgtggtgcctaaacataagcaggccagcgcggtagcaacgatgtttatggggctgacgatcgccaatatcggcggcgttcctgcggcaacctggctgggcgaaactatcggctggcgaatgtcgtttctggcaacggcggggctgggcgttgtagcgatgatcggcctgtggctgtcgctaccgaagggcagcgccggcgaacgtccggacgtgaagcaggaacttgcggtgctgatgcgtccgcaggtgctgtcggcgctattgaccaccgtgttgggcgccggggcgatgttcacgctttatacctatatctccccggttctgcataccatcacccacgcttcaccgctgtttgtgaccgccatgctggtgctgattggcgtcggtttctcgctgggtaactatctcggcggtaagtttgccgaccgttccgttaccgcaacgctgaagggctttcttctgctgctgatggtcattatgctggcgatcccgctgctggctcagtcgcaggtgggagcggcgataagtatggttgtctggggggcggcgacgtttgcggtggtaccgcctttgcagatgcgcgtgatgcgcgtcgctcatgaggcgccggggctgtcttcatcggttaatatcggggccttcaatcttggtaacgcgctgggcgcggcggcgggcggcgcggttatatccggcggcctgggatatgcgttcgtaccggtgatgggagcgattatcgcgggcgtagcgctactgctggtgctgttcagcgggcgggcgcaaccggaagaggcgtttgctaaccattaa

SEQ ID NO: 174441 - DNA, 1026 bp, Klebsiella oxytoca
atggcaactattaaagatgtagcgaaacgcgcaaacgtttccactacaacagtatcacatgtaattaacaaaacccgattcgtagcggaagagacgcgcaatgcggtatgggcggccattaaggagctgcattactcccccagcgccgttgctcgcagcctgaaggtcaatcacaccaagtctattggtctgctggcgaccagcagcgaagcggcttatttcgccgagattatcgaagcagtcgagaaaaactgcttccagaagggctatacccttatcctcggcaacgcctggaacgacccggagaaacagcgcgcctatctgtcaatgatggcgcagaagcgcgttgatggcctgctggtgatgtgctccgagtatccggaatcagttttaagcatgctggaagagtatcgccacatcccgatggtggtcatggactggggcgaggcaaaagccgactttactgattcggtcgtcgataacgccttcgaaggcggctatattgccggacgctacctggttgaacgcggccaccgcgatatcggcgtgatcccaggcccactggagcgtaacaccggtgcgggccggctggcaggctttatgaaagccatggaagaagcgcagatcggcgttccggaaaactggattgtccagggcgattttgaaccggagtccggctatcgcgccatgcagcaaattctcaaccagcatcctcgcccgacggctattttctgcggcggcgatattatggccatgggcgccatctgcgcggcggatgaaatggggctgcgcgtgccgcaggatatttcgctgatcggttatgataacgtgcgcaacgcccgctacttcagcccggcgctgaccaccatccatcagcctaaagactctctgggcgaagcggcctttaatatgctgctggatcgcatcgtcaataagcgcgaagtctcgcagtcgattgaagtccatccgcgtctggtcgagcgccgctctgtggccgacggcccgtttgtcgattaccgccgttaa

SEQ ID NO: 174442 - DNA, 912 bp, Klebsiella oxytoca
atgtggtctgaatactcgcttgaagttgtcgatgctgtcgcccgcaacggcagctttagcgccgctgcgcaggaattgcaccgcgtcccttcggccgtcagctataccgtgcgtcagttggaagagtggctggcggtgccgctatttgaacgccgccatcgggatgtcgagctaacccctgccggcgtttggtttttgcaggaagggcgatctgttatcaaaaaaatgcagatcacccgccagcagtgtcagcagatagccaacggctggcgcggacagctctctatcgcggtggataatatcgttaagccaacgcgtatgcggcagatgatcgttgatttctatcgtcactttgatgacgttgagctgattgtttttcaggaggtgttcaacggcgtctgggatgcgctggccgacggtcgcgtggagctggcgatcggcgcaacgcgctcaattccggtcgggggccgctacgcctttcgtgatatgggaatgctgagctgggactgcgtcgtcgcaagccaccatccgctggccaaaatgacgggacctttaagcgatgacgtcctgcgcaactggccatcgctggtcagagaggatacttcacgctcgctgccgaagcggaccacctggctgctcgataaccagaagagggtggttgtgccggactgggatgcctctgaaacctgtctctccgcggggctgtgcgtcgggatggtgcccgggcatttagcaaagccgtggctcgatagcggtgaatggacggcgctggagctggagaacccattcccggatgctgcctgctgtctgacgtggcagcaaagcgatgcctctccggccctgttatggctgctggattatcttggcgatagcgaaacgctgaatcgggagtggctgcgggcgccggaataa

SEQ ID NO: 174443 - DNA, 1185 bp, Klebsiella oxytoca
atgcaacaacctgggaaaggatttttagtctggctggccggactcagcgttctgggctttctggccaccgatatgtacctgccggcttttgcggccatgcagcaagatctgcatacctcagcggcgtcgatcagcgccagcctgagtctgtttctcgcgggctttgcgctgggccagcttttctgggggcccatctccgatcgttacggccgtaaaccggtgctgttgagcggactggccatctttgccatcggctgtctgggcatgctttgggtccgcgatgctacgctgatgctggcgctgcgttttatccaggctctgggggtttgcgccgccgcggtgacctggcaggccatggtgaccgattattatcctgctcaaaaaaccaaccgcattttcgccgccattatgcccctggtgggattatcgcctgcgctggcgccgctgctcggcagctggttactggttcattttgaatggcaggctatttttgccgttctgttcgccattaccctgctgttaatgctgccagccctgcgcctgaaggcggcgaaaaaaaggatcgtcagcgcccagcagaagcttacgttcctcgccctgctgcgttcgcgggaatatagcggcaacgtgctgatctacgccgcctgttccgccagcttctttgcctggctgacggggtcgccgtttatccttcacgagatgggctacggcccgaccgttatcggcctgagctatgttccgcaaaccatcgcgtttctggtaggcggctacggctgccgggcggcgctgcaaaaatggcagggccagcaaattctgccgtggctgctggcgatcttcgccgtcagcgtggccgccacctggctggttggcctgcgggaaaatgcaaccctggtgggattaatgattccgttctgcgccatggcagtggtgaatggcggtatctatcctatcgtcgtcgcccaggcattgaagcccttccctgaggcgacaggccgcgccgcggcgttgcaaaacaccctgcagcttggcctctgttttttgaccagcctgctggtctccacgctgatcgccactccgctgctaacgaccaccagcgtgatgctggtctccatcgtgctggccggaatcggctaccgcatgcagcataaggccgcgcatctggaaacagaatcgtcacatgcttaa

SEQ ID NO: 174444 - DNA, 1149 bp, Klebsiella oxytoca
atgagttcatcgtgtatagaagaagtaagtgtaccaaatgatgactggtaccgaatcgcagctgaattattaagccgtgcgggcattgaaattaatggtcctgcgccctccgatttgcggattaaaaatcctcatttttttaaacgcgttttgcaggaagggtcgctgggtttaggcgagagctatatggacggctggtgggattgcgagcggctggatatatttttccataaagtattacgcgccggtctggaaaatcagcttccccatcatttcaaagataccctgcgtatcgccactgcacgcttattcaatctgcaaagtaaaaaacggtcctggattgtcgggaaagagcattacgatttaggcaacgatctgttcagccgcatgctcgatccctatatgcagtattcctgcgcttactggaaggatgcgcataatctggaagacgcacagcaggcaaaattagatctcatctgccgtaaacttcagcttgagccggggatgcgggtgctggatatcggctgcggctggggtggactggcctactatatggccaaaaattaccaggtcagcgttgtcggcgtcacgatttcagctgagcagcaaaaaatggcccagcagcgctgcgcaggtcttgacgttactatcctgctgcaggattaccgcgacctgcaagagagctttgaccgtatcgtctcagtcggcatgtttgaacatgtcgggccgaaaaattacgccacctacttcgacgtggtcgaccggaatttgaaacccgaaggccgcttcctgctgcatactatcggctcgaaaaaaaccgaccataacgtcgacccgtggatcgataaatatatcttccctaacggctgtttaccctcagtacgccagattgccgaagccagcgagccgcattttgttatggaagactggcataatttcggtgccgactacgacaccacgctaatggcctggtatgagcgctttctgaatagctggccggaaattgccgacaattattcggagcgcttcaaacgcatgtttagctattacctgaatgcctgcgccggcgctttccgcgcgcgcgatattcagctctggcaggtggttttttctcgcggtgccgaacacggcctgcgcgtagcccgctaa

SEQ ID NO: 174445 - DNA, 642 bp, Klebsiella oxytoca
atgtttaccggtattgtgcaggggaccgccagagtggtggccattgatgaaaaacccaactttcgcacccacgtcgtggagctgcctgagcatatgcttgcggggctcgaaaccggggcttcggtagctcataacggctgctgtttaaccgtcaccgatatcgatggcgcgcgagtgagttttgacctgatgaaagagaccttgcgcatcaccaatctgggcgcgctgcgcgagggcgacagcgttaacgtcgaacgagcggcaaaattcagcgatgaaattggcggccacctgatgtcaggccatattatgaccaccgcggaagtggttaaaattctgacgtcggaaaataatcgccaaatctggtttaaggttcaggacccgacgctgatgaaatatatcctttataaaggctatatcggcgtcgatggtattagcctcacggtaggggaagtgacgcccacccggttttgcgtgcatttgatcccggaaacgctgcagcgcaccacccttggcgtgaaaaagctgggggaccgggtaaatattgagatcgatccgcagactcaggccgttatcgataccgttgagcgcgttctggcggcaaaagaagcagcagtggccctgaaaaacgcggccgaataa

SEQ ID NO: 174446 - DNA, 1374 bp, Klebsiella oxytoca
gtgcagaagtattttattgaagcgcgtcagttattagcactggctatacccgttatactcgcccaggtcgcccaaaccgccatgggcttcgtcgataccgtgatggcgggcggctatagcgccaccgatatggcggccgtcgccatcggtacctccatctggctgccggcaatcctcttcggccacggcctgctgctggccctgacgcccgttattgctcaactgaatggttccggccgtcgcgaccgcatcgcccaccaggtacgccaggggttctggctggcgggcttcgtctcgatcctgatcatggtggtactatggaacgccggctacatcatcagctccatgcataacatcgacccggcgatggcggagaaggcggtcggctacctgcgggctctgctgtggggcgcgcccggctatctgttcttccaggtagcgcgtaaccagtgtgaaggcctggcaaaaaccaagccgggcatggtaatggggtttatcggtctgctggtcaacattccggtgaactacatctttatctacggtcactttggcatgcctgagctcggcgggatcggctgcggcgtggcgacggcttcggtgtactgggtgatgtttttctgcatgctctcctgggttcgccgcgcgcgttcgatgcgcgatattcataacgctgagcgcttcagcaaaccggatttcgccgttatccagcgtctggtgcagctgggcctgccgattgcgctggcgctgtttttcgaagtgaccctgtttgccgtcgtcgcgctgctggtctcaccgctgggcattgtcgacgtggccgggcaccagattgccctaaacttcagctcgctgatgttcgtattaccgctctccctggcggcggcggtgaccattcgcgtcggtttccgtctcgggcaaggctcgacgctggaggcgcaaacgtcggccagaaccggcgtcggggttggagtgtgtatggccgtgattacggcggttttcaccattctgatgcgtgagcaaatcgcgctgttgtataacgataatcctgaggttgtcgcgctggcgtcccagctgatgctgctcgcggcgatctaccagatctctgactccatacaggtgatcggcagcggcatcctgcgcggttataaagatacgcgttccatcttctttattacctttaccgcctactgggttctggggctgccgagcggctatctgctggctctgaccgatatcgtggtgccgcgcatgggtcctgctggcttctggtgtggatttatcattggcctcacctccgctgccgtaatgatgatgctgcgcatgcgtttcctgcagcgtcagccttccagcgtcatattgcagcgcgccgcgcgctaa

SEQ ID NO: 174447 - DNA, 201 bp, Klebsiella oxytoca
atgaaaatatggcagaacatcgtggtggttccggtaatttcgctgaagaccgtgataaagcatctgaagctggacgtaaaggcggtcagcacagcggtggcaattttaaaaacgatccgcaacgtgcatctgaggccggtaaaaaaggcggccaaaatagtcatggtggcggacgcaaatctgacaactcctgattattaa

SEQ ID NO: 174448 - DNA, 498 bp, Klebsiella oxytoca
atgaatatgaagagcatagaagacgtttttattcatctgttatcggatacttatagcgcggaaaaacaattaacccgcggcctggctaaactagcccgggcggcgtcaagcgagcagcttagcgccgcattcaaagcgcatctggaggagacccaggggcaaattgaacgtatcgatcaaattgtcgaacaagaagccaatattaaaattaagcgcatgaaatgcgtggcgatggaggggcttatagaagaagctaacgaggttattgagagcactgagaaaaatgaagtgcgcgatgccgcattaattgccgctgcgcaaaaagttgaacattatgaaattgccagctacggcactctcgccactttagcccaacagctgggttataaaaaagcggttaagcttttaacagaaacgttagaagaagagaagtcaaccgatctgaaattaactgacctggcggtcggcaatattaataaagaagcacaaaataaatag

SEQ ID NO: 174449 - DNA, 507 bp, Klebsiella oxytoca
atgaatcacgttgaacactatcacgactggctacgcgatgcgcatgcaatggaaaaacaagcagaatccatgctggagtcgatggctggccgtatcgataactaccccgatttgcgcagcagaattgaacagcacgtcaccgaaaccaagcgccaaattacggttctggaagagattctggatcgtaatgatatatcgcggtcggtgctgaaagattcaatgagtaaaatggccgcgttaggtcaatctattggcggcatgttcccttccgatgaaatcgttaagggttcaattagcggctatgttttcgaacagtttgaaatcgcgtgttatacctccctgcttgccgctgcgaaaagagccggtgacaccgcatctattcccgccatcgaatccattctggcggaagagcgggccatggctgactggctgctgaaacatatcccgcaaacaacggaagagttccttctgcgctctgacgcaaaaggcgttgaagctaaaaaataa

SEQ ID NO: 174450 - DNA, 873 bp, Klebsiella oxytoca
atgttccgacacgttaagcaacttcagtataccgtcagggtcgcggaacctaatccggggctggctaatctccttctggagcaattcggcggccctcagggcgaactcgccgccgcatgccgatatttcacacagggcctgagcgatgacgatccgggtcgcaaggatatgctgatggacattgccaccgaagagctgagccaccttgaaattatcggctcgctggtaggtatgctcaataaaggggcgaaaggcgccctggcggagggtacggaaaacgaagccgatctgtaccgctcgcttaccgctaacggcaacgacagccatattacctctttgttatatggcggaggcacgccgctgaccaactccgccggcgtgccctggaccgcagcatacattgacaccattggtgaacccaccgcggatttacgctccaacgtggccgccgaggcgcgcgctaaaatcatctatgagcgcctgataaacgtcaccgatgaccccggcgtgaaggatgcgctggcctttctgatgacccgagaagccgcccatcagctctcttttgagaaggcgcttcaatccatcagaaacaactatccaccgggcaaactaccgccaatcactgactacgccagcacctactacaatatgtcagagggcgatgacattcgcggcagctggaatagcgatctgcacttcgagtatgttgcgaatccgcagcctgcagtagatggcggagatggcggtgccagcgttaagctaacggccgaacaaaaggccctggtgaaaaccatggcgaaacgcacccaatccgacccggaaggcgatcctctcaccggcgcagaacttggcgcgggtaagaaaaagccgtaa

SEQ ID NO: 174451 - DNA, 1404 bp, Klebsiella oxytoca
atgtttgaactcgatgcgtttaatctggcaaggctacagttcgcatttaccgtctcttttcatatcctgtttccggcgattaccatcggactggccagctatctggtggtgctggaggggatgtggctgcggacaaaagatgacgtctggcgctcgttatataatttctggctgaagatttttgccgttaatttcggcatgggcgtggtatcaggcctggtgatggcctatcagttcggtaccaactggagcggtttctctcagtttgccgggagtattaccggtcccctgctgctgtatgaagtcctcaccgcgtttttcctcgaagcgggcttcctgggcgtcatgctttttggctggaacaaagtccccccaggactgcattttttcaccacctgcatggtggcgctcggcacgctaatgtccaccttctggatcctcgcctccaatagctggatgcagacgccgcagggctttaccattgaaaacggtcacgtcattccccaggactggctggcgattattttcaacccatctttcccgtatcgcctgttacacatggcgatcgccgcttttctcagcagtgcgatgttcgtgggcgcctctgccgcctggcaccttctgcgcgggaacaatacccctgccatacgtaaaatgttctccatggcgatgtggatggccctgctggttgcgccaattcaggccttcgttggcgatatgcacggcctcaatacccttgagcatcagccggcaaaaatcgccgccatagaaggccactgggagaataaacccggcgaggccaccccgctgctgttgtttggcataccggatatggaggaagagcgtaccaaatacgggctggaaattccggcgcttggcagcctgatcctgacccatagcctggataagcaggtcccggcgctgaaagattttccgaaagagaatcggccaaactccctcatcgttttctggtcgttccgtatcatggtgggtatgggcgtgctgatgattgccctcggcttctggagcctgtggcttcgctatcagcaacgtcttttccactctcgcgccttccagtggagcgccctggcgatggggccggcaggactgctggcgctgttggccggctggatcacgaccgaagcgggacgtcagccctgggtcatttatggttttttacgcacccaggatgcggtttcgctgcacagcacggcgcaaatggtcgtcagcctgctggtctttatcgtggtgtactgttcggtctttggcgtcggttattactacattgtccggcttattaagaaagggccgcagcccgtcagcgaattgacatcgtcaacgtccggcacgccggctcgccccctttctgccgcagaagccgtgcctgaagaggagactcgctaa

SEQ ID NO: 174452 - DNA, 1011 bp, Klebsiella oxytoca
atgggcatcgatatccccgttatctggtttgtcatcattgtattcgccacattgatgtatatcgttatggacggcttcgatcttggcatcggaattttattcggctttgtaccgaatgctcaagaacgcgacgtgatgatgaatagcgtcgccccggtgtgggatggcaatgagacatggctggtgctgggcggcgcggggctatttggcgcctttcccctggcctacgccgttatcaccgatgcgctggctatcccgctcaccgccatgctcattggcctgatcttccgcggcgtcgcctttgagttccgcttcaaggccaccccctcgcatcaaaagttctgggactactcttttgtcagcggctccctgctggcgacctttagccaggggatggtggtaggcgcggtcatcaacggttttgaggtcgccgaccgcaggtttgccggctcggcgctcgactggctgacgccctttagcctgttctgcggcttagggctggtcgtcgcgtatatgctgcttggtacgacctggctgattatgaaaagcgaaggcgccctacaacagcgcatgcgtgagctgactcgccacacgcttctggcgctgatggcggtcatcgccgttgtgagcgtctggacgccgctgggctggccctccgtggctgagcgctggtttaccctgcctaatttctactggtttgtacccgttcctgtactggtcattgccttaagcctgtggatctggcggttaagcgcccatcctggtagccatgcccgccctttcctgcttacgcttgggctcatttttcttggctttagtggtctgggtatcagtctctggcccaacatcatccctccgcatattacgctgtgggaagcctccgcgccgcccgccagccagctctttatgctggtagggaccctgctcatcattccggtgattttggtttacaccgcatggagctactacgtattccgcggcaaagtttccggcactgaaggctatcactga

SEQ ID NO: 174453 - DNA, 1626 bp, Klebsiella oxytoca
atggcggactggcatacgcgagccatcatttatcagattgattcagccctgttttacgatctcaacggcgatggctgcggcgatatcgccggaatgacggcgaagctgcgctatattcgccgaatgggcgcgacggtgatctggataacgcccttctacctgacgccttttctggatgagggttacgatgtcagcgatcatctgcaggtcgatccgcgctttggacaactggcggatatcattgcctttatcgagcaggcccgtgaactggggatgcaggtcattattgaattgctgattcaacatacctctgacgcgcacccctggtttcaacaagcgcgccgcagtcgacgctcgccgtttcgcgactattacctgtggtcagacaacgatgatgatgatacgccgccgatgttccccggcgtcgaagagagcatctggtcctgggatgctgaggccgggcaatattatcggcatatgttttatcgtcatgaaccggatctcaacctggcctcgccagcggtcatcaaagaggtcgaaaatatcgtcattttttggctaaagctgggggtgtccggctttcgcctcgatgcggcctcacatctgactaagcaggccggacgcggcgaggagaaacgcgggctgtggcttctcgaacatctacgccgcctgattgaacggcacaacccgcaggccatactgatcggcgaagtcgacgttgaggtggcggagtatcgcgactattttggcgataataatcgacttaatatggtgcttaacttctggttgaacaaaaatttttacgtcagtctcgcgagtaagaacacccgtccgctgatcgacgccatcacgaaaaccatcgtgccgcccgacgcctgctgcttcgccaactggctacgtaatcacgatgaactggatcttgaaggggtaggccgcaagaaaaagcaaaccgtgatggatgccttcgccccggataaggagatgaacgtttaccagcgcggtatccgccgtcggctggcccccatgctgaacggcgatcggcggcggctggcgctctgtcatgccgtactcttttcgctccccggcgtaccgataatgcgctacggggatgaaattgggatgggtgacaatctggccctggaagagcgctacgcggtgcgcacgccgatgcaatgggccggctcagcgggcggcggtttctccgcagccgatcctgctactttcgtcgctccattgatcgataaggggccgtttcgctatcagaaggtcaacgtcgctgattcgctgctacaccgccattcccttctacatcgcattatagatatcgccaatacgcggtgcgagtttccggaaatcgccgttgcgccttttcgcattatcggcatcgatcggcaggcgattctggggatttgctacgatgccgaccaacgccgcgtcatcacctttcttaatttcagcgacaagcgcgtgcgcttcaccgcgaaagagattgccgagggcgtctggacgccctgcctggccgacaaaacctatgctgacgaccttgttgcgggtaagcgcgttgagctggagattggcgcctatggctaccgatggttctggaccaacagtagcgcgctgcgttag

SEQ ID NO: 174454 - DNA, 990 bp, Klebsiella oxytoca
atggcggtcatgacgatcaccggcggtaccgcgggcgtcggcaaagcaacggctgttcgctttgcgcgggcaggctatgacgtggggattatcgcccgcgatcgtcaaagccttgaagcgacgcagcaggcgctgcggcagtttggcgttcgggtgcatgtcgttcaggccgatgtcgctgatgcggatgcgattaacactgccgcctgcgagatcgaaaagcaattaggggctatcgaggtgtgggtcaataacgccatgtgcgcggtgctggcgcctttcaggacgatgacccacgatgaattttcgcgggtcaccgaagtcacctatcttggttacgtcaacggcacccgcgccgcgctggagctaatgacgccccgcgatcgcggcatcattatccaggtcggttccgcgctggcctatcgctccattccgctacagtccgcctactgcggggcgaaggccgcgattcggggctttaccgatgcggttcgcacggaactgatgcatgaaaagagcggcgtgagtatctcaatggtacagatgcctggcctgaatacgccgcagtttgagtgggcgcgcaataagtttgcctgggcgatgcgcccggtgccccccgtctatcagccggaggtggccgcagaggctatcttcaacgttgcacgcaggcccgtgcgtgaactctgggtggggagcagcacaatccagtctatcgttgggcaatttctcttccccggcttcctcgatcgactgatggttaataaagcatgggaagggcaaatgacccggcacaggaatgtcgctgaccggcaggattatctacaacagccggtcagcagactgcataaaacccacgggcgtttttcctcagaggcgaagtatcgcgccgccgccatcacctccggcgtgccgggaaaagcgctgctcggcggcgcggcagcggcgggatggttgttggcaaaatggtttatctcgcgtaaaaaacgctaa

SEQ ID NO: 174455 - DNA, 519 bp, Klebsiella oxytoca
atggcgaataatccttataaccaggcgaaaaccaccggtgagctgaccaaacaagtcgccatcgcattgaccgaccgtcgtttacgcttaaccaccgctgagtcgtgtaccgggggaagcctggcggcagcgctgtgcgcggaggaggatacggctgcgttttacgatattggtttaatcacctttagcgaccgtgcgaagcaaaaacttctcggcgttaaggcttcgacgctggaaaagtatagcgccgtcagtcgacaggccgtggaagagatgtcggcgggcgcgctggagtgttctggagcggatatcagcatcgcgataagcggatacgctgggccggacggcggcgaggacgggacgcctgcgggaaccgtctggttcgcatggaattttcgcggcgcaatcgacgcgcagaaggtgctgttttccggcggctgccaggatgtcgttgagaaatccgtacgctactcgctggcgatgctgatggagaaactgcccggctggcagggcgaataa

SEQ ID NO: 174456 - DNA, 447 bp, Klebsiella oxytoca
atggagatggtgttgcgggcgctggccatttatttaattttgctggtggtttttaaaatcgccggacgccgggcgctattacaaatgaccagctttgatctgattttattacttatcatcagcgaagcgacacaacaggcgctgctggggaacgacttttcggttaccggcgccatgctgacgattatcacgctggtggtggtggatatgctctttggcttaatgaaaaaatatatggctggcgccgagtcagcgcttgatggctgcccggtaattttagtcgaaaacggcgttccgttaattgataaactcaaaaaagtggatgtctcctgcgatgatattcttgtggccgcacggcagaatcagggtattacggaattaagtaaaatcaaatatgccatactggaaaggaacggacatatttctattattcctgctgaaagttaa

SEQ ID NO: 174457 - DNA, 504 bp, Klebsiella oxytoca
atggtcagtgaaaaagagaagctgcccgggataaaagaaagtgaactttttcttaattttgaatgtgctgctcgtaagatcgggctggggatattattattaatcatcttcgcagcgctggcggggattttttccaccggctatttgagccgtgctgaaaaaacaaatgcccagcaaaatttaaccgtggtttatgagcgttttggccgtttgcaaactgagttgcgactaaaaattactgcccattcgcgcgtcgccaataaatatgtttttagccttggcggtgattttacttcatcgctcgaaaccaatactatctggccccagccagatagtatgtacagtaaggacgatcggctctttttggtttataataatttgaaaagtatggaaaacttttccatatggctctacgttacgcccaccgctcccggcaagctgaaccacgttttacagcttaatagcgaacccgaaattcgcttctggcaatttatttatccttag

SEQ ID NO: 174458 - DNA, 999 bp, Klebsiella oxytoca
atggcaaccataaaagacgtagcagaaaaagcaggtctgtcggtgacgacggtctcccgcttcctgaacaatcatccttatatcgctgaagataaaaaggaaaaaattcttgcggcgatgaaagagctcgattacgagccaagcaccgtcgcgcagcagatgcgcggcgtgaaaacccaccgcattggcgtactcatttcgaggatcactaacccatttttcgccagcctggtggacgctctcgaagtcaccgcgcgtaaacacggctactcagtgctgatcgttcagaaccacaatagcgcgggcgaagaggagaactgtctcgatctgctgaagaaaaagatcatcgacggccttatcttgtgcgccgtcgaaagtgataaggatgtgatcgagcaatatcagaaatatggcccgatcctgctgtgcaacaccagcctcgataacacgactctgcccgtggtcagaatggacgatgaactggcgacctatcgcgccgtcagttggctgctgcataaagggtatagaagaatcgcctactctaccggcggcgcattccagcaaaagggccacggtagcagaaggaaccgcggctttattgccgccatgcagcaggggcagcagccgattgacgagcggctggttttccgccacgtccacacctggcgcgacgggcagcgtctggctgagcagatcctacagatggctaaaagcgaacgtcccgatgcaattttcgccggcagcgatgaagtcgcctgcggcttaatttctgcgctctcggccaacggcgtcagcgttcccggcgaactggcggtcatgggctttgataaccttccggtggcggagatggtgcatattccgctcactaccgttagccaacccatcgagcaactgggccgcatctcggtagaacgtctgctggccctgatcaacaacacgcactatcgctatgacgaggaagacctgaaatcggaactggtcatcagggcctcggcgtaa

SEQ ID NO: 174459 - DNA, 1665 bp, Klebsiella oxytoca
atgaatcagtcacaacaaggggcatggtggaaggaagcggtcatttatcaggtgtacccaaaaagcttctatgacagcaataacgatggcactggcgatatccaggggataatcgcgaaactgccgtatctgaaaacgctgggcatcaccatgatttgggtctcgccgttctacctctcgccgggtgcggacaacggctacgatatcgccgactactatgcagtaaaccccgatttaggtcagctgcaggatgttgacgacctgattaagcaggcaggcgaactggggattgggatcatggtggatctggtggttaatcataccagcgatgaacaccgctggttccaggccgcactggcggaccctgcctcaaaataccgtgattactatatctttaagcccgccgttgctggtgccgcgcctaataactggcgttcgatttttggcggcagcgcgtgggaaaaagtggctggcgaagagtgctactatttgcacgtttttcataaaaaacagcccgacctgaactgggaaaacccgcagctgcgccaggaaatctacgccatgattaactggtggctggataaaggcatcgccggttttcgcatcgatgcgattacgtttattaaaaaagatcaggattacgcctccctgcccgccgacggcgtcgatggactggcctccattaaaacgaaatcgcgcaaccgtccgggaattgaatgttttctgaacgagctgaaagaacacaccttcaaccgccatcgttgcgtgacggtgggcgaagcgcccggcgtgcctctgcaggagtacgacagctatatcgggccggacggctatttcaatatgatcttcgattttcacgctgccgatatcgatgtcgagaacggctcggagtggtttaagcagcgcaactggcgcgtgagcgaattcaaagaagcgctttttgccagccagcgcgctttttgtcaggccggctgggggacgacgtttattgaaaaccacgaccagccccgcgcgctgtccaaactcatccgcgacgcggattaccaaaatgacatcggtgccaaagcgctggccgcgatgtacttctttatggccggaacgccgtttatttaccagggccaggagctggggatgaaaaatttctgccggcagtcaattgcggaatttgacgatatttccagtctggataactatcaccgctccctggcggaaggtttctctgaacagcaggcgttaggctttattaatcagcgctcccgggacaactcgcgaacgcccttcccgtggtcgaatagcgtcaacggcggatttaatcagggtgcgcagccctggctggcgttttcttcaaccgactttagcgtcaatgcgcaaagccagataaacgatgcgcattcggtgttcgcgttttaccagaagatgatcgccttgcggaataagcactatccgcaagcgctgatttatgggtcattcgccgccgtggaggacgttgacgagcgtatcgttgcctaccagcgcgcaacacacaacgaacgttttatctctatcaccaacttaagcgcgcagcatctgccttacacgctcccggcaggagagattgtactcaataattatgccgacgccgacgccaccctgaaaccttatcaaaccattctcgttaaggaatga

SEQ ID NO: 174460 - DNA, 1398 bp, Klebsiella oxytoca
atgaacaaatataaaaatatcgccgttgagatagtgaataccatcggcaaggaaaacattgcttccgccacccactgcgccacccgattacgtttgcaggtaaaagaccggcagaaaatcgatgatgataaagtccgtaatatcagcgaagttaaaggcgtatttttcaattccggtcagtatcagataatcctcggtaccgggatcgtcaataaggtttatcaggagtttgttaacgaatatcaggttgccgaagtcagtaaggatgaaatgacgaagcagagttcgggccgattacagcggggaatacgcaacttatcggacgtttttgtgccaattgtcccggttctcggggcgaccggtctgtttctcggtctgaaaggggtcatttttaatgataccgtgcaggcgtggtttggcagcagcgtccatcaggttccggcggccctgcaaacgctgaccacggtactctgcgataccgctttcgccttcctggcggcgtttatctgctggtcagcctttaagaagtttggcggtacgccgattatcggttttttaatcggcctgatgctggtttccccggcgctgccgaacgcctatgacgtggcgtacggcaatagcagcccgatttatgtgtttggcgttattccgctggtgggctatcaggggtcaattttgaccgcactcatcaccggtattatcggcgcaaaactggaaatctttttccgccgggtgatgcccaactcgatggacctgattttcacgccgtttatcgtcattctgattgctgtggccatcgctttactgattttaggtccgctggtacatgggtttgaacactacgccgtgatggctattcagcaatttttgacgctgcctgcgggtattggcggcctgttaatcggctttatctatcccattgccgtaatgaccggaatgcatcacatgtttattatgattgaaacctcgctgattgccggcaccgggtttaatccactcattacggtttgcgcgatgtacggttttgccaacgccgccgtatgtctggctatttcactgaaggcgaaaaatatcgcgtttaaaaccgccggaatttccgcgaccattactcagctattaggcgtctcggaaccggctttattcggtatcgtgatgcaatccgggcttcgggcgataatggtgatgctcatcagctcggcgctgggcggcatgattctgtcgctgctgtcgataaaagcgaactcatacggtctggcggtcctgctgtcgccgctaatgtatctctacgatcgctatcagtttgtcacctatattaccgtgggactcgcggtgtttatttttgcttttattattacattcctttttgtcaaaactgctaacacccgcaaagagagctga

SEQ ID NO: 174461 - DNA, 1575 bp, Klebsiella oxytoca
atgatgaaagcctatatgcttacgctctgcgcgctggctttgccagcatccgccgctgcggcggataccaccctgaatgaaattaatgcccggcttgaaagacttgaggccgaattaaagcagtcgcgcatccagttacaggatgcgacgcggaaaatagatcgcgcggaaaaaagagcggccagcgccgaacaaaacgcggcgcgcgcgcaagaaagactgcaggccgttgagcacagaaccgaccaggatctggcgttaataaaaaaccagccggcgcagaatgtcgtcgcgcaggcgaagcttcaggaaatcaccttcggcggctacgcgcgcagcggcatattaacaagcaagggcgcaaccagtaccgtcgggccttccctgacgcctgcgggcagcaccggggggagcgtcggtcgccttggcaatgagtcggatacctatgtgaccgccgatattaactaccggcgaaaatatgataacaatagccagctgcgttattacatgaaaatcgccgagtgggataaaacctataataccgacagttcctttaacggccagatgaacgtccgtcaggcttttgtcgaaatgagcgatatgcccgcgtttagcggcgcgtttaaacaggcgacgctgtgggccggtaagcgggaagatcgggataacttcgatattcactggcttgattccgatatgatgaatttaatcggtaccggcgccggtatttatgatgttaatttctggggagatatcaagaccaacctcgcggtatatggccgtaatttcaacgatatcgatacgatggacaacgttgaatataacaacatgaccggcgcggataacacgtatattcaaaactataccttctcgctgaatcaccgtttggcgaactggcagtggatgctcaacggcctctactcgcaggacaacgacaaacgcataaacgatggtctggcgtcggataaagcggcctcgcaagggtttaacaccatgctggcgtaccacggcgacagcttctacggcctgcgccccggcagtacgaaaaccgcgctgctttatggccgcgcgctgggagctgaagttcgcggcccgggctccgacggttatttgattcaaccggcatggaccgtgaagttcgcctcttatggtatcacatcactcaccgacaggctgagcttcgcgccgctgatcgtcgctcagagcagcaataatcgctatatcgattctgaccattacgactgggtcaccctgaacgcaagaatcattcagcaaattaatcagaacttcgccctgcaatacgaaaccagctatcagtatatggatatcgacccgaaaggttttaacggcaacagcgccgccagcggtagctactacaagctgacgtttgctcctactttcaagctgcaaaacgtcacggacttctttgagcgtccggaaatccgcttttttgccacctggatgcgctgggataaatcgctggataactactcctcaacggacaccttcggcagcgccggataccatagcgctggtacgctgttcttcggcgcccagctcgaaacctggttctga

SEQ ID NO: 174462 - DNA, 1680 bp, Klebsiella oxytoca
gtggagcttttcaactggcggaaggccaccgataacaaatgtgataacaacaacggcgggtcagtcattatgaagaaaattgccattatcggcgcaggtcctaccgggatttataccctgttctcattgcttaaacagggcgagccgctggacgtgtcaatttacgagcaggccgaggaagcgggcgtgggtatgccctataacgatgaagagaattcgcgcatgatgctggccaatatcgccagtattgaaatccctcctgtacaaagcacctatcttgactggctaaaagcccagagcccgtcgcgcctggcgcgctatggcgtagagtatgaaacattgcacgatcgccagtttttgccgcgcatcctgttgggcgaatactttcgcgaccagtttcttgcgctggtcgtaaaggcccgggaactgggatttaacgtccaggtcaatgagtcctgtcgggtcagcgacctgcaggcgaccgaagaaggagtgaggctgtgggtggaggagcagcccgtcgccgaagtgtttgacctcgcggtgcttgccaccggtcatgtctggccggatgaagaagagtcaacccgcacctggtttcccagtccgtggtctgggctgatggaagccaccattccgccctgccgggtgggaattatgggcacctcgctaagcggaattgatgccgcaatggccgtcgccgtccagcacggtcagtttatcggttccgacgatgaggcgctcaccttcaggcttaacgaaaccagtcaggcgctgcacatcgtgctgatgtcgcgctccggcattcttccggaagcggatttttactgtcctattccctgggagccgctggaaatcgtcaccgacagcgcaatggaaaatgccatcgccgcaggaagcgacggcctgcttgaccgggtctttgctttgctggcgcaggaaattgccctggccgaccccctgtggagcgaaaatatcgcccttcacagccttaacgccgatagcttcagcgaagcgtggtttgctaaacgccagcagcacaaccctttccactgggcgatggataaccttgaagaagttgagcgtaacaagcgcgcgcgctacacggtcccctggcgctacgttatcctgcggctgcatgaagccgttcaggcgatggtgccccaccttaatgaccgcgaccgggagcgattcaaaaacggccttgcccgggtctttattgactgctatgccgccattccttcggagtctatccgccgactgctggcgctgcgcgaagcgggcgcgatcggcattctcgccttagggcatgattatgatatggcggtgcagcaggagaagacggtgattaccagcgggcaaaatcgctatacgtttgacgtgtttattgatgcgagggggcaaaaagcgctgaaaaataaagatctccccttcccgcatttgagggagcaactgatggcgacgggcgaagagatcccggaggttggcgacgattatacgttaagagagccgcccgtagcgcgcgggcgtatcgccttcgccgcaatcccctggctgatgcacgaccagcctttcgttcaggggattaccgcctgcgcggaaatcggcgcagcaatagccagggcgatatcgcagccggcaagtcgctcacgcagacgtttagcgccattcgatctttaa

SEQ ID NO: 174463 - DNA, 150 bp, Klebsiella oxytoca
atgtccgtacagcatccagccgacccagataaacgcgttcgtcatccgtcgaaagaggatccgcgcgagcagggtgaagttccgcgtaaaagagacgacagcgaagatcataaagaagatccctggcatccccaacctgaaaaacgctaa

SEQ ID NO: 174464 - DNA, 393 bp, Klebsiella oxytoca
atgaaaaagttactgccagttattttttgttcgttgatggctcagggcgtttttgccgcggatgatggcgggtttaaaaaagacgctgcgccgccgccgccgcacaagattgatgatggctatcgtgggaccgaggacgggcgaatcatgaccgtgcgccaggccatggaaatgcatgatggggccaccatctcattacgcggcaatcttatcgagcagcagggtgatgaccgctacagcttccgcgataaaaccgacaccataggggtcattattcccgcggcagtttttgatggccgggaagtgaagcccgatcagatgatcagcattaacggcagtctcgataagaaaatgacgccgccagtggtgcgggtcgaccggatccagaaataa

SEQ ID NO: 174465 - DNA, 885 bp, Klebsiella oxytoca
atgagcgagaacgctaacaataccgcgaagtatccccgtcccccctttgttgaccagccgcaatcgccgccgggtcttgccgaagagatgaagccgcagccggatcacggcgaactgagctacgtcggttccggtcggctggcaggtaagcgcgcgctgatcaccggcggtgattccggcattggacgcgcggtagcgatcgccttcgcccgcgagggcgccgacgtggcgatcaactatctgccggaagaggagtccgatgctgaaaccgtgattgccctgattgaggccgaagggcgtaaagccgtagcgattccgggcgatgtgcgcgatgaagccttctgtgaatccctggtcgagcaggccgccagccaactcggcggactggatattctggtcaataacgccggacgccagcaatattgcgagtcgctggaagagttaaccaccgccgactttgacgccacctttaaaaccaacgtttatgcggccttctggatcaccaaagccgccctgcgtcatcttaaagaacacagcgtaattattaacacctcatccgtgcaggcctttaagccgagccccatcctgctggactacgcgcaaaccaaagcctgcctggtggcattcacgaagtcgctggctaaacagctggggccgaaaggtatccgggtgaacgcggtcgcgcccggcccttactggacggtgctgcagtcaagcggcggccagccggaagaaaaagtgcgtcagttcggcgccgatacgccgctgggccgtccagggcaaccggtggagatcgcaccgctgtacgttacccttgcctctgatgcctgctccttcacctccggccaggtgtggtgctccgacggcggcgacggcgtgctgtaa

SEQ ID NO: 174466 - DNA, 807 bp, Klebsiella oxytoca
atgattacgctgtgcgcaacctgcggtacgtcttacgacgatcgcggcaataccctgaaccattgtcgtatctgtgaggatgaacgccagtacgtcccggccagcggacaggcctggattaaacctgacgatctgatcgcgacgcatatgaataaatggcagcagcataacgaacggctgttgagtttcaggacggtaccgaaatttgctatcgatcagcgcgcttttctgctgctcacgccgcaggggaatattctgtgggactgcatcgctaatcttgatgccgccagcaaaacgctgattaccgcgcttggcgggataaaaacgatcgccatttctcatcctcactactacaccacgatgcaggactgggcagcagcctttgatgcgcgcatttatcttcatgccagcgatcgcgaatggattatgcgcgatagccctgccatcacattatgggaaggggatgcgctggagatccttccgtcggtacggctgctgcgcctgggcgggcatttcgccgggggaaccgttctgcactgggcaaaagaggaaggtattatgctggcgggagatattatccaggtcacgccgggcgcacgcgctgtttcttttatgtggagctatcctaatctgctgcctttggcggcccccagcgtcgagaatatcgttgagcgtttgggcgatgcgcccttcggtgcgctgtacggcgccttcgaagggcagaacatcaccaaaaatgcccgtcagatcgtactggattcagcgcagaagtatctcgactgtctgcacacgacggcgggccgctga

SEQ ID NO: 174467 - DNA, 636 bp, Klebsiella oxytoca
atgcaacatatcattgagggcttcctcaacttccagaaagagatcttcccgcaacgtaaagagctctttcgcagcctggcatccagccagaatcccaaagcgctgtttatctcctgttccgatagccgtctggtcccggagctggtgactcagcaggagccgggtcagctgtttgtgatccgtaacgccgggaatatcgtcccctcatttggccctgaaccgggcggggtttccgcgacaatcgagtacgccgtcgtcgcgctgggcgtgaccgatatcgtcatctgcggccactctaactgcggcgcgatgaaagccatcgccacctgccagtgtctggagccgatgcctgcggtgtcccactggctgcgctactccgacgcggcgaaggccgtcgtggagaagaaaacctgggctaacgagaccgataaagtcaacggtatggtgcaggaaaacgtcatcgcccagctgaacaatattaaaacccacccctccgttgccgtcggcctgcgcgacagcacgttgcgtctgcacggttggttctacgatattgaaagcggcgacattcgcgcgctggataaaaacagcaaaaccttcgtgtcgctgtcggaaaaccctgacgtctatttcgaataa

SEQ ID NO: 174468 - DNA, 630 bp, Klebsiella oxytoca
atgttcttatccagcctgatggccattgccgcggttctcattatgggcgttatcagccccggtccaagctttatttacgtggcccgcaacgccgttgcgcgctcgcgggtgcacggtctggtcaccgcgctgggaaccggcgcgggcgcggctatcttttcgataatggccatgatggggctgcaaaaagtgctgacggcggtgccggaaatgttcatcggcctgaaggttgcgggtggcctgtatctgctgtggctgggttataaaatttaccgcggcgcggcgcagccgatggattttgccgcaggcggcatggcggcggaacattcactattgaaaaccttccgcgatggcctttatacccagctcagcaacccgaaaacggcgctggtattcgcctctatctttaccgccctgctgccggaacgcatcccgttggccttttactatatcgtgccgctgatgagcttcctgatcgacgtcagctggtattcgctggtggcgctggtgctctcttccgcccgcccgcgcagcgtctatctgcgcatgaagcgtaagattgatatcgtcaccgccacggtactgggcgcgctcggcctgcgcctgattgccacttcgctgtcaaagtag

SEQ ID NO: 174469 - DNA, 699 bp, Klebsiella oxytoca
gtggtttgcgccgaactggccagccgtctgaacgtctccgagcatacgattcgacgtgatttacatgagcttagccgcgagggatactgcaaaaaggtctacggcggcgcggtgatgaccctgcctgaggccggtgactacagcgcgcgcaaagagaaaaatacggcgacaaaaagcagaatcgcgcagaaatgcgcaaagctggtgaagcccggcggctgcatattcattgataccggcaccaccaatctggcgatggcggaggcgctaccggcggagctggcgctaacggtggtcaccaactcccccgagatcgctgccgtattgctcaaaaaaccgctgtatgacgtcgtgatgcttggcgggcagatccaacgcgccaccggcggctgcgtgggggcctccgccgtggcgcagattcagggtatgcttttcgatcaggggtttatcggcggctgcgccatggcgcctgagtcgggcctgacaggctttgactattccgactgcgaatttaaaaaagcggtcattaaacagtgcagcgaaattattgtcggcctgacctccgataagatcccggcggtggcgcgcttcgtggtggtcgagagcagcgccattgacgtactggtcgtggaggaaaatattagccgggaatatcgcgacgcgttcagcgagcacgacatccgtatttataccgtttaa

SEQ ID NO: 174470 - DNA, 384 bp, Klebsiella oxytoca
atgaaaattgcccatatcgccctttggacccgtcagcttgagcaacaggcccgcttctgggtagccttcttcgacggtgagataaatgagaagtactgcagtcagaccaacccggggtttgaatccttttttgtcaggatcggcgatgatattgccattgaattgatgaccaagccgggattgactgcgctgacggcggataataaccacaccggctgggtgcacctggcgataaccgttggcggtacggagaacgtcgacaggctggcaaaacgcgccgctgagcaggatattctggtttctgcgccgcggaccaccggtgatggctattatgaagcggtaattaaagaccccgatggcaacctgattgaaatcgtcgcatag

SEQ ID NO: 174471 - DNA, 639 bp, Klebsiella oxytoca
gtggccaactatcacgtcatagacaaacaaacctggccgcgaaaagatcattttgatttttatcgcggttttgccaatcccagctttaatctctgcgttcctgtcgaggcgcagcggctatatgagtgcgcgaaagatcgcggcgtctcgtttttccagctggccctcttcgcccttgtgcgcgcagcgaacgaggtgccgcagcttaaacagcggctgttgggcgacgatattatcgaatatgaccagctggcggtgatgacgccagtgatgaccgcccaggaaggtttccgccaggtctggtgcgagaatgccgccgattttgccgccttcagccaggccgccacgccaaatatcgaggcggcaaaacacaccgcgccggcgccgcttatcgtcaacggcgaaaatttcttctgcgccagctgcctgccgtggctgcatttcagcgccatgactcacgctgagtattacgttggcgcgtcggtacccgccctcacctggggcaagctgaaaaacggtattattccggtcgcgggcaaattcaatcacgcctttgtcgacggcctgcacgccagccgtttttttgcccgcgtcgaagaaaattttgctcaaccggagatcctctggcagacgcgataa

SEQ ID NO: 174472 - DNA, 1224 bp, Klebsiella oxytoca
atgcccgacgaaaaacagacccttcactattgccgccagacgccaaaggcatacgttatccgcagcgatgacgaagccatcgccatcgcccatgaaatcgcggcggtactgcagcccggcgcggcgcaacgcgatcgcagcggcagcgtgccgccggagattatcgatacctactccaatagcggcctgtggggtatcaccgttccgcggcaatggggcggagccgaggtatccgccgccacgctggcccaggtgatagcgattatttccgccgccgacccgtcgctggggcaaattccccagaaccattactgtcttctggaggatatccgtctgcagggcagcgaagagcagcaggcatttttcttcgctcaggcgctgcaaggctatcgctttgccaacgcgctttctgaaaccggcggcaagacggtactcgatatccgcactcgcctggaggccagcgaacgcggtctgagcatcaccggccgaaaaggctactgcaccggttcgctctacgcccactggatcggcattctggcgctcgatacagagaataacgcgcagctggcgtttgtgccgcgcgaatcggctgggctgacggtcatcgacgactgggcctgcctcggccagcgtaccaccgccagcggaacggtcctggcggagaatcttgtcgtcgagcctttcaacctgttcccgacctggaaatcctacgcgacgccaacccttgccgggccgtttgcccagctcaccaccgccgctatcgacctggggattgcccgcgcggcgcttaacgacacggtgaactttgtcagccagttcgctcgcccgtggatcgatgccggcgttgagcgggccagcgaagacccgctgactatctaccatattggccagcttgacagccggctggccgccgccgatgcgctgctggagcgggccggcaaagtgctcgatcgctataaatacgcactgagcgaggataacgttgctcaggcgtctatcgccgtggcgcgcgccaaggtctttaccaccgaagcggcgctggaagccgccagccgcctgtttgagcttagcggcacccgctcaaccagcatcgccctcaatcttgatcgccactggcgcaacggccgcgtccacaccctgcacgatccggtgcgctggaaatatcagctgctgggcaactgggtgctgaacggcattcctccacaacgccatgactggaactga

SEQ ID NO: 174473 - DNA, 675 bp, Klebsiella oxytoca
atgaacggcgcgctggcttttttcgctgatatcgactggggcgacgtggcgcaggccagcctcgataccttgaccatgctgggctggtcgctgggctttaccgtgctgattggcctaccgctgggaattgtgctctatctcagcggccagcctcgcctgctccatgctccgcgcctctatcgcctgctgtcgctgggggtcaacgttctgcgctcgctgcccttcatcattttattgattgtgatgatcccggtgacgacgctgattaccggcacctcgctgggcgttgaaggcaccattccgccgctggttgtcggctgcgcgcctttctttgcccggctggttgagaccgcgctgcgcgaggtggagcacggtctggtggaggccagttggtcaatgggcggcaacacctggcagctaatctggcacaccctgctgccggagtcgcgcgccgggcttattgccgccgtgaccgtgaccgcgattttactggtcgattatacctccatggcgggggtcatcggcggcggcgggctgggcgacctggccatccgctttggctatcagcgcttccagacggacgtcatggcgatcaccgttctgctgctgattgcgctggtgcagatagtacaaatgagcggcgatcgcctggtgaaggcgatgagccgcaaataa

SEQ ID NO: 174474 - DNA, 777 bp, Klebsiella oxytoca
atgaaaaaaacaatcctcgcagcggggcttctggcccttttctccctgtccgccagcgccaatgagacgctgaccgtgggcgcaacgccggtcccccatgccgaaattctcgagttcgtgaagcccgagctggcgaaacagggggtcgatctgaaaattaaagtctttaacgactttatccagcctaaccagcagctggcggagaaaaatctcgacgccaactactaccagtaccgccctttccttgataactacaatcagacccgccatacccatctgcttccggtggtcggcgtgcatattgaaccctttggcgcttattcgagtaaatataaaacgctcaaagaggtaccggatggcgccaccgttgccatcccgaacgatccggtgaataccggtcgcgcgctggtgatgctcagcaatgccgggctgattaccctgaaaaacccgcaggatccgcagtcggcgaccaaagatatcaccgctaatccgcaccgttttaaaattcgcgagctggaaggcgcgatgctggcgcgggcggtgaatcaggtcgatctggcgtttatcttcgccaactatgcgctggaggccggaattgataccgataaggcgctgctggtggaaaaaggtagcgatctgtacgtcgagtatctggtggcgcgtcccgacaacatcaacgatcccggcattcagaagctggcgaaagccctgaactcagaccgcgtgcgcagcttcattctcacccgctataaaggcaaaatcctgcccggtttttaa

SEQ ID NO: 174475 - DNA, 1047 bp, Klebsiella oxytoca
gtgacgcaaaaacccaacgccacaacgcatattcagttgagccagataagtaaagcctaccccaacggcgtgcaggcgctgcgggatattaatctgcagatcgctcagggagaaatcttcggcattattggccgcagcggcgccggaaaatcaaccctgctgcgcctgttcaaccgcctggaaaacgctgacagcggtgagattaccattcacggcgaacatactcggcactactcccgcagccagctgcgcgacctgcgccggcgggtcgcgatgatctttcagcactttaatttaatggcgaccaaaacggtggcgcagaacgttgagctgccgctgaaaatggccggggtaccgcgggcggaaaggcagaaacgggttgcggagatcctggcgcttgtcggcctcagcgatctgcgcgacagctggccggctaagctttccggtggccagaagcagcgcaccggtatcgcccgtgcgctggtcacgcagccggagatcctgctgtgtgacgaagccacctcggccctcgacccggaaaatacccttgcagtactaaaactccttaaagagatcaaccagcgccttggtttgaccatcgtgctgatcacccatgagatggacgtcattcgtaccctctgcgaccgggtcgcggtacttgagcacggagaaattatcgaacagggcgaggtgtggcgagtatttggtcatcccggacatgctgtcacgcaaagcctgctcggcacgctccatcatgaccgtgcggaagaacgactctcgctgagcgaaaaccagcagctggtcacgctgcattttgacggcagcagcgggcaggaaccggatttacagcgcatcgccgcgctgctgggcgccgatgcccgcctgttatacggcagctgcgagcagattcagggacgggtgattggccagctgcggatacgcctggcgaagccgctggccaatcctcatttacagcagcatgccggctgggtggctgaccgcttaaccctttccggcgatacggcagcgaagaatgctggcgtttag

SEQ ID NO: 174476 - DNA, 1704 bp, Klebsiella oxytoca
ttgtccagactactgcacgggttaaaaaccaaacagacgcggttcgcgcttgctctgaaaatcgcgttgctcggcggcgcggtggcattttcttctgtcgccatcgccgacgagatcttaaaagaagggatcaccccggccagcgatgccagccagatccccgcagcggcaaagctgcgtaaagataccgtcgtggccggcatttccgagccacagggcatttttaacccctacttcttcgtcaacggctgggatgaaaacgtcaccaacgtgatcttctcccgcctgatcgactgggacagccacggcaaactggtgccgggtctcgccgaaagctggacggtcagtccggacaacaaggtctacaccatcaagctgcgacccaatctgacctttagcgacggctcgccgctgacggctgacgatgtcgcctttaccctcaccgtgctgctggacccgaaatacgacggcgataccgatattacgctcgccaatatcgccggcggcgcggagtacaaagcggcgaaagccgatagcgtcagcggtctgaaagtgctggatcccttgacgctgcaggtgaccaccacccagccgggcgcgacgacgttggcaaaaattggcggtccggtactctccagagcgtattacggcaaaggctaccagcgcggcaatctcgattatctgcgcaccctgcacggcaaaccgctgggcaacggcccttacgtttatgacaaatatatccccggccaggagattcgtttccacgccaacagccatttttatcgcggtacgccccccaccccgcgctttatctatcgcgtgaccaacccggcgaccaactttcagctctttcagacgggcgaaaccgactacgacgcctttacctcgcgtcctgacgatatcgaacagctgaaaatgctcggctttgccaacatcaacctttacggctccagcgactacagccaggtggagtttaacgtccgccgcccggcactgaaggacgtcaaggtacgccaggcgctgatttacggtctcgatcgccagaagctgattgatgtggtctaccagggctacggtaaagtagcgattgagcctatcgcgccaatctcctgggcctggaacgccgacggggtaaacccgtatcactatgacccggcgcaggcgaagaagctgctggacgatgccggctggaaaccgggaccggacggtatccgcgtcaaagagggcaaacgcctggagttaaccctgctggtgagtaagaaagtgcttaacgatgcgctgatccccatcgccaaagagaactggcagcagattggcgtcctgttaaaaccgcaggtcgtcgatttcaacgccctgatggcgcagcgtaagtcgggtaattacgatctggcgtcgttcagcaccagcacccttaacgacccgcatgatggcgtgtgggatttttacagcgcggaagcgaaagagtccggctataacaatccgcaggtcgataagctgattaccgaaggtaactcggtgctcgacgttgagaaacgcaagcccatctaccaccagctgtatcaggtactggcgcaggacccgccggtgatccttctcggctaccgcgaaattctctcggcgagcagcgcccgggtcaccggcttcaaaccggatatctacaatggcctgaccggcagcctgccggatgtcaaaatcgttaagtaa

SEQ ID NO: 174477 - DNA, 960 bp, Klebsiella oxytoca
atgagaaatttcatcctgagacggctgctgcaaacgctgccgatgctgctgctggcttcattcattatctttatgctgtttgccaaaacgccgggcgattttatcgacggcaatatcaccctcaccgccgcccgcgccgccgaactgaaggcgatttacggtctggaccagccgttactcacccgctatatccattggcttggccagctgctgcgcggcgatcttgggttctcgctgcagtaccagattccggtcagccagctgcttaaccagtacatctggaactccttcctgctggccagcgtggcgctggtgttctactgggggattggtctgacggtcggcgcaatctcggcgctgaagcccaactcgctgttcgatcatctggtgagcgtcgcggtcttcgccgccatgtcgttcccgacctttttcctctgtctgctgctgatcaagtggttcgccgtcgacctgcactggctgccggttggcgggatgacccgtaccggcagcgacgacagcggctggggctatgtgctacaggttgccgcccatctggtgctgccggtgctggcgctggtgatgctccaggcaggtagcctgactcgctattttcgcgccagcatgcttgaggtggtgaaaatggattttatccgcaccgcccgcgctaaagggctacgcgaacgcacggttatcctgaagcacgccttgcggaacgccctgctgccgatcattaccctgctcggcttcgagctgccggggctgttttccggggcgatcatcaccgaaaaagtatttaactggcccggggctggacatattcatattgattcgctggccgcccgcgactacccggtgttaatgggattcaccctgtttctggcggtgctcaccattcttggcaatctgcttgccgatgtgctttacgcgtgggtcgacccgcgcattcgcgtgaggtcctga

SEQ ID NO: 174478 - DNA, 948 bp, Klebsiella oxytoca
atgctcagttccctgttctcttccaaccgacgcctgcgcgacgcggaaattccggcgctggcgcaggttacgccgtccccctggcgtcaggcctggcaggcgctgcgtcacaatcgtctggcgatgctgtgcctgctgctgctggttatcatggccctctggtgcacgctggggccgctgtggtcgccgtggaaggacgatgctaccgacgcgctgatgatcaacaagccacccggcgcgcagcactggctgggtaccgattttctcggtcgcgatatttacacccgcctgctactggccggacgcatttcgctgattatcggcctgctgaccatgctgctgtcggtcacccttggctatctgctcggcgcgctgtcgggctacgccggcggcctgaccgataaactcatcatgcgttttgccgatctggtgatgaccatccccggcctgccgctgctgattgtcgcgggagcgatgctctccgagctcgatttctcgccggattcacgcatctatatggtggtagttatgctgagcctgatggagtggccgaagcttgcccggctggtacgagggcagtgcctctccctgcgcgagcgcgactttatgctggcgacccaggtgctgggcttgtcggcgcggcgccgtctgtttggtcatctgctgccgaatacggtaccgattctggtggtgatggcgacgatggcggtggctaacgctattctcagcgagtctgcacttagctacctcgggcttggcgttgtgccgccgacgccgtcgtggggcaatatgatggacgccgctaacagcctgatcgattttcagcgccgcccctggctatggatgccgccggggatcgccatttttatcaccgtcattgccatcaacgtgctgggcgatggcctgcgcgacgccatggaccccaaaatgaaacagaggctgaaatga

SEQ ID NO: 174479 - DNA, 981 bp, Klebsiella oxytoca
atgagtcgcgcattaattacctttaatcaactttcggtctcttttgccgccgacaaaggccgggtacgcgcggtgcaggaggtgtcgttcactatccgcgccgggcagaccgttggcgtcgtcggtgaatccggctgcggtaagagcgttaccgccatgtcgttaatgggcctgctgccgccgcaggcggcgcgcattgacggtggggagatacttttcgaggatcaggatctgctgcggctgaaaaatgcccatatggccgatctacgcggcaatcagctggcgatgatttttcaggaaccgatgagcgcccttaatccggtactcaccgtcggcgagcagctgtgcgagccgcttattcgccaccgcggcgagtcgccgaagatcgcatggcagcacgctatccagcttctggctgatgttggactggcgcgcgcggatagcctgatggccagctatccacaccagctttccggcggcatgctgcagcgggtgatgatcgccatggcgctgagctgccagccgaagctgctgattgccgatgagccgacgaccgcgctggacgtcaccgtgcaggcgcagatcctgcgactgctgcgcgaccaggcgcgagccaaccggatggcgatgatgctgattactcacgatctcggggttatcgcgcagatggccgaacacatggtggtgatgtacgccgggcgtatcgttgagcaaggtgcgacagccgccattttgcgtaacccgcagcatccctatacccaggggctgatcgcctcgcgccctgtgccgggggagcggcggcgacgcctctactcaatccccggtcaggtaccggacctcgccgcccttcccgccggatgcgccttcgccgagcgctgcgcaaaagccaccgcgcgctgccgacagagcattccgccgctatcggggcataaccggcaggccgcctgcttttacagtgaactttcggagtccgtggcatga

SEQ ID NO: 174480 - DNA, 966 bp, Klebsiella oxytoca
atgaatcatgaatacgtgattgaagtggatgggctaaaaaaacacttcccgctacgcgatgggctattcggccagcagaccggcgtgctgcgggccgtggatggtgtgagctttaagattcgccggggcacgatttttggcctggtaggcgaatccggcagcgggaaaaccaccgttggccgcacgctgctggggctatacgagaagaccgccggcagcgtgaagtttcgcggccaggagcttgccgaactgtcgccgcaggcgatgcgcgcgctgcggcctaaaatccagctggtttttcaggacccctacagttcattaaacccgcgcatacgcattggcgtcgccatcggcgaggcgatgctggaacataaactctgtcgccgggcggagctgtatgacaaaacccttgaggtgatgcgcatctgcgggctgtctccgcagcattacaaccgtttcccgcacgaattttccggcggccagcgtcagcgcatcggcattgcccgtgcgctgatcttaaacccggattttattattgccgatgaaccgatttcagccctcgatgtgtcgattcaggcgcagattatcaatctgttttccgacctgcgcgacgaccatggggtgacgtttttgtttatctcccacgatctgggggtagtagagcatctgtgcgatgacgtagcggtaatgtatctcggtcagttagtagagaccgccagccgcgatgcgctattcagcagccccctgcacccctacacccgggcgctgctggcggcggtaccgaccctcgatccggacagcgagccggtggcggcgctacaaggtgaaattcccgacccgtcccggcccccttccggctgtcgtttttcctcgcgctgcccgcaggccagcgaccgctgccgccgtgatattccgcttctaagggaggttgccgacggccacctcgtcgcctgtcacgcggtttag

SEQ ID NO: 174481 - DNA, 2406 bp, Klebsiella oxytoca
atggacgaacgacaaggtagcggaaggggaattttcttcaccgcctaccgattactctttgtattactgagctttggcattgggctctttttcaccatctgggggggcaaactcctctcgctgggcggcagcgcctggtatctgctcgccggtattgcttatctgcttatcgccgtcggctatctcgcccgcagtcgatatgtcctgccttttgccattctgacttttctgttgacccttgcctgggcgctgtatgaagtgcagctcagctattggggactgatcccacgactggtggtgcctgcgctgatgctgatgctggcgctgtggctgtcggcgacgctgccgatgccgcgtacgcgggtacgctacgccaactggagcgcttcggcgattttcctcgtgctgctggcgacgctggtctcggccttttacccgcacggcggtattcataacggcgtggtgaaagcgagcgacgacaaaacgccgaccctggctgccagaagcgataactgggcgttcttcggtcgcgatgcctccggcacccgttttgcgccgtacgaggacattacgccgcaaaacgtcaaaaacctgaaagtcgcctggacgtaccataccggccggcggcttaccggcgccgggattggcgtcgatgaaaataccccgctgcaaattggcgatacgctgtactcctgtacgccgctgaacgtggtcacggcgctggatgcggataccggtaaagcgcgctggcgttttgacccgcacgcgcaaaccgccgagcacgtcacctgccgcggggttggctattgggatgcgcagagcgatgattctttgagcgcagaggagaaggccagcccgtcgctgcagcagtgtccgcagcgtatcctggtgtctacggtcgacgcccgcttgatcgccctgaacgccaaaaccggcgagctgtgcgatgacttcggcgaccacgggagcgttgatctgaaacagggtatggacaataccgaaaacagcaaacgctaccatccgacctcaacgccggtgattatggggcatattgcggtgctcggcggctgggtgcgcgatatcgtgcacggcgaaccctccggcgtggtgcgcgcatttgacgtccgtaccggcaaagtggtgtgggcgtgggacgtcggccagccggaaaacgtgaccgatccggtaaaagggcgcgtctacactctcgaaacgccgaacgtctggacggtgccgggctttgacaaagagctgaatctgatttatctgccgaccggtaacggtccgccggactactggggcggcgatcgcaacgcggccaaagagaaatatggctcgtccgtggtggcggtggatgccagcaccggggagacgaagtgggtcttccagaccgtgcatcatgatatctgggactatgacctgccgtcgcagccggtactgttccatatgaaaaacgaccggggtgaagaggttccggtcctgatccagaccaccaaaaccgggcagatttacgtgctcgaccggcgtaccggcaagccagtgactcgcgtagaagagcgacctgtggcccacgacggcgcggaaggcgagcatctctccgccacccagccgttctccaccggcatgccgcaattgggcgtcgagccgctcaccgagaagtcgatgtggggcgtgacgccgttcgatcaactgatgtgccgtatcgacttcaaagcgtcgacttatctgggtatgtacacgccgccgtcagagaagccgtacatcgaatggccgagcctgctgggcggcatgaactggggcggtatcactatcgatgagcgcacaggaacgctgttcgtcaatgatatgcggatgccgctgagaatgtcgctggtgcgcaaagaggatatggcgaaatacaaagtctccaccgacgaggtgcccggctttatggggaccgtgcgtccgcaaattgccgggccatacggcggcgtgcggattgatatcttgcagtcggcgctgggcgttccctgtaatacgccgccgtttggcaccatgagcgccatcgacctcaatacccgccagctgatgtggcaggtaccgatgggatcggtagaagataccggtccgctggggctgaaaacgcacatgcatatcccgctgggtatgccgacgctgggcggcccaacgtccacggcttccggactggtattcttcgccggtacccaggataactacctgcgcgcgctggattccgctaccggtaaagagctatggcgcgctcgtctgccggtaggggcagtggcggctccgctgatctataaatcaccgaaaagcggtaaagagtacgtggtgatctccgccgggggcgccagccactcgccggacgtgggcgatgatattattgccttcgcgctggaagagtag

SEQ ID NO: 174482 - DNA, 912 bp, Klebsiella oxytoca
atggtatcgacaaccgcagtagccgccgtcaaagaatggcggaaacataataaatttatttgtcaggttaaactcagctataaaaaggtactgcgtaaatgcagagaaatatctttaaccggagggaaatacaaagaatatcagacattatgcgccagctatgcttgcgcgaaattaacgggagccaccgaggggctggttaactttgaagataaaccctttaaagcctatttaaataaaaagatgtcaaaaagagcgaaactcgatatcgctcatggcgctttgaattttatagaaaaaagctttcgtcccgaggccttgccgcagctgtatgatatggcgaactttggccgtacgcttatcgccattccgctgaaaaacggtagcagtattgatgtgaagctcctggcatcgccttttcaggaggaaggggagctcatgctgttaatgttccttggtgataaacgcgtctacagtatctgtttttcctgcactgacgatggccgcgcctggattggcggtattcagggagggaaagatatcgataatgaagaggtgaaggcgctgacgaaagagcttcacggcacccgtcctaaaaacttaattatcactctgctgtacggttttttagcctttttcaatatcaaggagatctatgctatcgacagtgattttcatgttaaaagcgacagagtaaaaacccgttattctgagctttggctggaaattggcggcgagaagcatcgacgcggctggtataaattaccgccaaccgagattaagaaaagcctggaagaggttaaaagtaagcaccgtagccagtttatcaagcgtgaaggtctgaaggagctggcgcagttggatcttgccgccgcgctaggcgacatctgcctctgccgtaacgccggataa

SEQ ID NO: 174483 - DNA, 141 bp, Klebsiella oxytoca
atggaaattgatctcgataacctggtttttagcggactggaagaagcgcaagagcgcaacgctgaacgacttgaagatgccgataaaaaagcgcaggccattgtggccgatgatgactgcggcgacgcctgtaagatctaa

SEQ ID NO: 174484 - DNA, 1311 bp, Klebsiella oxytoca
atgtcacaccgggaaaatcgtgctaaatggaacctgtttattcaggcattaaaacaggaagtgaaacccgcattaggctgtaccgaaccggtatctgtcgccctcgcctgcgccgtggcggcgcagcagctctctggcgcgattgtgcggatcgaagctgcggtctcgccgaatctgatgaaaaatggtatgggcgtcaccatcccgggtacggggatgaccggcttgcctatcgccgcggctctcggcgctatcgccggcgacccgcaggcgaatctggaagtgcttaacaaggccaccggtcgggaaattgatgccgccagggcgctacttgaggttggcgccgtgcgcgtggtgctacaggaaccctgcgacgagattctgtacgttcgcgccaaagtctacgcgggcgaccagcatgcgacggtcaccatcaccggcgaccacaccaacgtggtggcgattgagaaaatgggtgagcctctgtttgttaaggacgcaagcgcgaacgccgctcccacccgcgatccgctggcgcaggtcgcccacagttcgctgcgcgagatctatgatttcgttagcgaagcgcctgcgcagacgctggaatttatgctcgaggctggcgcaatgaacaacgccctttcaaagaaagggctgagcaaagagtggggattgcatatcggcccgacgctaaagcgccaggtcgacaaaggactggtttccgatgatatgtttaacgagatcctctaccgcaccagcgccgcgtcggatgcccgcatgggcggcgcatcgctgccggcgatgaccaactccggctccggcaaccagggcatcaccgccacgatgccggtggtcgtggccgcagagcgtcttcacgccagtcagcagcagctggcccgcgcgctggcgctatcacatctggtcgccatttatattcactgtcaacttccgcggctatcggccctctgcgccaccaccaccgccggaatgggtgccgcggcggggattatctggctgatgaacggcagctttgacaccatcgccatggcggttaataacatgattggcgacgtcagcggcatcatatgcgatggcgcttccggtagttgcgcaatgaaagtgtccaccagcatctcttccgcctggaaagcggttctgctggcgctggataattcggttgtttccggcaacgacggtatcgtcgatcgcgatgtggaaaactccattcgtaatctttgcgccatcgccggtcgggccatgcagcataccgaccgacaaattatcgaaatcatggcgcacaagcgttattag

SEQ ID NO: 174485 - DNA, 558 bp, Klebsiella oxytoca
atgtcaatgaatactcaatgcctggcagttttcttacttgttactataccgcctcttacttttgctgatgactgccagataacactttctcgccaaatggtagattaccatcagatgcgatatgattctgtcgtttcaagccagcaaaactggaataaaatgccagaaaaagatattgatgttagcgtattttgccctgaaaaacaacaaatagctaccctcgtgcaaggggggacaggtcagaaagggcgttttcagtttggaccgaatggaggtattgcgataaaagtaagtaacctgacgctcgatggtaaaagctacaacgttggaaaaacaaccgatcggattaattttaacccggacattgataacggttcatccatctatattcgaaataatgaggcgataattgcggtcgaagatgatcatgtacccagtggtcagcaattgaatttcaccgtaacgatatttcccgtactgaatggcaaagcattcactcacatatctgatcaaaccatactggaaagtgatttaacctggcagttacttacgcaataa

SEQ ID NO: 174486 - DNA, 1944 bp, Klebsiella oxytoca
atgctgaattattcgttatttagcaccaccagtgaatacagcggaaatggcagagaaagcaaccattattcacaggcgagcctggaggcaggagtgaatgtgagggactggtcgctgcgtagccgttatatcctgactgatgatgatggtaccagaaatgcagaaagtatctatacctacgcagagcatgtgtttgttcctcagcgtctgaccatgcaagtgggagagattaacgcagtgtcaagtgtattgaatggcgtaccgataactggtgtacagattttacctactaacgggttgcagaaaaataattctggtgtaattgtttctggtattgcccgaacaccgcaagctcgtgtggaaattcgacagaacggccaactgatatttaacacgctggttccagcggggccctttactctggatgatgtaccgatggttcgtagtaacgtcgatctggacgtgaccgttattgaatctgatggctcaacaaatcattacattgttccggctgcctctattaaagtaagaaatctcaccaggccaaatggcttaaccctttcggcggggaaggttcgtggcatagacggtgattacagcgaaccgttggttttcaatgtatctgatggctggcaaatttatccttggatgaatattcttgtttctggcgaagtggctaaagattattatgccttgggagcgggcacagtgttcatggttaaggatgactggaatgtatccagcagccttgcggccagtaatgcgcaatttggtaacaacagtgacggacttaaaagcgaattacaaagtgattattcatttaatgataatgtaagcctgtctgccagtgttgctcactatagcagtaattatcgtgaactggtagacgcgttgagcgaagattatcaggggtatgacaacagttatactgctaatatgcattggtcatatccgcagatcggaacatttagtgcagggtttagttataaccaggcgaggaacgatgaaagagattctcgttatttattgttatcatggggtaaaacttttaaatatgcctcgatcaacgtaaactggcaaagtgctgtaggtaacgccgatgagagtcagaacaacgatcttttttatgtaaacctgagtattccattaggcggctcgcagattattagttcctatatgcgtaagcagggagataggaccaattacggtctggcgaacagcggttccctgggcgataatacctactattatatttctgccgatcgcgataacgagtcaaaggaaaacagttttaacggcaatatcaatactaatttgcactacacccagcttagcgtaggcggtggtagcagcggagatcgtcagcgtaactacaatgcgacacttgctggcggtattgccatgcataaagatggcgtgacgttttcaccctattccatcaaagatacatttgccatcgctaaactaaacgagccgaaagcgggagtcgagattactacgccgcagggtactgtctggactgataaatgggggcaggctgttgttcctggtttaatcgaatggcataactcaaggatcgaagtcaatgctgacaaacttccgcaaaatatggcgctagcgaatggaataaaatatatagccgctgctcatgcttctgttagtgaagtcaatttcaaaatactgaaaagccgccgtgtaatgctacgggccaggcaagtcaatgggaaaccagtactgaaaggtttatccgtagtggatgagaaagataactatgtagtgacagttgtcgatgatggtcatatattcctgaacgatgccgatcaatttactgcactttatgtgatagatgagaataataaacatctatgtaagcttgatttcactcttccaatgaaaccggatgaaaatgttttttatgaggaagttaacggactatgtcaatga

SEQ ID NO: 174487 - DNA, 708 bp, Klebsiella oxytoca
atgtcttggtcgaaaatctcgttggtgaaaacactcttaatagtatcattatattcaacaggattttgtattcatgctgcaggaatggtgccagaaaccagtctgcttgtcattgatgaagcaacacatagtggtacgattaacattaaaaataccgatacttacccctcattgctttataccaatatcgttgatttacccgatgataaaggcatgaagctcattattacgcaaccggtagttcgtcttgaacctggtcagacacaacagcttcgttttattctacagaataaagagccattaagcactgagcattataaacgagtcacttttgaaggcattccaccaaagagtgatgataagaatgtaaaaatcggcattaatattagacaggatttgcccgtgcttattagacctgcaaagctgtctgttgtaaccgatgcgtggaaatatctggaatggacagattcagggacttctgtttcagttaaaaatccaagtaaatacgttgttcgccttgcgcagaagatacttttgcagccagaaaatattcagggaaggttggccaagacttatattttgcccggtgagactatggcagtatctatggataaacctgtaagcaagaataacaaggttaaatttttccctgccagccgctatggtgtcgaagttccaagctttatctccgatctgaataaaaaataa

SEQ ID NO: 174488 - DNA, 684 bp, Klebsiella oxytoca
atgaagagaatattcttggctacggctttgtcgctttgtgtaagttctgcattcgcagcgggaagcgccgtgttgaaggttacaggcaccctgacaaatgcggcgtgcacgcctgaattaagtaatggcggcgttgttgattacggaactatttctttgggagacctttctgcgacagaggtcaatcaactgggacataaaaatattgatttcagtatcacttgttcagccgcgaccaaagtatcctggaacatggtggatgataaagcggatactcgcgccggaatttttgttagccaaagagattttgttggtgacagtggagtgccagcgaattctcaggcgtacggcgttgggctgactaacgatggtgtaaaaatcggcaactatactatgtttgtcaatgttgacagcgtcacggctgatggtaaatccgttgatctgatttatgtacaaactggttcaggaaatacaaattgggcaaaattggctactggaaaaactcagggagaaaactatcgtgatatcaccgtggcctccactggcgcgcttgagcccctggccttccagacagcaacattcccgttgaccacgtctctggcgattgaaagtacagataaactggctattaccgatgacaccaaactcaacggtcagttgactatcagcctgcgttatctgtaa

SEQ ID NO: 174489 - DNA, 387 bp, Klebsiella oxytoca
atgactaaggctatcgcgacagaaaatgcgccgcaggcaattggcccctatatccagggcgtgcgcagcggaaattttatttttacatctggtcagctacccatcgatccgcaaacgggcactattcccgagtgcgccgaaggccagacccgacagagcctcgagaatattcaggcaatcattgaggccggcggcctgacggtcgccaatatttgtaagatgactatcttcgtcaaggatctgaacgagttcgccgccattaatgatgcctacgcggcgttcttcactcagcgtaacgcttctttcccggcgcgctcttgcgtagaggtcgcccggctgccaaaggacgttaaagtagaaattgaagctatcgcctggcagggataa

SEQ ID NO: 174490 - DNA, 1419 bp, Klebsiella oxytoca
atgcatgattatggcatctggacgataattactccgctggtcaccattattctggcgattctgacccgccaggtgatcctctctctgcttaccggtatttttgtcggctatgcggtgattcaccacagcattatccagggcgttggcggcacgctgaacggaattattgaaacctttgcctccgccggtaatgcgcgaacgattatttttatggtgatgatcggcggcattatgcggctgattgtggtcaccggcggcgtgcgaaagctggtgcagtttctttcggagaaaaatgatttcgtcaccaataaaaagtcggtccagctactggcgatggtggtgacatcgttaatctttatcgagagttcgataaaccagctgattgccggcgcatcaacgaaaaaccttgcccggcgctataaagtctcgccggaaaagatgtcctatattatccagacttcctgcgtgtccgtttgctcgtcggtgatgatcaacggctggggagcggcgatgatgggggttatcggcgtccagattgcgcaaggctacctgaccggcgagccatttgaagtgctggcaagctcgatggtctggaatacgatggcctggttttcattagcctcagtgcttttttatatcctctccggctgtagctgggggccgatgaaaaaggcggaggttaagtttgaaacggtccagacggaaatagaacaagagcatggcgaagaggaagcggacccggtgattgaccatccggcctgcaactcattgctcaacttctttattccaatcctttccaccgtacttatggtgccggtagtgctatatatcaccggtgagggacaattctccaaaggcagcggctccatgtcggtctactccggcgtcatgtttggcaccgtcgtctcttttatctggtttcgcctgcgcggtattctgaacgtagaaaacttttttaaagagctgtatatcggctacgccagtatggtgaaaatcagctcaatcatgattctggccttcctgatggggcatatttcggcggaactgaataccggacagtatattgcttcgataacctccggcgttattccatccggcttttcgatcggctttatcttcctgattgccgcggtgatgtcgctggccaccggtacctcctggggaaccttcgccatcatgattccaattggcgtccagctcggcgtgtccttaggcatcgatccgcactttatgatcggcgcggcgatttccggctcaatctttggtgatatgacttcgcctatctccagtgatgccatcgtggcatcgatggcgaccaactgtgaccatattgaacatattcgcacccagctgccttatgcgctggtgacgggcgggctggcgctcattgtttatttaattgtcggcttcactctttaa

SEQ ID NO: 174491 - DNA, 1188 bp, Klebsiella oxytoca
atgaaaaccagaactaaagatattgctaccctggccgttcatgctggaagccaatccgatccggtaaccaacgctatatttaccccgattgtcacagccagctcttttatccagcctaacctttatgaaggcggcgatttttgttattcccgggtttccaatccaacgcgtaaagcttatgaatccgcacttgccgagctggagggggggatatatgccaccgctaccgcatcgggaatggcggccaccaatatcgtgatggaactattgcccaaagacgcacacattattgcgatgaagggcgtttacggcggaacctggcggctgtttgagaaattaaaaacgcacaccaccggcgccacaatttcctatatcgatctgaacgatgagcagagcctgatggcgaatattcaggaaaataccgccttaatctggattgaaacgccgaccaatccattacttgaactggtcgatatcgcgaaagtgtgtcgtattgctaaagaacacgccattaccacctgcgttgataatacctttgccagcgcctggaaccataaaccgcttgaaatgggggcggacatggtcatgctctccaccagtaaatatgttggcggacattctgatttaataggcggcgcggttattaccaataatgaagcgctcgcctcgaggctcgattttattaaaacaacgatcggctctattgcctcgccctttgatgcctaccttgccctgcgcggtatgaaaacgctggatttgcgcatggagcgtcagtgcagtaatgccctgcgcgtggcggaatatctggaaaaccatccggcgattgccagcgtctattatccggggctgccgtcgcaccctcagcatcagctatgcaagaagcaaatgcgttcgggcggcgcggtagtgaccgcgaccctgaagggagacatgcagagcctgaaacgctttatcggcggtctgcactattttgtgctggcggaatcgctgggcggggtagagagcatgattaaccattcggcctcaatgtcccacggttcgatgtcaaaagaggagcgggaagcgatcggcgtttatgacacgactctgcgcttctccgtcggcattgaacatatcgatgacttactccaggacctggatattgccttcgccgctatggacctcaaacaggataaccatcatgcatga

SEQ ID NO: 174492 - DNA, 873 bp, Klebsiella oxytoca
atggaacttcgttatctgcgctactttgtcgccgtcgccgaggcgcgacatttcactaaagcggcaaaagaacttggtatctcacagccgcctttaagccaacaaattcaacggcttgaacgggaaattggcacgccgcttttccgccgtttaacgcgcggcgttgagctaacggaagcgggggagtcgttctatgaggatgcctgccagatcctcgccctgagcgatgcggcgctcgaaaagactaaagggatcgcccgcggactgaacggtcggctggcgctgggcattaccagttctgatgccttccatccgcagatctttagcctgctgcagcagttccaacaacgttacccggcggtaacgctgcatcaaatcgagggcaatatggcgacgctgatgggggcgcttggcgaagcggagctggatattgcttttgtacgcctgccttgtgaaagcagtaaagccttcaatctgcggattatcgatcaggagccgatggtgatcgcgctggcgcgttcgcatccgctgtcgtcatgcgacgaactcgcgctcgagcagcttaccgacgtggcgccgattctttttccgcgcgaagtggcccctggcctgtatgagctggtgttcaacagctatctgcgcgccggtattgacgtgcagcgagcctatcagtcatcgcaaatatcgtcgtcgctcagcatggtggaagccggattcggctttgcgctggtgccgcagtcgatgacctgcatcacgctacctggcgtcagctaccaccctttggcgggcgcgccgctaaaaaccgatattgctatcgcctggcgacgctacgagcgttcgcgcacggtgaagcatttcctggccatgttttaa

SEQ ID NO: 174493 - DNA, 780 bp, Klebsiella oxytoca
atgaaccattctgctgaatgctcttgtgaagagagcctgtgtgaaactctacgagggttttccgcgcaacatcccgatagcgtcatctaccagacctctctgatgagcgcgctgttgagcggcgtttatgaaggcaataccaccatcgctgatttactcacccacggcgattttggcctgggaacctttaatgaactggacggcgagctgatcgcgtttagcagcgaggtataccagctgcgcgccgacggcagcgcccgtaaagcccgaatggaacagcgcacgccgtttgcggtgatgacctggtttcagccgcagtatcgtaaaacgttcgataaaccggtgagccgccagcagttgcacgacattatcgaccagcaaataccctccgataatctcttctgcgccttgcgcattaacggtcattttcgtcatgcgcatacccgcaccgtaccgcgccagaccccgccctaccgggcgatgaccgacgtgctcgacgaccagccggtattccgcttcaaccagcgcgaaggggtactggtcggcttccgtaccccgcagcatatgcagggcattaacgttgccggctaccacgaacatttcatcaccgatgaccgtcagggcggcggtcatctgctcgattatcagctcgaccacggcgtgctgacctttggcgaaatccacaaattgatgattgaccttcctgccgatagcgccttcctgcaggcggatctgcacccggacaatctagatgccgccattcgctcagtcgaaaactaa

SEQ ID NO: 174494 - DNA, 1680 bp, Klebsiella oxytoca
gtggataatcaacatcaacctcgccagtgggcgcatggcgccgacctgatcgtcagccagctggaggcccagggcgttcgccaggtcttcggcattccgggggcaaaaatcgataaggtatttgattcgctactggactcctcaattcgcattatcccggtacgccacgaggccaacgccgcctttatggccgctgcggttggccgcatcaccgggaaagcgggcgtcgcgctggtcacttccggccccggctgctccaatctgattaccggtatggccaccgctaacagcgaaggcgatccggtggtggcgctgggcggtgcggtaaaacgcgccgacaaggccaaacaagtgcaccagagtatggatacggtggcgatgttcagcccggtaaccaaatactcggtggaagtcaccgcatccgatgcgctggcggaggtcgtgtctaacgcatttcgcgccgccgagcagggacggccgggaagcgccttcgtcagtctgccgcaggatgtcgtcgatgagccagtccacgccagggtgctgcccgccagcgaagccccgcagaccggcgcggccccggacgacgccattgagcgagtggcgaagatgattgccggggcaaaaaatccggtattcctgctcggtctgatggccagccagacggaaaacagcgcggcgctccgcgaattgctgaaaaaaagccatatcccggtcaccagtacctatcaggccgccggcgcggtaaatcaggaccactttacgcgctttgccggacgggttgggctgttcaataaccaggccggggatcggctattgcatctcgccgacctggtcatctgcattggctatagcccggtggagtatgaaccggcgatgtggaataacggtaacgccgcgctggtgcatatcgacgtactgcccgcttatgaagagcgcaactataccccggatatcgagctggtcggcgatatcgctgccacgctgcacaaactctccgggcgtattgaccaccagctggttctgtcaccgcaggccgcggagattcttgttgaccgccagcaccagcgggaactgctcgatcgccgcggcgcgcagctaaaccagtttgcgcttcatccgctgcgcatcgttcgcgccatgcaggatatcgtcaacagcgacgtaacgctgaccgtcgatatggggagctttcatatctggatcgcccgctatctctacagcttccgcgctcgtcaggtcatgatttccaacggtcaacagaccatgggggtggcgctgccgtgggcgattggcgcctggctggtgaacccgcagcgcaaagtggtttcggtttccggcgacggcggtttcctgcaatccagtatggagctggagaccgccgtaaggctaaaagctaacgtcctgcatatcatctgggtcgataacggctacaacatggtggcaattcaggaagagaaaaaatatcagcggctatccggcgttgagttcggaccggtggattttaaagcctatgccgaagccttcggcgccagagggttcgcggtcgagagcgccgccgcccttgagccgacgctgcgggcggcgatggacgtcgatggccccgccgtggtcgccatccccgtcgattacagcgacaacccgctgctgatgggccagcttcatctcagtcaactactttga

SEQ ID NO: 174495 - DNA, 771 bp, Klebsiella oxytoca
atgaaaaaagtcgcactcgtgaccggcgcaggccagggtatcggtaaagctatcgcccttcgcctggttcaagatggctttgccgtggccatcgccgattataacgatgccaccgcacaggcggttgctgacgaaattaaccagcacggcggccaggcgctggcggtgaaggtcgatgtctcgaaacgcgatcaggtttttgccgccgttgagcaggcgcgtaaaggccttggcggttttgacgtgatcgttaacaacgccggggtcgcgccctctacgcctatcgaagagattcgcgaggacgtcatcgataaagtctacaatatcaacgttaaaggcgttatctggggcattcaggccgcggtagaagcgtttaaaaaagagggccacggcggcaagatcatcaacgcctgctcccaggcgggccacgtgggtaacccggaactggcggtctacagttcaagcaagtttgccgtgcgcggcctgacgcaaaccgccgcccgcgatctggcgcatctgggaattaccgttaacggctactgcccggggatcgtcaaaacccccatgtgggcggaaattgaccgtcaggtttccgaagcggcgggcaaaccgctgggctacggaacccaggaatttgcgaaacgcattaccctcggtcgtctttccgaaccggaagacgtcgcggcctgcgtctcttatctggccggtccggactccaactatatgaccggtcagtcgctgctgatcgatggcggtatggtattcagttaa

SEQ ID NO: 174496 - DNA, 1071 bp, Klebsiella oxytoca
atgattgaattatcggtagaaaacctgcatctgacctacggcgataacccggtactgaagggcgtatctatggagctgaggcggggggaagtcgtctcgctgctcggcccatcggggagcggaaaaaccacgctgctgcgggcggtcgccgggctggagaagcccaccagcggcacgatcgctatcggtaaaacccgcgtttatgacggcaacccgcgtagtgaaattccggcggaggagcgtaacctgggtctggtgttccagtcctacgccctgtggccgcataaaacggtatttgagaacgtggcttaccccctcaggctacgtaaggtcgccgccgcggagatcaaacagcgggtgcagagcgtgctcgatcagctgggcctggggcatcttggcaatcgccatccgcatcagctctccggaggacagcagcagcgcgtggccatcggccgggcgctggtatataacccgccggtcattctgctggatgaacccctgtcgaacctcgacgctaagctgcgggaagaggcgcgggtctttttgcgcgagctgatcgtcaagctgggtctgtcggcgctgatggtgacccacgatcagaatgaggcgatggcgatttccgatcgcattttgctgctcaataacggcgtcatcgagcagcagggaacgccgcaggagatgtacggcagcccgagaacgctgtttgccgccgagtttatgggcagcaataatcggctgcacggcaccgtcaccgatctggataacggtcgggcgcgcattgagggcgccagctgggcactgtggggaatggccggggaaggggtcagcgtgggggcggaagcaacggcggtcattcgtgttgaacgcctgcgcatagcctcctcgcctgaagagaacatgctggaattagcgctgctgaccagtatgtatctcggcgaccgctgggagtatctgtttcgcaccgaaggcgatgatttcgctattcgcgcctacggtagcgcactgcgcgatgccgaacgttgccatcttaccttgcccgtcaacgatctgtggatcttcccgaaaggctga

SEQ ID NO: 174497 - DNA, 1770 bp, Klebsiella oxytoca
atgaatattttacgccgaaagtggcaggggttgccgcgcggaattgttgtcctgataacggcgctggccatttatgtcccgctgctatttatcgtggtgcagagctttctctcggcccccttttttgcccgctcgaaggcatttagccttgaggccttcgaatttatctttaccgatccggatttttatctggcgctaaaatctggctttattctcgccttcggcctggtggcgatcgccattcctctcggcgggatcctcgcctttttaatggtgcgcaccgatttacccggcagacggattattgagccgctgattctggtgccgattttcgtatcgccgatggtgctggcctttggttacgtggtggcggcgggaccggtaggcttcttttcgcagtgggccgagcagctgatcggcttcgtgccgtggaatatttactcgatgttcagcatcgtggcgatcgccggattgacgcacgttccacacgcctatctctatatctcttccgcgctgcgcagcgtcggttcggatgtggaagaagcggcgcgaacggttggcgcatcgccgctgcaggtcatgacctcggtgagcctgccgatggtacggccgtccatactctatgcctgcgtactgctgttttttctcggcctggaagtcttcggcctgatgctggtgctgggggacccggaaggcaatatggtgctggccacctatctttataaactgaccaacaagctcggcacgccttcctatcatctgatggcagcggtggcggtggtgctgatctgcatcaccattccgctggtgatgctccagcgccgcctgatgcgtaccgccaaccgctttgtcaccatgaaggggaaagcatcgcaggcccgggcgctgccgctggggaaatggcgctgggtcgccggtatcgtcgtggtggcctggttgacggttaccatcggcgtaccgctgatcggcgttgcgctgcgggcctttatttcgaactggggggttggcgttccgctgtgggatgaactctcgctggcgacgttccgcaacatctggcagcagccgaatttgctgcgcgccatcgttaactctatggcgattggggtcatcggcggcgcgctggcggtggtctgctatctgttcgtaggcatcgcgatgcaccgcaaaccggataacgtcacgcgctttctcgactacagcgtgctggtgccgcgtgcggtgccggggctgctggccgggctggcatttttgtgggtgtttctgtttctgccgatgtggctggatcagtcgctgaaaaacggctggctctcggcgctgccggtggctgagtggctgcgcgaccatctgattgttcagctgcgcgcgctgcgtaataccatttttagcgtctggctggcctataccgtggtctggatggcctacggcctgcggctcatctcctcgacgctgctgcaggtggcgcctgagctggaggaggcggcgcgcagtaccggcgcatcgcgcgggcagatcacccgccacgtcacggtgccgctgtcgcgctatggcctgattggctcctggctgctgatgtttcttatcttcgagcgcgaatattcgaccggggtttatctgctctctccgggaacggaaactatcggttcgatgctggtgtcgctgtgggcggcgggggctatcgatatcgtcgccgcgctctcgtttattaatatcctgctggtggtcgtgggtctgggcatcgccctgcgctttggagtgaaattacatgattga

SEQ ID NO: 174498 - DNA, 1089 bp, Klebsiella oxytoca
atgtgtatgaaaattagtggcttagtgatttcactgacggccatattctccggtcaggcctttgctgtgctccctcagggctatccggcggattatcaaaaggtcgtggatgcggggattaaagaaggcaaggtggtgatttactcaaccacggatactaaggccgcaggtccgttaattaaaggttttgaagcgcaatatcccggcattaaagttgaatataacgatatgaacagtaccgaattgtacaaccgttatatcagcgagcaggcagcgggcggcggaagcggcgatgtggtctggagctcttcaatggatacggcgctgaagcttgccaccgattatgcggaacagtatgcctccccggaacaagataagctgccgaaatgggcggtctggcagcaaaaagcctacggcaccacctatgaaccggtggtctttatctataataagcgcctgatcccgcaaggggatgttcctgattcgcacaccgcgctggcgaagctgatcgccggtcaggctgataagttcaagggcaaggtcactacctacgatattgaaaaatcgggcctgggttttatgctggcggttcaggacagtaaaaccgatgctcactactttgacgacctggcgggaatggcgaaaggcgggctgaccgtgcaatcgtccaccgggacgatgatggagcgcgtctcctccggggaaaacctgattggctacaacatcctcggttcatacgcggaggcgcgggcgaaaaacgacccttcgctgggtatctcgtacccgaaagattatgtgctggtgctctcgcgggtctcgtttattaccgcagaagccgagcatctgaatgcggcgaagctgtggtttgattacgtgctctcggaaaaggggcaaagcatcctggcgaaccaggccgatattccctccctgcgcaatgatatcgaaggtaaaaatgatatcgacggtatgaccaaaatgctcggcagcgcgctgaagcccattccggtcgatgaaacgctgctggcgtatcttgagccgaaacaacgcctggaatttatcaaacagtggcgcaccgccgcggcgaaataa

SEQ ID NO: 174499 - DNA, 486 bp, Klebsiella oxytoca
atgcgcatgcctgaagtgatgctgtttctgacgctggcgctgcttagcggctgcaaagaagagaagctggctcgcggcgaaacggcacctgcgctggcggcattcgatttacaggagtcgccggtcagcctcgatcgttggcgagggaaggcggtctatcttaatttctggtccgcaggctgcggcggctgtctggcagagatggataccttacaggcgctcagccagcgctggccggataagctggtggtggtgggggtgaataccgatccggataccgtggatatcgcgccgctgctggcgaagcatgggattagctatccggtgctgcgcgatcggctgaaaataactcaggagcgctatcaggttatcggtacgccaacatcaatattaattgatggcgacggtagggtgctggactggcatcaggggatgcgtaagcccgatgaactacgaacggttttgcgccagctggcgcaacggtaa

SEQ ID NO: 174500 - DNA, 696 bp, Klebsiella oxytoca
atgaccgtcacgtctttgcgtcaaatggcgattgaaacgcgtcatttatataagcggttcggggaagttacggcgctggaggatattaatttgcgcatcgcacgcggcgagtttgttgccatcatgggcgcctccggttccggcaaaacgaccctgatgaacattcttacctgtctggataccgccagtgaaggacaggtgatcctggatggcaccgacgccgcggcgttggatgaagaggggcgccgtcgctttcgcgcgcagaaaattggcctcgtcttccagcagttccatctcatcccgtttctgacggcgctggaaaacatcatgctggcgcagcattaccacagcgtggtggatgagagcgccgccagagcggtgctggctcaggtgggacttgagcatcgcgtgacccatttaccgagccagctgtcgggcggggaacagcagcgcgtctgcattgcccgggcgctggttaacgagccgccggttatttttgccgatgagccgaccggtaaccttgacgaagagaacgagcagcgggtgctggatctgctgaccgatttacaccgccaggggcgaaccattgtgatggtgacccacaatccggcgctgggtcaattcgctgaccgcatcgtgcgtttgcagcacggaaagtatctcggcgaggaggtgaatcatcatgcgcatgcctga

SEQ ID NO: 174501 - DNA, 1131 bp, Klebsiella oxytoca
atggccgctaagcgcgacatgctgtggctgctggtgtggcgagcgctgcggctgagaatgcagcgggtcagcgtggtgtttgccgcgctggcggtaggggcgaccatcgtgaccgcactctccgccgtgtggttcgatatcaatagcaaaatgagcgaagagctgcgcaccttcggcgccaatttttatattggtccgggccacggcgccagcatgccgcagccggagcttcaggccattcttgatggcgcgccggcgggcctgattcacggcgccagtccgtggctgtacggtacggcgcgtactgagctggagaaagtggtgatggtcggggtgtggtttgagtcgctgcaaaagctggtgccttactggcaggtcaacggcagctggatcggcgtcagctttgacgatcgcaacgcgatgattggcgtcaaactggcgcagcgcctggcactgaatgttggcgatagcgtgacgctggtagaccatagccggcgtaaaacgctgctgattaaaggcatcgtagaggcgggggacgcgaccgacaatatgctgatcgtcagcctcgatgtggcgcagtcctggctgcaaaagcccggcgcgatcagtcacgggctgcttagcgtcagcaatgacctgggccaggtggagcgctatgccagccagctgcagcatcagtacccgaaccttgagattcgtccggtgcgcaaagtgtcggcttccgaggggcaggtgctggataaaattaaggggctgatggggctggtgtcgatggtgatcctcgcgctgtcgtccctgtgcgttaacaccactctgatggcgattgtcggtgagcgggcgaaagagtttgcgctgcaaaaagcgctgggcgccagcaacggcgatattacccgccagatgctgctggagaccagcattattaccctcgcggcggtggtctgcggctgggggctgggctatctgttggcgcagctgctgggactaacggtgtttaacgccagcatctcgctgcgtctgccggtgctgccgctgaccctggttctgtctttactggtcgccctgctggcggccattgttccggtgcggcgcgcggtgagcgtcgaaccggcgaaagtgctgaaaggagagtaa

SEQ ID NO: 174502 - DNA, 1284 bp, Klebsiella oxytoca
atgctgtggcgaatgatctaccagtcgtgggggcgcaacctgcggcgcaaagcgctggcggtattgaccgtgtttctggcgaccagcctgatctcggcgctgctggcggtctctatcgatatcggcgacaagatgtcccgcgagctgaaatcctacggcgccaatattttaattgagcccgccgggcaggcggcgctgcccgcgctgttcagcgagcaaagcaacccgctggccagcgacgactttcttgatgaatccgagctgccgaacatcaaagatattttctggcgcaataacatcgttggctttgccccgatgctcggcggcgaggtaaacgtggcaggacaggatattcgcgtgctgggcactttttttagccagccggtcagtatcccggatgaagaggggtacgagaccggacagcggacggtcagccccttctggcaggtgaccggcgcatggccgcaggagccggtcggcgagacgccgcaaacgctggtcggtcacgcgctggcgcgaaactatggctggcagcccggcgatcgcctggtcctcaacgttgcggatagggtgctgaacgtccaggtgagcggtattttgtccagcggcggcgatgaggataaccaactggtgatgccgcttagcgtcgtgcagcagctgctcggtctaccgggaaaagtgcaggcgatccgcgtctcggcgctgacggtaccggagaacgagctgtcgcgccgtgcccgtgaggatctcgaggcgctgaatgccgaagagtacgatctctggtactgcaccgcctacgtatcgtccatcgcccaccagctggaagaggccatttccggcgccgaggtgcgtccggtctggcaggttgctgcttcggaaggtgtggttatcgacaaaattcagctgctgatgggggtggtgactctggccgcgctggctgcggcggcgatgggcatcgcctcgttgatgaccagcacgattatggagcgcgccaaagagattggtctcatgaaagcgctgggcgcccgccagtggcaaattttgctgctgttttaccttgaggcggcgctgggcggcctggtcggcggcgcattgggctgtatcgccggttgggggctggcaaaggctattggcctgatgctgtttgctacgccgctgaattttgcctgggtggtggtgccctgcgtgctggtgatagcggtgctgattgctttaatcggtacctggttcccggcccgccggatcgctcgtctttaccctgtggaggtgctatatggccgctaa

SEQ ID NO: 174503 - DNA, 1380 bp, Klebsiella oxytoca
atgagctattttttcgtcacgacgctacaggccttttcctgcattgcgctgctttccgccgtactctgggcgcgcggcgcgcctcccgtcctgcgtccgctggtctggacgctgcttaccgcgctgggctgcggactactggccgggttgtatattcgcccgagccagatgctggagcttctgctggtcggcgctgaaatcctcgtatcgctgctgtttttactgagcttcagctggtcttcgccgcgcgttcgctatctgtggcaatggctcctcactttcggcgcagcccggcactgggcgctggacccgaacctgggcggattgacctccacgcacgttctgaacaccgatctgctgctgaatatcaccgcgctggctgcggcgttcgcgctgctgtgccttgcctgcgcgctctgcgccatgctgctgcgcagaatgcgcggcttctactggccgctggccctgctgctgttggtcctgctgtggctaccgctcggcggtaacctgctgctgctgttgatgaagctacaggtgctaccgctgctgaaaccgctgctgagctttgtcgccagggtgaccaacaacgcggcgatgtataactgggccgccgccgcgatactgctgctgctgtgtctgtgctggatcccggcgctacgccgctattattgggcggttaaagccgcggaggaccccatctcccgccgccttgcgctggccgaacgccgtaaagccagccgtttgtggttgaccaccgtttgctgcgcgctggcgattatcggcggccagctatggtggaatctggtggcttcgcagccgccgcgcttgtccgaggcgcaggcggttacgctggccgccgacggccaggtgcatattccggtcgagcaggttcgagatggcaaactgcatcgcttcgtctgggtggcggacgacggcaaagcgattcgcttttttatcattaaccgctatcccgataagctgcgctttggcgtggtgtttgacgcctgcctgctgtgcggcgatcagggctacgttatggaaggcaatcaggtgatttgtgtcgcctgcggtgtgcacatttttatcccctcgattggcaagcccggcggctgtaacccggtgccgatcgacggctggcgcaacgatgacaaacagctgacgatacccggcgcggcgctggccagcggaggtaactatttctctaccgtcctgacgattaacgtcaccgacccggtggatggctccaccctgaccaacacccgcgccgactacaaatacagctatggcggtaaaacctggttcttctcctctgaagccaactatgaccgtttccgcaatgcgccagagcagtttgtgcccgacgcggtgaaggaggagtaa

SEQ ID NO: 174504 - DNA, 528 bp, Klebsiella oxytoca
atgaccatgaagaagaccctgatgatcagcgccaccctggccagtatcttcaccgcgcccgcggcgctggcctttaaagagtatccggccggcgagccggtcaccatgaatgaaatggagatcgccgcggtttacctgcagcctattgatatggagccgcgcggcatggggctgccggcagcgaagtcggatatccatctggaagcggatattcacgcggtagaaggcggtaaaaatggttttggcgcaggtgaatggatcccttatctgacgatctcctacaccctggtcaatagcgataccggcgaaaaacaggaaggcacctttatgccgatggtggcgagcgacggcccgcactacggcgcgaacatcaagatgatgggcgtgggtaactataaagtcacctaccacattgacccaccgtcgaaagccgggatgcaccgccataccgatagcgaaaccggcgtcggccgctggtggaagccgtttgatgtgagctatgagtttaaatatgtcggtctgaactaa

SEQ ID NO: 174505 - DNA, 1941 bp, Klebsiella oxytoca
atgactggccctcgttccttcctgctgctgatgctgttgagcctgttgtttggcagcgcgtgcgcgatggcgcagacccagtacgcgccttatatcgaagatatcgagcaacgtcttgataaaacggcagaactttatcagcagcaaaaaaataccgacgcgcggcgcgaagtgcaaatggcctactttgaagtgtttgaaaaccttgaagggccaattcggatcaatatctcggcgcgtaagagctacgagatggagagcactttcggtgagatccgtcgcatgatcggtgagggcaaaccgatcggcgaggtgcaggcacgtatcgacgggctgaagcaggcgctgcgtgaagttgagccggtgctggacggcgggcatcggctggtggcggaagagcagcataccgcgcttacgcgcgatgacattgcgcagcactggcaggagagcttccgcacccttgacgacaggctggcgcaggcggtaacggagtatcaggccggcaactacgcgcaggccagccagcaggtgcagcaggcgcagtatcagggatttaaaaactccggaatggaaacctcggtgcggcaaaatcgctcggcgaaggaagcggccgccattaaccaacagtttagcgcgctgctgactctgaccgcccagcctgaccgcctgaacgaggtgtcgtatcaggtcaccacgctattacaggatctggaagatattctgccgggtctgccaaccacccgcgacgatcggccgatgggcgctccctctggcgccgataacgccgcgctggctgatgaaacgaccgcccgcgcggactgggcaagcgtcgcccagggaattaaccagagcatcaacgccgcgctaacgcgctatcaaaatggggaggggcaggaggcgatcctcgacgtacaggacacctatttcgaccgctttgaagccaccgggatggagaacaaaatcggttctcgcgatgcggcctttaaaacttctctggaggcccattttacccgtatggtcagcctgatgaaggccggacagccgcaggagaggctggccgcggaagccgccgcccttgaggcggatctgcaaaaagcggtcaccatgcttggcgaaggcgaagagacccagtggagcctgctgctctatagcctgatgatcatcgtgcgcgaagggctggaagcgctgctgattgtggcggctatcgtcgcgtatctggttaaaaacaaccatcacgacaaactgccgctgatccgccagtcggtgatggtggcgctggtcgccagcgtggcgacggcgtttatcttccagctgttgtttactcaatccggcgccagccgcgagctgctggaggggatcactatgctgattgcggtagtgatgctgttccttatgagctactggctactgtccaaagttgaggcccgccactggaaggcctggcttgagggcaaactctcccattcgctgtcgcgcggttcgctggtgggactgtggttaaccagcttccttgcggtctaccgcgagggggccgaaacggtgctgttctattacgccctgattggcgatgcccaggggctgccgggccatcttgccatcggcgccgggtttgttatcggctgtgtcgttctgctgatcgcctggctcgtcatgcgctactcggtggtccggctaccgctcaaacccttcttcctgttcaccggcggttttatgtacctgatggcgtttgtcttcgctggaaaaggggtactggaactggtggagggcaaactatttcagccaacgctgatcgccggaataccggaaatcagctggctgggaatttatccctatgtggaaacgctattgccgcagggcatattgctgctcgcggcgctggcggcgctatggatcatgcgccgtcgtcaggcacccgctgaaaccataaaaacgcattgctaa

SEQ ID NO: 174506 - DNA, 807 bp, Klebsiella oxytoca
ttgcactctgtattaaggatgccaaccgatgggaaaatgaagcgcatgcgtaaaggtaaaattattgttttaattttgatggtgttttgtattcttatttttgcaattgttgtcgcctggtttttactgtccaaagacaattatgccgtaccggaaaatgcggcgacagaaaatgcggtgctgcaggtggcgggtttaaccagcaacgaacctcgcgatccgcaggcgctgaaatcgctctatgcaaaacgggtgatcgtccgtcaggttaatctggatagcggccagtttgttgcgccgggagaggataccgctgggcaaaaaggctgcggtgaaccggcagtagcgcagaacccgacgcccattcgccagcgctgcccgcgggcagtggtttatcttattcgcaataataataatgaaattcagcaggttatactgcccttttacggtaaaggggcaaaatcgatgatgtatggcctgatcgcgctggctaccgatggtcgcacggtaaaagacctgctgtattatcagcaaaatgagacgccgctgctgggcgcgcgcgtgacagatcccgaatggcgtcgccaatggccgggcaaaaaaatacgcgataataacggccagccggcgctgaaggtcgtacaaaatactcctggccagcacgatgattacaccgtggatggtatcagcggcgcgacgttaacctccgtcggcgtcgagaagagtattaattattgggtgggtgagcagggctacggcaattttctccggcagctacagcataaccctgagatattacgccgttaa

SEQ ID NO: 174507 - DNA, 1083 bp, Klebsiella oxytoca
gtgcaaacaggacatcgcttccaggccacggatctgcatcattttgttaaaacccttttcgcccatatgggaagctcccccaccgaagcgtcgcttatcgccgaccatctggttgccgccaacctggccggacatgactcccacggcgtaggcatgatcccgagctacgtacgatcccacgcgcagggctatctgcagctcaaccgccacgccagcgtgatgaaggacgcgggtgcggttgtcacgctggacggcaacggcggcttcggccaggtcgtggcccatgaagccatgcagatcggtattgagaaggcgaaacagcacggtatggccgccgtggcgctgcgcaatgcgcatcatattggccgcatcggctactgggcggaacagtgcgccgccgccggaatgatctctatccatttcgtaaacgtggttggcaacgtgatggtcgccccgttccgcggcaaagatagccgcttcggcacgaacccgctgtgcgtggtttttccgcgcgccggccatccgccgctgctgctggattacgccaccagcgccatcgcttttggtaaaacccgcgttgcctggcataaaggcgtgccggtccccgcggggtcgctgatcgacgctcgcggcgtccccacgaccgacccggcggtgatgcagacgtcgccgctgggggcgctgctgacctttgccgaacacaaaggctacgcgctggcgacgctgtgcgaaattatcggcggcgcggtatccggcggtaaaacctcgcatcaggagaccctgcagggcagcgtggacactatcttcaactgcatgaccaccattattctcagcccggaagcgttcgatgcgccggatatgcagcgcgagaccgaagcgtttatcgactggtgtaaacagtcgccgcacgagccggacgcgccgattctggccccgggcgagtgggaagaggctaaccgccagcagcgcctggcggagggcattccgctggacgccggaagctggcaggcgatttgcgccgccgccgaagaagtcggtttacccgccgacaccctcgcgcggctgcggcagaagctggcctga

SEQ ID NO: 174508 - DNA, 2151 bp, Klebsiella oxytoca
atgaaaaaaatcacgagcgtttgcccttattgcggggccggttgcaaacttaagctggtcgtcgaaaacaataaaattatccgagccgaagccgctgatggcgtcaccaaccaaaatcagctgtgccttaaaggctattacggctgggattttctcaacgatacccagctgctgacgccgcgtctgcagcagccgatgattcgctatcaaaaaggcggcaaattcaccccggtaagctgggatgaagctatccgctatacggcgaaaaaactgcgtgaaataaaggagaagcatggcccgcgcgccattatgacgaccggttcatcccgcggtaccggcaatgaaaccaactatgtgatgcagaagttcgcccgcggcgtgctccacaccaataacgtcgactgctgcgcccgcgtctgccacggcccgtcggtagccggacttcagctggcgctgggtaacggcgcgatgagcaactcgatcagcgatatcgaaaactcaaaatgcctgctggtcttcggctataactgcgccgactctcaccctatcgtcgcccgccgggtgattaaagcccgggaaaacggcgcgaaaatcatcgtctgcgacccgcgccgtatcgaaaccgcgcgcatcgccgatcgccatctgcagctcaacaacggcagcaatatggcgctggtcaacgccttcgcccacgtcctgctggaagaggatctctataaccacgattacgtcgaccgttttaccgaggggctggacgcctatcgcgaaacggtaaaagactattcacctgaagccgttgaggagatagtcggcgtgccggccgctgaaattcgccaggcgatgcgcatgtttgccgccgccccctccgcgaccatcatgtggggcatgggcgtcacccagttcggccaggcggtggacgtcgtcagagggctggccagcctcgcgctgttaaccggtaacctcggacgcgccaacgtcggcgtaggcccggtgcgcgggcaaaacaacgttcagggcgcctgcgatatgggcgtattgccaaatatgttccccggataccaggacgtcaccgacgccagcgttcgcgataagtttgctaaagcatggggcgttaacccggcggtcatggacgaccaggtcggcacccgaatcaccgaagtgccgcacaaagcgctggccggcgaaatcaaagcctactacatcatgggggaagatccgctgcaaacggaagccgatttgggcctggtgcgcaaagggattgaggcgctcgatttcgtggtggtgcaggatatctttatgaccaaaaccgcagagatcgccgatgtgctgctgcccgccacctcctggggcgaacacggcggcgtcttcacctgcgccgatcgcggtttccagcgcttcgagcaggcggttattgccaccggcaacgttaagcgcgactgggaaatcatttgcctgctggccagcgaaatgggctacccgatgcattacgacaataaccagcaaatctgggacgaaatgcgcgagctttgccccctgttctacggcgtcacttatgaaaaaatgggcgatatgaaccacgttcagtggccgtgtccgacgctggatcaccccgggacgccgtggctgtataaagataatctcttcgacacgccgaccggcaaaggccagctgtttgccgccccgtggcgagcgccggccgaaaccccggatgaagcctacccgctggtgctctgtaccgtgcgcgaagtgggccactactcgtgccgttcgatgaccggtaactgcgcggccctgcagtcgcttgccgatgagccgggccgggtgcaaatcaatcgcgccgacgcgcagcgcctcggcatcgccgatcagcagctggtgtgggtgagctcgcgacgcggtaaggtgattacccgcgccgacattagcgatcgcattaaccagggcgcggtgtatatgacctaccagtggtgggtgggtgcctgtaacgagctgacgcaggataatctcgatccgatctcgaaaacgccggaaaccaaatattgtgcggtaaaggtagaggctattgcggatcagcgctgggccgagcagtatgcatggaacagctacagcgagatgaaagcccgcctgaaagcggccgtgaacgtgtaa

SEQ ID NO: 174509 - DNA, 1152 bp, Klebsiella oxytoca
atggctgtgtccccttcactgatcgccgaggccattcgctggcgacgtgattttcatgcttgccctgagctggggtatcaggaacaggaaacgtcgcgccgggtggctgaactgctcgcttcatttggccttcaggtgcatcgcgggctggcgggtacgggcgtggtcgcgacgctggagaacggccccggtccggtaattggcctgcgggccgatatggatgcgctgccgataaccgagctgagcgacgtcggctataaatcgcgaaacccgggcgtgatgcacgcctgcggccacgacggccatagcgcgatgctgctggcgacggcggcccatctggcgcagacccgatgctttcgcggcaccgtgcactttgtttttcagcctgctgaagagaacctgggcggcgcgcgtaaaatggtggaagaggggctgtttgcgcgcttcccgatggatgccatttacgcgctgcacaactggccgggtatgccgctgggccaggtggcgatcggcagcggagcgatgatggcctctctcgatgcgtttgaaatcaccctgaccggcaagagctgccatgcggcgatgccggagcgcggggcggacccgattgtcgccgcggcgcagctgattatggcgctgcaaaccattccgtcgcgccgcctgtcgccgcaggaatccacggtggtaagcattacccagatttccggcggggaggcgattaacgtcctgccggataaagtcgtgctgcgcggcacctttcgctgcctgaacaaccaggtgcgcgagcgggtcagggggctgatcgagagctatgtcgccgcccagccgcaggtatcagacgtggaaggcaaaatcgcctggtatcccggctatccggtgaccaccaaccatcctgctgaagcgcagaaggttcgtgaggtggcgagtgcgcttctgggcgagtcggcggtgatctggaacggtaatccgtccatggcatcggaagattttgcctgcatgctggaggcctgcccgggcgcttatttctggatcggcaccgatggcgagacggcgtcaaagccgctgcataatgccggctatgattttaacgatgaactgattccgcacggcgtggcgctgtggacgacgctggtggagacgctgctggcgtaa

SEQ ID NO: 174510 - DNA, 1206 bp, Klebsiella oxytoca
atgttcaacccagagcagaatcgtcttgcccccacgctggcgatgatcatggcggcttcattagtgggatttatcaccggatacacggtgcccttaatcagtctggagctggcgcagcagcagattgataccgtttacgtcggcctgctggccgcgcttccgccagcggggatgatgatctcctccttcctctcacccgcgctgtgccggcgtttcgagatggggcttctgctctccgtcagcctggtggcgctggcggcagctacgatcgcctcctgcctgtcgtttgatatgcttcatctcctgctgccgcgtctggtgaccggcctggcgtcaggggtaattatcgtcattggcgaaagctggatcaccggcggcgcggcggggaaaaatcgggccaccctgaccggcatttatgcctccgcctttaccggctgtcagctggcggggccgctgctgatctccgccggagaggcctggcaatcctggacgctgctgctggtcggcgtggtgaccctcgcctgcctgctgatgctgcgccacctgccaaccggcagccgcgaacggctggcggaacgggccagctggcgcagcctcggcgcttttttaccggtgctggcttccggcgttttctgctttgccttttttgatgccagcatactggcgctgctgccgctttacggtatggataaagggctgaatgaagtgacggcggtattgctggttacggtagtacttaccggcgatgccgtatttcaggcgccgctgggctggattgccgaccgcttcggcatccgccgcgtacatctgacctgcgcaatggtcttctgcctcgccctgctggccctgccgttcctgctggcatcgtacatccagctgattgtcggctgcctgattctcggcgccgcggcgggggcactctataccctatcgctggtccgcgccgggaaaaccttctccgggcagaagctgattatgatcaacgccctgctgggcttcttttggtctgcaggcagcgtggccggcccggtggtcagcggcttgttgattagcgtctcgggctatgacggcctgcttatcacgctgtttgtcagcggcgcgctgttcctgctgattcaatgcctgggtaaaaacgaaaaagcgctactggcggacgaacgtgagcgcgaagaagagagggatgatattcgcgaggcggcgcagtaa

SEQ ID NO: 174511 - DNA, 723 bp, Klebsiella oxytoca
gtgattcacattcataatttacacaagcgcttcggcgacagccacgttctgcgcggcatcagctgcgatattaagccacaggaagtagtctgtatcattgggccgtccggttccgggaaaagcaccttcctgcgctgcatgaacgcgctggaaaccgttagcgaaggcgaagtcgaggtgaacggctatgccgctcacgatcgcgcgaccgacctgaataagatgcgggaaagcgttggtatggtttttcagcgcttcaatctgttcccgcacaaaacggtgctggaaaacctgattatggccccgatgagcctgcgcggcatggcgcgtgcggaggcaacgcatctggcggaagagctgttggcgaaagtcggactgagcgataagcgcgacgcctggccctccagcctttccggcggccagcagcagcgcgtggccatcgcgcgcgcgctggcgatgaagccatcgattatgctgtttgatgagcccacttcggcgctcgatcctgagctggtgggcgacgtgctggaggtgatgaaaaatctcgccagcgaagggatgaccatggtgatcgtaacccacgagatgggctttgcccgtgaagtggccgaccgggttatctttatcgaccagggcatcattcaggaagagggtaaaccggcgcagatctttggcgcgccgactaacccgcgcaccgccgcgtttttaagtaaagtgctgtaa

SEQ ID NO: 174512 - DNA, 768 bp, Klebsiella oxytoca
atgacgggattccgttgggagatcattgaggagtacggtccgctgtttatggacggtgccctgatgaccattaaatgtaccattatctgcgtgatcctcggcaccctgtggggactgaccctcgggctggggcgcatggcgaaagccgaacatgggatatggaagtacgttctgcgttacctggtgcagtttccggtgcgcttttacgtcagcgcgtttcgcggcacgccgctgttcgtgcaaattatggtggtgcactttgcgctggtgccgctgtttatcaatccccgcgacggtttgctggtgaccagcggcatgatgagcgccgattttgcccgcgagctgcgctcaaactatggcgcgtttctctcctgtatcgtggcgattacgctgaacgccggggcttacgtgtcggagatcttccgcgccgggatccagtcgatcgataaggggcaaatggaagcttcccgcgcgctgggaatgccgtggtggaaaaccatgcgtcaggtgattctgccgcaggcgtttcgccgcatactgcctccgctgggcaacaacgccatcgccatcgtcaaggactcctcgctggcgtcggctattggtctggcggacctggcctacgccgcgcgcaccgtttccggcgcttacgccacctactgggaaccctacctgaccatctctctggtgtactgggttattactttcctgctggcgcagctggttaaccgtctggaaaagaggtttggcaaaagtgattcacattcataa

SEQ ID NO: 174513 - DNA, 771 bp, Klebsiella oxytoca
atggttaagaactggatgaaagcatgttgcctggtggcagcaatgatcggcaccgctcaggcggctcagcaaacgtatgtggtgggctccggcggcacctatcgcccgtttgaatttgagaacagccaaaaacagctggaaggttttgatatcgatatcattaaagcgatcgccaaagcggaaggctttgatatcaaactggtcaatacgccgtgggaagggatcttcgccaccctcagtaccggcgatcgcgacattattatttccgggatcaccatcaccgataagcgtaagcaaatggtggatttctccgccccttatttcccggccgagcagtccatcgtcgtgccggcggattcgaaagtcacctcccttgaggcgctgaaaaatgagaaagtcggcgtggtgaactccagcaccggcgatattgtggtttccgaggtgctgggtaagaacagcacgtcaatcaagcgttttgataataccccgctgatgctgcaggagctgtttgaagacggcgtaagcgccgcggtcggcgacgtcggcgtggtgaaatattacattaagcagcaccccgagaagcagttcaagctggtgccggatgccaaatttgagcgccagtatttcggcatcgcggtggccaaaggcaacagcgagctgcaggcgaaaataaacgccggtttacagaagatcgtcgctgacggcacttacgccaaaatctataaaacctggttcgacgagaacgttccgacactgccagcgcagcaataa

SEQ ID NO: 174514 - DNA, 900 bp, Klebsiella oxytoca
atgaaaacggtggttaaaagagagaagggacgggtggacctgttcggtgagcgttttcgcgctcgcgcgcatcaactgtcgccgcgtttgctggcggtggtgagctatatcaacgaaaaccgggaagcggtgctggagcgcacggctatggaaatcgccgccgcgacgaatacctcggacgccacggtggtgcgcgccatccaggcgctcggcttcgccggcctgcgggagctgaagcagaccatggagcgctggttcggcccgtcggcgacctcgtcggaaaaaatgatctccacggtgagcgccttgtccagcgacgtcaattcgagcatcgatttcgtgctggacgggcatcagcgggcctgcgaagtgctgtcgcgccccgccaaccgtgcggcggtggcccaggcggtggcgctgctgaccgacgcccgccaggtggggattttcgggatcggcgcctcgggcattctggcggaatataccgcccggctgctgagccgcatcggtctgccttcgtacgtgatgaaccgcaccgggtttagcctcgccgagcagctgataggcctgcagcgcggcgacgtgctgattatgatggggcaaaagtcgccgcaccgggaggggatgacgaccctgcgagaggcccggcgactgggaataccgacgattttgctgacccaggcggtggattcccgctttagccaggaggcgcaggtggtgattgaggtgccgcgcggcggcgataatggtcgggtgccgctgcacggtacggtgctggtatgcctggagatgattgtgctgtcggtcgcctccaccgcgccgcaaaaaacggtgaaatcgatgaagcggatcaatgaattgcatcgggctattggtaaatccggcggtaaacgaagctaa

SEQ ID NO: 174515 - DNA, 948 bp, Klebsiella oxytoca
atgcgttggttcgtttctctgctggtgctgctggcgggcgttgcctcggccgccgatacgcaaacctttaccgacgacttaggtcgcacggtcaccgttccacgacatccgcagcgcattgtgtcgatgcacgatctggatatcaccatcccgctgattgagcttggcgtcccgccggtggccagccatggccggacgcgtccggacggcagccactttttacgcgccagcgctcagctgaccggcgttgattttgataacagcgcgattcggtttatcggcacggcggatatcgatctcgaggcggtagccgccgcgaaaccggacctgattattaccgagcccagccgccacgtttcggtggagcagctggagaagattgcgccgacggtcagcatcgaccacctgcagggcagcgcgccgcgcatctatagcaagctggcgcagctcaccggcacccagccgcggttattgattctcgaacgccgctatcaggcgcagattgcccggctgaagtcgattgtggacacgcaaaaaatcgtggtttcggtgattcaggccaacaacggcaaggttaccgtgcatcacgcctatcatgcgctgggacgcgtgctgcgcgatgccggatttcgctttccgccgctgatcgacaacatccccgatggccagcgtattgacgtcagcgccgagcagctaccggcgctggacgccgatttcgtatttgccacctggcgttccgataccggcggcaggtcgcaggatgagctgcaggcgatggagagcgtgatgcccggctggtgcgactttatgcgcgcctgccgcaccgggcgctatattctgctgccgcgcgaggaggttatctctaactcctacgctgcgctgtcgctgatggtcgcccaggtgcagtcgcacattgccggtcgtcctttgcccgagggattgcaatga

SEQ ID NO: 174516 - DNA, 1053 bp, Klebsiella oxytoca
atgaaaaatgccgtccgtcgcgccggctttcggccgctgacctgcggccgctggcacattctgctacggcccgcggcattaaacatcgccgctgttgcgctgctcgtcatcctgctgctggcgctgtttggcctgacccgcggcagtttcccgatgccctccggtaccctgttccatgcgctgctgggtggggaaaacgtgggcgaacagcagcgatttattctgtttgatatccgcctgccgaggctgtttatggcgctgctgtgcggggcgatgctcggtctggccggcgcggcgatgcagagcattacccgcaacggtctggcggatcccgggcttatcggggtgaaggagggggccagcattgtcgtcctggcgctggtgctgttcttcccggcggtgggcctggtctggcggccgctggcgggaatgctcggcggcgtgctggtggcgctgctggttctggcgctggcccgcgattgttcgcgcccgcgctttattctcattggcatcggcgtgtcgtggacgctggcggcggcggtcggtatttttatgaccaccgccgacgtgcgcgatgtacaaacggcgatgatctggctggcggggagtttgcacgcggcgacctggccgctgttggtcgttgccttctgctgggcgctgcccggggcgatgatcctttttttgaccgccagggccgccgatgtggcgctgctcggcgaccgcacggccatcggcctcggcgtacgtctgcagcagctcaccctgttgcgctttttcgcgccggtgctgctcacctccgccagcgtctcctgcgtcggtagccttggctttgttggcctgatggcgccgcatatggcgcgttttctgctgcgcggcggccaggtggcgctgctctgcggcagcgcgttaattggcgcgctgctggtgttagtcaccgataccattggccgactggcgttcgcgccgctgcagatccccgcagggatcgtcatcgctctggtcggttgcccgttttttatcgttctgctctggcgtcgtcgtgatgccctgtaa

SEQ ID NO: 174517 - DNA, 1026 bp, Klebsiella oxytoca
atgagcgcctccgcgctgctgcttcagcgccgacaatcccggccccggctggcgctggtattgctgagcctgctgctgctgggcggctcgctggtgcatctcgggctcggcgcgcgctggattgccccgcaaacggtgttgcaggcgctgttccattacgatccgcgcaattttgaccaccgaattatcgttgatttacgtctggtacgtctcgcggcggcgctgcttaccggcgcggcgctcggcgtggcgggcctgctgctgcaaaccgtgatccgcaacccgctgggtgagccgcatattctcggtcttaacgccggcgcttcgctggcggtggtggcgacatcggcgctggggatcagcctcggcggcgtcgcgttagccaggccgctgaccgccgcctgcggcgcggcgctgctgtttggcggcgtgatgctgctgtcgtcgtccggtcgcggtggcgtcacgccgctacgcattaccctgtgcggggtggcgctgtcggcctttgcctcggcggtgacggcggcgattctgatcctcgatgaacaaacgctactggcgatgcgtacctggctggcgggcgatcttgccgggctgaactggcaaacgctgtgcgctgcgctacttccggcgctggcggggctgacgatcgcgctgatcattgccccgcgtctgaacgtgctggcgctgggcgataaggtcgcgctggggctgggggtgaaaatcgttcagacccgcctgctggggctggccgccattgcgctattgtgcggctccgcggtggcggtggccgggccgatcggctttgtcgggctggtggtcccccacgcggtgcgccggctgattagcgaagatattcgcctggcgctgccgctggccgctccggttggcgccctggtgctgctgctggcggatatcgccgcccgcacgctggcggccccccaggagctggcgaccggcgcaatgaccgcgctggtgggggcgccggtgtttattgttatcgccgcgaggttttttaaatga

SEQ ID NO: 174518 - DNA, 822 bp, Klebsiella oxytoca
atgccacagcgggtgttgcctgcagagcagggaatcgtccttgattccctgtcggccggatatggccagacgttaattatcgacaatattcatctcaccattcctcacgggaaaatgaccgttctggccggcgccaacggttcgggtaaatcgacgctgctgtcgactatcgcccggatgctcaagccgctggggggctgcgtacgtctggacggcgaggtgattcaccagatgccgacccgggaggtttcccgtcggctgggcattctgccgcaatcgccgctgactccggaggggctgacggtttttgaactggtttcgcgcgggcgctatccgtggcaggggctgatgcggcaatggtcgcaagccgatgaacgggcggtggaagaggcgctacggctcaccggcaccgcagaattcgctcatttaccggtggatagcctctccggcggccagcgccagcgctgctggatcgcaatggccctcgctcagcaaacggcgacgattctgctggatgaacccacaacctggctcgatctgcgctatcaggtcgatatcctcgaactgctgcaaactttaacccgcgaacacggccgcaccgtggtgaccgtcctgcacgacctgaactttgcggtgaactacgccgacctgctggtatttctcaaaaaagggcagatcgccggggtgattaatgaacaggaaatctgcacgccggagctgatcaaaaacgtctttgacgtggacgttcagatgtcgctcaacccgcagaccggcaagcccttttttatgccgttccgcgctcgtgaggagaaagctttatga

SEQ ID NO: 174519 - DNA, 2154 bp, Klebsiella oxytoca
atgactccattaaatgtcccttcttcggcattaaaagggcgtgcgcttttttcactgatttttttcacctcaccgggattattggcagcggttaatggcgccgatacaacaaaaaaaaccgccgacgagaccatgacggtcgtggccgacggcagcaggcaaagcgccactaacggttatcagccggtcaatacgtcaaccgctaccctgacctccatgccgatgctggatattcctcaggtcgtcaatactgtcagcgaacaggtgctgcaggatcagcacgcgacgaacctcgatgaagcgctgtataacgtcgccaacgtggtgcaaaccaataccctcggcggaacccaggatgcctttacccgccgcggcttcggcgctaaccgcgatggttcaatcatgaccaacggcttgcgcaccgtactgccgcgcagttttaccgccgccaccgaacgcgtcgaagtgcttaaaggcccggcctcaacgctgtacggtattctcgaccccggcggattaatcaacgtggtgaccaaacgcccggagcgcacttttggcggctctgtttccgccacctccaccagctttggcggcggtaccggccgatttgacgtcaccggccccattgacgggacgccgctggcgtatcgggtgattggcgaatatcagcatgaagattactggcgtaatttcggcaaagagaagagcagctttattaacccctctctgacctggttcggtgagcgggcgacggtgaacgtgtcatattcgcaccgtaactacagtactcccttcgatcgcggcaccatcttcgatctgaacaccggtcatgcggtgaacgtcgaccgtaaaacccgttttgatgaaccgtttaatattaccgacggttattccgatctcgcgcagctgaatgccgaataccgtctcagcgacgcctggaccgcccgcttcgactacagctacagccaggatcattacaacgacgatcaggcccgggtaatggcctacgactcggcgaccggcaacctgacccgccgcgtcgatgccacacacggttcaacccagaaaatgcactcttcgcgagcggatttacagggtaacgtggttattggcggcttttacaacgagatcctcactggtctggcctatgagaattacgatctgctgcgcaccgatatgatccgctgtaagaacgtcaagggtttcaatatctataatccggtctacggtactgttggcaaatgctccagcgcttcggcatccgacagcgaccagcgcattcagcaggagagctacgcgggctacgttcaggacgcgctctatcttaccgataaatggattgccgttgccggagtgcgctatcagtattacacccagtacgccggtaagggccgcccgtttaacgtcaataccgacagcagcgaccaaaaatggacgccgaaagcgggcctggtttataagctgacgccgtccgtttcgttgttcggtaacgtagcgcagtcgtttatgccgcagtcctctatcgccagctatatcggcaacctgccgccggaagagtccacggcgtacgagctgggcgcaaagtttgagctgttcaacggcgtcaccgccaatattgcgctgtttgatattgataagcgcaacgttctctacacggaatccgtgggtgatgaaaccgtggcgaaaaccgccggtaaggtgcgctctcgcggcgtcgaagtcgacgtggccggatccttgaccgataacctgagcgtcatcgccagctacggctataccgatgcgaaggtcaccgacgatccggattacaaaggcaaaccgctgccgaacgtgccgaaacacaccggttcgctgttcctgagctatgacattcataacgtctacgacagcaatacgctgacggtgggcggcggcggtcgcgcggtgagcaaacgttccgggaccaacggcgcggattattatctgcagggctatgcggtggcggatgtgtttgccgcctataagatgaagctacaatatccggtcaccctgcaggttaacgtgaagaacctgttcgataagacctattacacctcctccatcggcaccaataacctcggtaaccagatcggcgatccgcgggaagtgcagtttacggtgaagatggatttttaa

SEQ ID NO: 174520 - DNA, 789 bp, Klebsiella oxytoca
atggtaaccgcgaacgccacttctcaggcggcatcgaccggcgcggcggtgtcgataagccatctgcatcatgcttttaccctcggcaaacggacggtgccggtgctggagaatatcagcctgcagttgcggcccggagaaagcgtcgcgctgctcggcccttcaggctgcggtaaatccactctgctgcggctgctggcgggactggagccgcagcaggccgggcaaattcagattgatgaggcggcgatgggcgggccggggcccgagcgaatactggtgtttcaggacccgaccctttatccgtggctgacggtgcggcaaaacgtgctgctggggccgcaggcgcaggggaaaaaggggcttgagccaaaggccgacgcgctgattgcgcgaatgggtctgcaggcgtttagtgaggcgttgccgcgccagctttccggcgggatggcgcagcgtgcggcgctggcgcgcgcgctgctgaatgaaccgcgtctgctgctgctcgacgaaccgttgggcaaactggattcgcttacccgcatcagcatgcagcgggagctgatcgccctgtggcagcagcagggctataccagcctgctggtcactcacgatatcgaagaggcgctgctactgtgcgatcgggtgttaatcatgtcgcctcggccggggcggattatcgccgagtttgcgctgccgctggcgtatcctcgccatcgcgacaatccgctgctgctgcagcatcgtcaggatattctgcgtattcttggccagggagaggattggtaa

SEQ ID NO: 174521 - DNA, 996 bp, Klebsiella oxytoca
atgtcaacgttttcgcctgaacgggcgctggcgcgcccggcaagcggcaggccgcggtggacggaaggctggctggccgccgcgctgtggatgctgggcggcttgtatacgctggcctggcccgatgccgggcggcgctggccgtttagcgaagggtgggcgctggcgcagttcaccctcggcggcgggctgctggtgctggcgctgagctaccgctactggcggcagcgggggacgcgtctgcagcatgccggaaagtggctggcgctgctgccgctgctctttgcgctgtgggaagggctgacggcaaagacggcatttttgccggtgccgtttttcgcgccgccgcaggcgctgattgaggtgctgcacgatgactggccgcgcctgctcgatagccttctgcattcgctggggctgctcgggctcggggtgctgctgggcaccagttgcggttttatcagcgggctggcgatcggctggtcccagcggatcggctactgggtgcatccggtgttacgtctgctggggccggtgccgtccaccgcgctgctgccgctgtgcctgtttatcttcccttccagctttggcgccagcgtgtttctgatcgcgctcagcacctggttcccggtgaccgtgctgacctggtccggggttatcggcatcgataaggcgtggtatgacgtggcgcgtaccctgggcgccagccagcgtttcctgatcctgcgcgtggcgatccccgccgccttgccgaacgtttttgtcggcctgtttatggggctgggcgcgtcgttttcggtgctgattgtcgccgaaatggtcggcgtgaaatccgggatcggcttttatctgcagtgggcgcagggctgggcggcctatcccaatatgtacgcggcgctgctggtgatggcgctgctttgctccggcctgattagcgggctgtttatggtgcgcgaccggctgctgagctggcagcggggagggatgcaatggtaa

SEQ ID NO: 174522 - DNA, 1038 bp, Klebsiella oxytoca
atgataacctctgctttttcccgccgtcgtttcttacgcttgaccggcagccttgcgctggccggcgcatccctgccgctttgggctcacgatatggcggctatggcgagcggtgaggaacacctggccctgcgcctggcgcagccgtacaaaatcaagctggcgattaacaaaagcgcggtgtgcctggcgccagtcgccgtcgccgagcagcagaagatcttcactaaatacaatctcgacgtggagttcgttaacttcggcaactcgacggacgtgctgctggaggcaattgccaccggcaaggccgacgctggcgtcgggatggcgctgcgctggctgaaggcgctggagcagggcttcgacgtgaagctcaccgccggaacccacggcggctgcctgaacctgctgacggcgaaaaactcgccgttcggcggcctggagagcctgaaggggcaaaccatcggcgtcaccgatatggcggggccggataaaaactttttcgccatcttgcttaagcgccacggtatcgatccgataagcgatgtgcagtggaaagtctatccggcggatttgctcagcgtggcgctggataaacgcgaaatcgccgccatcagcggcagcgaaccctttagctatcgtctgctggacaccggtaaatatcagcttatcgccagcaatatgaccggcgattatgccaggctgagctgctgcgtactgggggtcagcggtagcctggcgcgcgatcataaaccggccgctgccgcgctcacccaggcgattcttgaggcgcacagctatgccgccgcgcacccggagagcgtggcgcaatccttcctcgcccatgcgctgaataccaatgaggcggaggtcagcggcattctccacggccaggggcacggtcatcacgcggtgggcgaagcgtttgttaaagagctgacccagtacgcggtggatcttcagcgggtgcaggtcattaaaccgggaaccgatccccatcagtttgcggagagcatttatgtcaacgttttcgcctga

SEQ ID NO: 174523 - DNA, 975 bp, Klebsiella oxytoca
atgcgcagatttaatgttaccgctttaggcggcgcgatcatgctgctggtcctcagcggctatgcggcggctcaggagcgaatcaccctgcgaattgccgatcaaaaaggcggcatgcgttcgcagctggaagccgccaacgccctgcagaatctcccatatgagattaaatgggccgagtttccggccgccgcgccgctggcggaagcgcttaacgccggggcggtggatgcggggataatcggcgatgcgccgctgctgttcgcgctggctaacggcgcgccggttaaagccatcgccgtcgataaaagcaacccggccggcaccgcggtgctggtctcgcccggcagcgcgttgaaaagcgccgcggatttaaaaggcaaacgcatcgctaccggtaaaggatcgattggccactttgtggcgctgaaagcgctggagcaggcgggaatttcgccaaaggatgtgcagtgggtgtttctcggtccggtggacgccaaagtggcgctgctcaacggttcggttgatgcctgggcgacctgggagccgtacaccacgcagctggtgaagaccgccgaggggcagatcctggtcagcggcaaagggttgctgccgggcaacaccttcctggcggcaaccgatgataccctgaaggacccgcagaagcgcgcggcgctgcaggattacctcaatcgcctggccggcgccgagcgctgggcgtatgccaatctcgatagctacggtaaaaccctgggggagattattcgcttcccggcggatatcgcccgcgcgcagtttgccaatcgccagtcgcagtggcagcctctgaacgcgaagacggtcgcccagcagcagtcgacggcggatttttatctcgccaacgggctgatccgcgcgaagctggacgtgacgccgacgtttgataacggctttagcgtgcctgccgcgcaggcccatgcggaggcgacgccatga

SEQ ID NO: 174524 - DNA, 1146 bp, Klebsiella oxytoca
gtgaaacatccggctaccgatgagtgggcgcgacggctcgcggagattcgccacctgatggcggagcaggcggccagcctcgacgccagcggcgactttccccgcgacaatatcgaccgtctgcgccagcgcggctttttaagcctcgccgtaccgctgcagtacggcggggcaggtgccgatcttcccaggctccagcaggcgattgccgctattgcctggggcgaaccggcgacggcgctgattgtctgcatgcagtacctgcatcatctgcggctggcggaaaacgagaactggtccgagccgctgcgccaacgggtttttcacgatgccgttgagcggggaggattgatcaacagtctgcgcgtggagccggaactgggctccccggcgcgcggcggcctgccgcaaaccgtggcgacccgccgcgcggaagggtggcagattaatggccataaaatttataccaccggtattgaggggctgagctggctggccatctggggccgcagcgacgacgctccgccgctggtcggcacctggctggtgccgcgcgaaagtgacggtattagcgtcgtcaaaagctgggaccacggcggaatgcgggcaaccggcagccatgaagtggtgctcaacaacgtgcaggtggccgccgatcacgcggtggatgtatgggctgccgatgcgcctcccgcgccggatgctgaacagtttcgcctgtttgccaaccgccacacggcgctactggcggcaatttacgacagcatcgcgcgggcggcccgcgactggctggtgtcctggctgggtacgcgtatcccggggagccttgggcaaccgctttccagcctgccgcgggtgcaggaaaaagtcggccagattgacggctggctactggtcaatcgcagtctgctggaaaaggccgcgcagctgggcttttccgccattgaggcgaatctcgcgaaagtcacgattaccgacaacgccattcaggcggtaaacctggcgctggagctcaccggcaaccatggcctgagtcggcaaaatcctctggaacgccactatcgtaacgtgctttgcggacgggtacacaccccgcagagcgacagcgcgtggctggcggccggcaaatacgcttttcaaaaataa

SEQ ID NO: 174525 - DNA, 1086 bp, Klebsiella oxytoca
atgagcattcaatttctcggcatgatcggccaccgcctgtcgtcggaaaccatcgccccggtcggccccatttttgaccgcgattacatcgtgcgtttcgcgcaaacccacgaggccgccgggtttgaccgcctgctggtaggccactggtccgatcaacccgacggatttctggtgaccgcgctggcgggcctgtcgacgcaaaagatcggcttcctgttggctcatcgtcccggttttgtctcgccgaccctcgctgcgcgtaagttcgctacccttgaacatctgctgggcggacggctggctgtgcatatcatcagcggcggcaatgacgccgagcagcgccgcgacggcgattatctcgatcacgaccagcgctatgcgcgcaccgatgccttccttgagacccttcgcacggtgtggaccgccgaacagccggtggatatcgccaatgacttttatcaggcggaacaggcgtggtcggcgatacgcccgctgcaaaaaccgcatatccctctctacttcggcggctcgtcggaagccgctatcgccgtggccggcaaacacgccaatgttttcgctctgtggggtgagtcgctggcgcaaaccgaggaaaccatccagcgcgtgcgggccgaggcggcgaaacatcagcgagaaatcgacttcagcgtctcgttccggccgattatcgccgcgaccgaagctgaggcctgggaaaaagccgagcatattctgcacgtcgccaccgaacgggcggcgcagagcggggacggcttcaaagccaagcccgacagcgtcggggcgcagcgtctacgggccaccgcagcgcagggcaaggtggtagataaacgtctgtggaccggaattgcgcagctggtgggcggcggccacaactctaccgcgctggtaggcactccggaacaggttgctgacgcgctgctcgattattacgacctcggcgtgcgcaacttcctgatccgcggattcgatccgctcaacgatgcccaggagtacggtaaagcgctgctgccgatcgcccgcgaaaaagcggccctgcgcgccgcggcggagcgcgcatcgtga

SEQ ID NO: 174526 - DNA, 894 bp, Klebsiella oxytoca
atgcgcatcgacgacattgacgcactgctggccaccgtgcagttctcctcgcttaatcaggccgcggaatatctcggtattacccaatcggcgataacccgccgacttcagcgactggagcaaaccctcaacgtgacgctgcttgagcgtcagacccggccgctcaccctgaccgccgccgggcaccgggtttacgagcagtgcctgagcatcaagcgggagaccaaaaagctgtacggcctgctcgaccccgaggccgagccgcacggcatcctgcgtctcggggttccgcagagcgtggcggaaattgcgctgcagccggcgctgaccgcgctgcgccagcagtttcccgccctgagaccgcaggtgacctgcggctggagcgggctgctgcaaaagcgccttgaaagcgtcgagctggacggcgtgctggcgatggggccggaacagcaacgctttgctgagggctgcggcgggcgcttgctgtgcccgctggatattgcggtgattgcggccaaaagctggcgtcttcacgccggggcgctgcgcgactgcgcggaaaaaggctgggtgcttaatcccgacggctgcggcctgcgggccgggctgattcgcgagctgcagtcccaggggctgcgtctggcgctgaatgttgagaccgcgggtgcccagctgcaaatcagcctcgtggcgcaggggctggggcttggcctggtcccgcgcgccgcgctggccgccagcccgtggcgcgatgaggtgacaatattgacgctggcggatttccagcccgaggtgcatctgtggctggttcacgcgcagaatctggctaatctgagccagccgctgacttttttcgccggcaaagtcgttcagcagctaaacgtatctggctga

SEQ ID NO: 174527 - DNA, 597 bp, Klebsiella oxytoca
atgaccgcaccgcgagtggaaaaattacgccagtttattcaggaccttgatgccctgcatcgcgaatttgccgatgagccagccctgcttgacgccgtggctcagcgcctggccacgctggtaaaaaaagatgactggctgccggaagagtacaccctgccgcacccccaccactatcagcagtatctactgcatgccgattccggacagcgattttccatcgtcagcttcgtctgggggcctgggcaatcgacgccgattcacgatcatcgggtgtggggcgccatcggcatgctgcgcggcgcggaggagaatcagcgctaccgcctggacgagcgcggccagccggtggtcagcggcgttgccgaacgcctctcccctggtgaagtagaaaaagtctcttcccgcgatggcgatattcaccgggtgagcaacgccctcgcggatagcgtctcgatcagtattcacgtttacggcggcaatatcggcggcgtcaggcgcgcggtttataccccggaaggcctcgtcaaaccttttgtctccggttactccaatcgccacttgcccaatatctgggatctctcaaaggataattaa

SEQ ID NO: 174528 - DNA, 1581 bp, Klebsiella oxytoca
atgcccatctgttcttatcgcccgaccgctcagctgcgccaggcgctgcttgacggcgcggagctggcgctgatcgatgttcgcgaagaggccgactttgcccgcagccatccgctgtttgccgctaatctgccgctcagcaaactggagctggatgtttttcgacgcgtgccgcgcctgacgacgccgattaccgtctatgacggcggcgaaggtctggcggagcgggccgtcgagcgcctgcagagctggggttatcaggatgtcgcgctgctggaaggcggcctctcggggtggcaacgcagcggcggggagctgtttcaggacgtgaattcgccgagtaaagcgttcggcgagctggtagagagcgagcggcataccccctcgctgagcgccggggaagtgaaggcgctgctcgagggtcaacaggaggtggtggtcgtcgacgcgcgccgtttcgatgagtatcacaccatgaatattcccggcagcatcagcgtgcccggcggggagctggcgctgcgcatcgagggcctgattccgtcaccgcaggcgacggtgatcgtcaactgcgcggggcgcacgcgcagtattatcggcacgcagtcgctgcgcaacgccggtttgcccaatccggtctacgcgctgcgcaacggcaccatcggctggaccttagccgggcttgaccttgagcgcggccagcagcgccgctacgatgccgattttcgcgcctcagtcgaacgcgcgacggcggtgagacagctggcggagcgcgccggcgtcgcctttatagacaccgcaacccttcagcgctggctgcggcagcccgcgcgtacgacttacctgtttgacgttcgcagcccggaggagtacgccgcaggccatctgccgctgagcgttagcgcgcccggcgggcagctggtgcaggaaaccgaccatttcgccagcgtgcgcggagcgcggattgtgctgattgccgatgacgcgatacgcgcgccgataacggcgtcctggctggcgcagatggggtgggaagtggcggtgttaaatgatgcgcgccctgaagactttagcgagcgcggtacccccgcggccaaagtaccgccggggccgcaggcggaggagatttcgccacagcagttagcggaacagctgcgggtacccggcaccgtggtgctggacttcaccaccagcgccaactatgtcgcccggcatatcccgggcgcttactggctggttcgttcgcagctgcgccaggcgctggaggtgataccgcaaggagaacgttacgttgtcacctgcggcagcagcctgctggcccgctacgcagtgccggaggtagcggctttaaccggtaaaccggtgcagctgctgagcggcggcaccctggcgtggattgatgccggactggcgttggagcatggcgagacgcatctggcgacgccgcgcagcgatcgctatcagcgcccatatgaaggtaccgataactccccggcggcaatgcaggcctacctcgactgggagttcggcctggttgaacagctggcgcgcgatggtacgcacgggtttacggtattgtga

SEQ ID NO: 174529 - DNA, 456 bp, Klebsiella oxytoca
atggccattaagccttttaattaccagcaagacttttcctgcatcgattttcgccagcactcggagctctatcaggtaggaagaggcgaacagggcgtgttgttggttgagccctataaaagcgaaatccttccctactggcgctataaagatgaagcatccgcgactgaatctgccagggaaatttatcagctcttcgagttttatcgacagcagaatgatttcgttggtatggatatggcacgaaaatttattcagatgggctacacccgggcaaggcgttatgccaattacaaaggtggtaaaaaatatgcaaaggatggctgcctgaatccacgtggtaatgatcctgttaaggcagcagctgcggcagtctttaaacaatggtgggataaacttcggcaggatgaagattatctccagagaaaaaagaaacatcaggctcaatgggggtaa

SEQ ID NO: 174530 - DNA, 1299 bp, Klebsiella oxytoca
atgacagaaagcagtattagcgaacgtgaatcgctggaacatgccgatacccggcgccgtatatgggccattgttggggcatcgtcagggaatctggtggaatggtttgatttttatgtctattcattttgctcactctatttcgcgcacatcttctttccttccgggaataccacaacccaattgttacaaacggcaggagtgtttgctgccggttttctgatgcgtccaatcggcggatggatattcgggcgcattgctgatcgtcgtggacgcaaaacttctatgctgatttccgtatgcatgatgtgttttggttcactggtgatagcctgcctgccgggttatgcaacgataggaacctgggctccggctctgcttctgcttgcacgtttattccagggattatccgtcgggggggaatacggtaccagcgccacctatatgagcgaagttgccgtagaaggtaagaaagggttctatgcctcatttcagtacgtcacgctgattggtggtcaacttctggcggtgctggttgttgttgcattacaacagatcctcagtgatgaagatcttcatgcctggggatggcgtattccgtttgcccttggcgcagtcctggctatcgtggccttgtggctgcgacgccagttggacgaaacttctaagcaggaaacgcgcgcgttaaaagaagctggttcgttcaaagggctctggcgtaaccgcaaggcatttattatggtactgggctttactgccgccgggtcgttaagcttttataccttcaccacttatatgcaaaaatatctggtcaataccgcgggtatgacagcgggcaccgccagcatgattatgaccgctgctttatttgtttatatgctggttcagccgctttttggcgccctctcggacaagattggccgtcgtacctcaatgctctgttttggcgcgttggtcaccctctttaccgtgccgattcttaatgcgctacaaaacgtgagttcgccgtatgcggcgtttgctctggtgatatgcgccctgctgatcgtcagtttctacacctcaatcagcggcattctgaaggcggaaatgtttccggcccaggtacgtgctctgggcgttgggctttcttacgctgtagccaatgcgctattcggcggctcggccgagtatgtcgcactgtcgctaaaatctgtgggaattgagcacgctttttactggtacgtgaccgtcatgggggcgattgcttttctggtctctctgacgctgcatcgtaaaggtaaagggctgcgcttgtag

SEQ ID NO: 174531 - DNA, 327 bp, Klebsiella oxytoca
atgcgcaatatcatgcttattgccccgctgttactactgaccggctgcagccatatggccaatgattcatggagcggtcaggacaaagcccagcacttcctcgcctcagcgatgctttctgccgcaggtaacgaatatgcccagcatcaaggctatagtcgcgaccggagcggcgctattggctttatgttttccgtgagcttaggggcatcgaaggagctatgggacagccgcccgtcggggagcggctggagctggaaagatttcgcctgggatgtggcaggcgccacaaccggctatgcggtatggcagctggcacatcaataa

SEQ ID NO: 174532 - DNA, 1356 bp, Klebsiella oxytoca
atgttgtcaaaatttaaacgcaataaacatcaacaacaccttgcccaactccctaagctttctcagtcagttgatgatatcgagttcttttacgctccggcagattttcggcaagcgttactggccaggatagctcaagccacccagcgtatttgtatcattgcgctctatctggaacaggatgatggcggtaaaggaattttgcaggcgctgtacgacgctaagcgtcagcgtccagagttagatgtccaggtgctggttgactggcatcgtgcccagcgcgggcgtattggcgtcgccgcgtcaaacaccaacgccgactggtattgccgcatggcgcaggagaaccctggcgtcgatatcccggtttatggcgttccggtcaatacccgggaagctctcggcgtcctccatttcaaaggctttatcattgatgattgcgttctctacagcggcgccagtctgaacgacgtttacctgcatcagcacgataagtatcgttatgatcgctaccagtgcattcgcaacgcgaaaatggccgatgtgatgtttgactgggttacgaacaacctggtgcaaggtcgcggcgttaaccgccttgataaggccgatcgcccaaaaagcccggaaatcaagaatgaaatccgccagtaccgccaggagctgcgcgatagccgctaccatttcccaggcgatgccgacgaagaacagctgtcggtaaccccgctagttggcctgggcaagacgagcctgctgaataaaaccattttccatctgatgccctgcgctgaacataagctgactatctgcaccccctatttcaacctgccggctctgctggtacgtaatatcattcagctgttgcggagtggcaaaaaagtcgaaattatcgtcggcgataaaaccgccaatgatttctatattccggaagatcagccatttaaaattatcggcgcgctgccctatctttatgaaattaatctgcggcgcttcctgagccgtctgcagtattacgtgaatactgaccagctcattgtccgtttatggaaggatgatgataacagctatcacctgaaaggcatgtgggttgatgatgagtggatgctactgaccggcaataacctgaacccgcgcgcatggcggctggatttggaaaacgcgattcttatccacgatccaaagcatcagcttggtgccatgcgcgaaaaagaactcagcctcatccgtaaacataccacgatcgttaagcactatcgcgatctccaaagtattgccgactacccgataaaagtacgcaaactgatcagacgcctgcgacgtattcgaatcgaccgccttatcagccgtattctttga

SEQ ID NO: 174533 - DNA, 2679 bp, Klebsiella oxytoca
atgagccaacgaggcctcgaagcattgctgcggccgaaatcgatcgccgttatcggcgcatcaatgaaaccacagcgcgccggttatctgatgatgcgcaacctgctggctggcggatttaacggccctgtccttcccgttacgccggcgtggaaagcggttcagggcgtactggcctggcctgacgtcaacagcctgccctttacccccgatctcgcggtgctttgcaccaatgcccgaagaaaccttgagcttctggaagcgttggggcaaaaagggtgtaagacctgcattattctctcttccctacccgaacagtatcccgcgctgcttgaatgcgccgcccgctatcaaatgcgcctgctcgggccgaatagtctcggcctgcttgcgccctggcagggcctaaacgccagcttttcgccggttcctatccatcgcggtaaactggcgtttatttcgcaatcggcggccgtatccaacaccatcctcgactgggcccagcagcgcgaaatggggttttcttactttatcgcgctcggcgatagcctggatatcgacgttgatgacctgctcgatttccttgctcgcgacagtaaaaccagcgctattctgctctatcttgaacaccttagtgacgcccgtcgcttcgtctccgcggcccgtagcgcatcgcgcaataagcctatcctggtgatcaaaagcgggcgtagtccggcggcgcaaaagctgctacacgtcaattccggtatggatccggcctgggacgccgctattcagcgcgcgggtttgttgcgggttcaggatactcacgaactgttctctgcggtggaaaccctcagccatatgcgcccactgcgcggcgagaaactcatgattatcagcaacggcgcagcgccggctgcgctggcgctggatgagctttggctgcgcaacggcaaacttgccgctctcagcgaagagaccagcgatcttctccgccaggcgttgcctgaaaccatggatattgctaacccactggatctccgcgatgacgccagtagcgagcattacctcaaagcgctgaacgtgctgctggatagccatgattacgacgcgctgctggtgatccattcacccagcgcggctgctccggggacggaaagcgcgctggcgctgattgacgccctgaagcgccatccgcgcggtaaatacgttacggttctgactaactggtgcggtgagttttcatcgcaagaggcgcgtcgtctgtttagcgatgcgggactaccgacctatcgcacccccgaagggacgataaccgcgtttatgcatatggtggaataccggcgtaaccagaagcagctcagagagaccccggtactgccagtctcattagccactaacacagcagaagcgcatagtctgttacaacgcgcaatcaatgaaggtgccaccacgctggatacccatgaagtgagtcctgttctgcgcgcttacggtattcatactctaccgacgtggattgccgcggatagcgccgaggccgtgcatatcgccgaacagataggttaccccgtcgcgctcaagctccgctcgccagacatcccccataagtcggaagtccagggggtcatgctttacctacgtacggctaccgaggtacagcaggccgcggacgcgattatcgatcgcgtcaaaatgacctggccgcaggcgcgtattcacggactgctggtgcaaagcatggccaatcgagccggggcgcaggagctgcgggtcgtcgtcgagcacgatccggtttttggaccgctgatcatgctgggcgaaggcggcgtcgaatggcgagcagaagatcaggccgccgtcgcactcccgccgcttaatatgaaccttgcgcgctacctggtcatccaggccatcaaaagcaaaaaagtgcgcgggcgcagcgcgctgcgcccgctcgatattcccggcctgagtcagctactggtacaggtatcgaatttgatcgtcgactgcccggaaatccagcgcctcgatatccaccctctgctggcttccggtcacgagtttaccgcccttgacgtcacgttaactcttgcgccgttcactggcgatagtgaaagccgcctggccatccgcccttatccgcagcagcaggaggagtgggtggtgatgaagaatggcgaacgctgccttttccgtcccatactcccggaagatgagccgcagctgctggcctttatcgcacaggtcacgaaggaagatctttattatcgttacttcagcgaaatcaacgaatttactcacgatgatttagctaacatgacgcagatcgactacgatcgagaaatggcctttgttgccgtgcgcacgacggctgaagggaatgagatcctcggcgtgacgcgagcgatctccgacccggataacatcgatgccgaatttgccgtactggtgcgctctgatttaaagggtatgggtttaggccgtaagctactggaaaagctcattgcctatacgcaaagtcacggtctgcagcggctgaatggcattactatgcctaataataaaggcatgattggactcgccagaaagctaggattctcagttgatattcagcttgaagatggaattgtcagtttgtctctacagcttgtatctgagcaattacaatcggctggccgcaattgttga

SEQ ID NO: 174534 - DNA, 699 bp, Klebsiella oxytoca
atgactgataacgccgtccttcgccttcgcgccgaacgtctcgcgcgcgccacccggccttttcttgctcgcggcaaccgtattcaccgctgccagcgctgtttgctgccgttgaaacagtgcctctgcgcgacccttaatcccgttgccgccaccagccgtttttgcctggtgatgttcgataccgagccaatgaagcccagcaataccggacgcctgattgccgatatcctgccggatacggaagcctttcaatggtcacgaaccgaaccgccgcaggcgcttctcgatctcgttgccgacgcgagatatcagccaatggtggtttttcctgcctcctatgccagcgccgggcgccgggtacttgacgcaccgcttcccggcaaacctccgctgtttattatgctcgacggcacctggcccgaggcgcgaaaaatgttccgcaaaagtccctggcttgatgcgctgccgatgatttccgttgatctgtcccgcgtctccgcttatcgcctgcgagaagcccatgcagaaggccaatactgtaccgctgaagtcgccatagcgctgctggatcttgcgggggatgtcaccgcagccagcgcccttggcgatcatttcagcttattcagaacgcgctatctggcaggaaaaacgcagcataagggcggtatcacagcacaactaacagaaaacgtttaa

SEQ ID NO: 174535 - DNA, 426 bp, Klebsiella oxytoca
atgaataccgtttgtgccagttgtcaggctctgaaccgcatccccgacgatcgtagcgctgatggcgcgaaatgcgggcgctgcggccacgatctttttgacggcgatgtgatcaacgcgaccggggcaacgctggataaactgctgaaggacgatctgcccgttgtcgttgatttctgggcgccgtggtgcggcccctgccgtaactttgcgcccattttcgaagatgtggctgaagagcgcagcggcgaaatgcggttcgtgaaagtgaataccgaaatggaacgcgaactgagcgcccgcttccgcatccgcagtatcccgaccattatgatgttcaaaaatggcgaagtcatcgacatgctgaacggcgccgtaccaaaagcgcctttcgatagctggttgaacgaagccggccagcaataa

SEQ ID NO: 174536 - DNA, 1074 bp, Klebsiella oxytoca
atgagcgacgacgaactgaaaaataaaagcggcaaggtcaaagtgatgtatgtccgcagtgatgatgattctgaccgacgtacccataacccgcgtaccgggaaaggtgggggacgcccaggaaagtctcgtgttgacggtcgtaaccgccctgcgcgcgatgaaagagacagccgcggtggcgatcgtaaacgtgacgatcgcaagcgtgaaggcttcggcggtgagggttcctctccgtggcgtaccgtatcccgcgcgccgggtgatgaggcgccggtaaaagcggatcacggcgggatcagcggaaaaagctttatcgatcctgaagtgctgcgtcgccaacgcgcggaagagacccgtgtttacggcgaaaatgcctgccaggcgcttttccagagccgtccggacgctattgtgcgcgcctggtttatccagagcgtgactccgcgcttcaaagaagccctgcgctggatggcggctaaccgtaaagcttatcacgtcgttgatgaagcagagctggcgaaagcgtccggcactgaacaccatggcggagtttgcttcctgattaaaaaacgtcatggcacctctgttgagcagtgggtggcgaaagccgacgctgaagattgcgtgctggcgctggaagatgtcggcaacccgcacaaccttggcgccatcatgcgcagctgcgcgcacttcggcgttaagggcgtaattgtgcaggatgctggcgttatggagtccggtgccgcgattcgtaccgccgaaggcggggcagaacacgttgaaccgattacgggcgacagctttatcgatacgcttgagcgcttccgtaaagcgggctacgcgattgtttcaacttccagtcataacgggactccgctgtttaaagccgagctgccgaagaagatggtgctggtgttaggacaggagagcgacggtctgtctgatgccgctatctccagcgccgatctgaatattgctatcgaaggcaccggcaacgttgaaagcctgaacgtttccgtggcaaccggcgtgctgctggcagaatggtggcgacagaacaaagcttga

SEQ ID NO: 174537 - DNA, 690 bp, Klebsiella oxytoca
atgaccaccccattaacctggcacgatgtgctggcagaagagaagcagcaaccctggtttgttaataccttaaaaacggttgctgaagagcggcaatcgggcatcactatctatcctccacaaaaagacgttttcaacgcgtttcgctataccgagctaagcgacgtcaaagtggtgatcctcggtcaggatccctaccacggaccaggacaggctcacggccttgccttctctgttttaccgggcgttgcgacccctccttctctgctgaacatgtataaagagctggaaggcacgatcccgggctttcagcgcccaaatcatggttatctcgaaagctgggcgcgtcagggggttttgctgcttaataccgtattaacggtacgcgccgggcaagcgcactctcacgctagtcttggatgggaaacctttaccgataaagtgatttcactgattaaccagcatcgggaaggggttgtatttttgctgtggggttcacatgcgcaaaagaaaggcgcgattatcgatcgccagcgccattgcgtgctcaaagcgccgcatccgtcaccgctctccgcgcaccgcggcttcttcggctgtaatcatttcgtcctggcgaatgaatggctggctgaacgcggcgaagcgccaattgactggctaccccggctgccggctgagagcgaataa

SEQ ID NO: 174538 - DNA, 384 bp, Klebsiella oxytoca
atgattactggtatccaaattactaaagctgcaaatgacgacctgctgaactctttctggctgctggatagcgaaaaaggcgaagcccgctgcctgtgcgcgaaagccggttttgctgaagatgacgtggttgcggtgagcaatctgggcgagatcgaataccgtgaaatcccggtagacgtgaagcctgaagtccgcgttgaaggcggtcagcatctgaacgtgaacgttctgcgtcgcgaaactctgctggatgcggttgaacatccggaaaaatatccacagctgaccattcgcgtttctggctatgcggtgcgctttaactccctgacgccggaacagcagcgcgacgttatcgcccgtacttttaccgaaagcctgtaa

SEQ ID NO: 174539 - DNA, 1332 bp, Klebsiella oxytoca
atgactgtaacgactttttccgaacttgaactcgacgaaaacctgctggacgctctccaggacaaaggtttcacacgcccgacagccattcaggccgccgctattccgcctgcgcttgatggccgtgatattctcggttcagccccgacaggcaccggtaaaacggcggcgtatcttctgcccgcgttgcagcatctgctcgattttccacgcaagaaatctggtccgccgcgcattcttatcctgaccccaactcgcgaactggcaatgcaggttgccgaccacgcgcgtgagctggcaaaacatactcatctggatatcgccaccattaccggcggtgtcgcctatatgaaccatgctgaagtgttcagcgagaaccaggatattgtggtcgccacgaccggccgcctgctgcagtatattaaagaagaaaactttgattgccgcgccgttgaaaccctgatccttgatgaagcggaccgcatgctggatatgggcttcgcgcaggatatcgaacacattgccggtgaaacccgctggcgtaagcagacgatgctgttctccgccaccctcgaaggtgacgccattaaagattttgctgaacgcctgctggaagaaccggtagaagtctcggcaacgccctccacccgcgagcgtaaaaaaattcaccagtggtattaccgtgccgatgacgtcaagcacaagaccgctctgctggtccatctgctgaagcagccggaagcgacgcgctctatcgtcttcgtacgtaagcgcgagcgcgttcatgaactggcgggctggctgcgtgaagcgggtatcaatacctgctggctggaaggcgagatggtgcaggcgaaacgtaatgaagcaattagccgcctgaccgatggtcgaattaacgtgttaatcgctaccgatgttgccgcacgcggaatcgacatcgcggacgtaagccacgtatttaacttcgacctgccgcgcacggcagatatttacctgcaccgtattggtcgtaccggccgggcgggtaaaaaaggtacggctatttcactggttgaagcccacgatcatctgctgctgggtaaaattggccgctatactgaagagccgctaaaagcccgcgttattgatgggctgcgcccaactacccgcgcgccaagcgagaagcaaaccggtaaaccgtccaggaaagtattagcgaagcgtgcagagaagaaagagaaagaaaaagagaagccgcgcgtgaaaaaacgccaccgcgataccaaaaacattggtaagcgtcgtaaaccaagcggagcggataccgcgcagaaggcaaacgaagagtaa

SEQ ID NO: 174540 - DNA, 741 bp, Klebsiella oxytoca
atgtcccagtcgaagttcgcgctgccgcgcaatggttttacgtttaagcagttttttgtcgcccacgatcgctgtgcgatgaaagtgggtaccgacggtattttacttggcgcatgggccccgatcgcgcaggttaagcgcgtgctggatatcggcgcgggcagcggcctgttagccctgatgctcgcgcagcgtaccggggagacggtcatcgtggatgccgtggagctggacgaagaggcggcacaacaggcgcgagaaaacgccgcggattctccatgggccgggcgtctgcagattcatcaggccgatattcagcaatggcagccgcggcaaacccgacgctatgagctgattgtcagcaacccgccttttttcgcagaaggcgtaccttgcgccacctcgcagcgcgagcaggctcgatacacttcctctctcgatcacgcaacattattaacctgcgccgccgaacttattacggaagaggggtttttctgcgttgtgcttccggtcgacatcggtaacgcgtttgtgcagcgggcgcagaatatgggctggcatctgcgtctacgaacggatgtcgcggaaacggaaatgcgcccgccgcatcgggttctgctggctttttcgccgtcggcgggggaagagtgctttagcgacagattagttatccgcgggccagagcagcaatattccgaaggatttaccgctttgacccaggatttttatctttttatgtga

SEQ ID NO: 174541 - DNA, 1620 bp, Klebsiella oxytoca
atgaatacaactcctgattcctcctgtgatgtgctaattgttggcagcggcgctgctggtttatctctcgccctgcgcctggcggaacgctgtacggtcaccgttctcagcaaaggccccattagtgaagggtctactttctatgcgcaaggcggcatcgccgccgtgtttgatgaaaccgacagcgttgaatcccacatcgaagatacgctgattgccggagcgggtctttgcgatcgccatgcggtctcctttgttgcgcgcaacgctaaaccctgcgttcaatggcttatcgatcagggcgttttgttcgatactgaggtacaggcaaacggcgaagcgagctatcacctgacgcgcgaaggggggcacagtcaccgccgtatcctccacgccgccgatgcgaccgggaaagccgtagagaccaccctggtgagcaaggcgctggcccaccctaatatccgggtgctggagcgcagcaacgccgttgatctgattctctccgataaaatcggcctgccgggaacgcggcgcgttgtgggagcctggatctggaaccgtaataaagaagcggttgagacctgcagcgcaaaagctgtggtgctggcgaccggcggcgcagcgaaggtttatcagtatacgaccaaccctgacgtctcttccggggatggtattgcaatggcctggcgagccggctgtcgggtcgccaatctggaatttaatcagtttcacccaacggcgctgtaccatccgcaagcgcgcaatttcctgttaacggaagcgctgcgcggcgagggcgcactgttgaaacgtccggacggcacacggtttatgccggaatttgacgagcgcggcgaactggctccgcgcgacattgtcgccagagcgatcgatcatgagatgaagcgcctgggcgttgactgtatgtatctcgatatcagccataaaccggcagaatttatccgccaccacttcccgatgatctacgagaagctgctggggctgggcattgacctgacaaaagagccagttcccattgtgccggcggcacattatacctgcggcggcgtgatggttgacgatcatgggcgcactgatgttgacgggctgtacgccattggcgaagtgagctacacgggattacacggcgctaaccgtatggcttcaaattcattgctggagtgccttgtttacggctggtccgctgccgaagatatcgttaagcgtatgccgttcgctcaggcggtcaataaactgccttcctgggacgaaagccaggtcgaaatacctgatgaactggtcgtaatacagcacaactggcatgagctgcgcttgctgatgtgggattatgtcggcatcgtgcgtaccactcgtcgtcttgaacgcgccctgcgccgtattactatgctgcaacaggagctggacgaatactacgctcgcttccgtgtctctaataatttgctggagctgcgtaacctggtacaggttgctgagctgattgtacgctgtgccatgcagcgtaaagagagccgcgggcttcactatacgctggattatcctgagcagctgcccgacagcggaccgtcggtgctctcgccgctggctcacataaaaagataa

SEQ ID NO: 174542 - DNA, 576 bp, Klebsiella oxytoca
atgagcgagcagttaacggatcaggtccttgttgaacgggtccagaaaggagatcagaaagcatttaacctgctggtggtacgctatcagcataaggttgcaagcctggtctcccgctacgtgccgccgggcgatatcgctgacgttgttcaggagtcgttcgttaaagcatggcgtgcgctggattctttccggggggatagtgctttttacacctggttatatcgcattgccgtaaacacggcgaagaattatctggttgctcaggggcgccgtccgccatccagcgatgttgatgcaaatgatgctgaaaacttcgaaagcggtggggcgttgaaagaaatttcgaaccctgagaacttaatgttgtcagaagagctgagacagatagtctttcgtaccattgagtcgcttccggaggatttacgcatggcaattaccctgcgggagctggatggcatgagctatgaagaaatagccgccatcatggattgtccggtgggcacagtgcgttcacgcatcttccgggcgcgagaagctattgataataaagttcaaccgctcatcaggcgttga

SEQ ID NO: 174543 - DNA, 651 bp, Klebsiella oxytoca
atgcagaaagaaaaactttcggccttaatggatggtgaaacgctggataacgaactgctcaatgagctggagcgttcatctgaaatgcaaaaaacctgggagagctaccatctcatccgcgatacgctgcgaggcgatacgagtgagatgctccattttgatatctcagctcgcgtcatggccgccattgaaaacgagcccgttcgtcagacggttcctcttattccggaatctcagcccgcaccgcaccagtggcgtcagatgcctttctggcaaaaagttcgcccgtgggccagttcgctcacccagatgggcgttgccgcgtgcgtgtctctggctgtgattgttggcgttcaacagtataatggccagtctgatacctctcagcagccggaagcgccggtgtttaacaccatgccgatgatgggtaaggccagcccggttagcctgggcgtaccggcggatgcctcagcaggtaccggccagcaggctcaagtgcaggaacagcgccgcagaattaatgctatgctgcaggattatgaattgcagcgtcgcctgcatgcggaacagctgcagtttggccaggcccagactcaacaagccgctgttcaggtgccgggctatcaaactttaggaacgcaatcgcagtaa

SEQ ID NO: 174544 - DNA, 957 bp, Klebsiella oxytoca
atgaagcaactttggtgtgccatgtcgctcatggcaggcagcctgttcttctccgtcaacgcctcggctgatacatcgtccggggcgttgttgcagcagatgaatctggccagccagtcccttaattacgagctctctttcgtcagcatcaacaagcagggtgttgagtcgctgcgctatcgacacgctaaactggataatcgcactctggctcagcttctccagctcgacggcccccgtcgggaagtggtgctgcgcggaacggagattagctactttgaacccgggctcgatccttttacgctaaacggcgactatattgttgattcgctgccctcgctggtttactccgactttaaacgtctttcatcctattacgacttcatttccgttgggcgtacgcgtattgccgatcgtctatgcgatgtggttcgcgtcgtggctcgcgacggtacccgctatagctatatcgcctggctggatgcggaaactaagcttccgctgcgggtggatctgcttgatcgggatggcgaaacgcttgagcagttccgggtggtctccttcaacgttggcgataacgtcagcgccagcatggaaaccctgtctaaagctaatctacctcctcagctgtccgttccggaggggggcaataaggccaactttaactgggcgccaacctggctgccgcagggtgttgccgaagtgtccagcagccagcgtcgcctgcccactttcgatgggccggtagagtcccgattgtattccgacgggctgtttagtttctccattaatatcaatcgcgccacggcaaatagcacagatcagctactgcgtaccggccgtcgtaccgtagcgactaccgtgcatgataacgcagaaatcaccattgttggcgagctgcctccgcaaaccgccaagcggatttccgacagtatcaaattcagggcagtacaatga

SEQ ID NO: 174545 - DNA, 480 bp, Klebsiella oxytoca
atgattaaagagtgggcgacggttgtttcctgggacaatggcgttgcgctggtgcattgcgatgtcaaagcctcctgcagcagctgcgcttctcgcgccggttgcggaagccgggtgctgaataagctagggccgcaaaccagccatacaattagcgttccctgcgaacagccgctgtcggccgggcaaaaggtcgagctgggtattgccgagagcagcctgctagggtcggcagtattggtctatatggcgccgttagtgggtttgttcgtaatggcatcaatattccaggtgctgtttgccaatgatttcgcctccctctgcggggcgatactgggcggcgtcggcgggtttctggtagcgcgcggcctctcgccgggcctggcttcccggcagtcgtggcagccggtgattcttagcgtcggtttaccgccagatttagtccgcatcgagacgacttcctcaccattgggtcagtga

SEQ ID NO: 174546 - DNA, 1800 bp, Klebsiella oxytoca
atgaagaatatacgtaacttttcaatcatcgctcacatcgaccacggtaagtcgacattgtctgaccgaattatccagatttgcggtggcctttccgatcgtgaaatggcagcccaggttctggactccatggatcttgaacgtgagcgcggtattaccatcaaggcgcagagcgtcaccctcgattacaaagcgtctgatggcgaaacctatcagctgaactttatcgacacgcccggccacgtcgacttctcttatgaagtttctcgttcgcttgctgcctgtgaaggcgctttgctggtggttgatgcggggcagggcgtagaagcccagacgctggctaactgctatacggcgatggaaatggacctggaagtggttccggtcctgaacaaaattgacctgccggcggccgatccggagcgcgtggcggaagaaattgaagacatcgtcggtatcgacgctaccgatgcggtgcgctgttctgcaaagaccggcgttggcgtgccggacgtgctggaacgcctggtgcgcgacattccgccgccggaaggcgacccggaagcgccgctgcaggctctgatcatcgactcctggttcgataactacctcggcgtcgtctctctggtgcgtatcaaaaacggcaccatgcgtaaaggcgataaaattaaggtgatgagtaccgggcaggtgtataacgccgaccgcctgggcatcttcacgccgaaacaggttgaccgtaccgagctgaaatgcggcgaggtaggctggctggtttgcgccatcaaagatattctcggcgcgccggtcggcgatacgctgactctctcccgcaacccggcggaaaaagcgctgccaggctttaaaaaggttaaaccgcaggtttacgccggcctgttcccggtcagttctgatgattacgagaacttccgcgatgcgctgggcaaactgagccttaacgatgcctctctgttctacgaaccggaaagctccaccgcgctgggcttcggtttccgctgcggcttcctgggtcttctgcatatggagatcatccaggagcgtcttgagcgtgaatatgacctggatctgatcaccacggcgccgacggtcgtttatgaagtagaaaccacctcgaaagaagttatttacgtcgatagcccgtccaagctgccgccgctgaacaatattcaggagctgcgcgagccgatcgccgagtgtcatatgctgctgccgcaggagtttttaggcaacgtcattaccctgtgtatcgaaaaacgcggcgtacagaccaatatggtctatcacggcaatcaggttgcgttgacctatgaaattccgatggcggaagtggtgctcgacttctttgaccgtctgaagtctacttcccgcggctatgcctcgctggactacaacttcaaacgcttccaggcctccaatatggtgcgcgtggatgtgttgattaacggcgagcgcgtggatgcgctggcgctgatcacgcataacgataatgcgccgtatcgcggccgcgaactggttgagaagatgaaagagctgatcccgcgtcagcagttcgatatcgctatccaggctgctatcggcaaccacatcattgcccgttctaccgttaaacagctgcgtaaaaacgtcctggcgaaatgctatggcggcgacgtcagccgtaagaaaaagctgctgcagaagcagaaagaaggtaagaaacgaatgaagcaggtcggtaacgttgagctgccgcaggaagcgttcctcgccattctgcacgttggtaaagacggcaaataa

SEQ ID NO: 174547 - DNA, 975 bp, Klebsiella oxytoca
atggcgaacatgtttgccctgatcctggtcatcgcaactttggtgacgggtctgttgtggtgcctggataagtttatctttgcgccaaaacgtcgcgaaagtcaggccgctgcccaggcggcgaccggcgaccagctggacaagaaaacgctgaaaaaggtgggcccgaaaccgggctggctggaaaccggcgcttcaatcttcccggtactggcgattgttctggtggttcgctcatttatttatgagcccttccagatcccatccggctcaatgatgccgacgctactaatcggcgattttattctggtagagaagtttgcttacggcattaaggatccgatttaccagaaaacgctgatcgaaaccgggcatccgaagcgcggcgatatcgttgtctttaaatatccgcaggatccgcgcctggattatatcaagcgggccgtcggcttaccgggtgataaagtcacttacgatccgattgctaaacaggtcactatccagccgggctgcagttctggtcaggcctgcggcaacgctctgccggtcacttactccaacgttgagccgagcgatttcgtacagaccttctcccgcagcaacggcggtgaagcgaccagcggtttctggcaactgccgaaaggcgagaccaaagcgaatggaattcgtctgaccgaacgtaaagagacgctgggtgacgtgacgcaccgcattttgaccgtgccgattgcgcaggatcaggttgggatgtattaccaccagtccgggctaccgctggcaacctggattgtccccccggggcagtattttatgatgggtgacaaccgcgataacagcgccgacagccgttattggggctttgtgccggaagcgaatctggtgggtaaagccaccgcaatctggatgagtttcgaaaaacaggaaggtgaatggcctaccggcgtacgtttatcgcgcattggcggcattcattaa

SEQ ID NO: 174548 - DNA, 681 bp, Klebsiella oxytoca
atgaaccccatcgtaattaatcggcttcaacggaagctgggctacacttttcatcatcaggagctgttgcaacaggcattaactcaccgcagtgccagcagcaaacacaatgagcgcctggagtttttaggcgactcaatattgagctttgtgatcgcaaacgccctctatcatcgtttccctcgggtagacgaaggcgatatgagccgcatgcgcgcgacgctggtacgaggtaacacgctggcagaaattgcccgcgagttcgaattaggtgaatgcctgcgtcttgggccgggtgaactgaaaagcggaggctttcgccgtgaatcgatactggcggacaccgttgaagctttaatcggcgggattttcctcgacagcgatattcagaacgttgagcgccttatcctctcctggtaccagagccgtctggacgaaatcagccctggtgacaagcaaaaagatccgaagacgcgcttgcaggagtatctgcaggggcgtcatctgccgctgccgtcttatctggtggtacaggttcgcggtgaagcgcacgatcaggaatttactatccactgccaggttagcggcctgagtgaaccggtggttggcacgggttctagccgtcgcaaggcggagcaggctgccgccgaacaggcgctgaaaaagctggagctggaatga

SEQ ID NO: 174549 - DNA, 906 bp, Klebsiella oxytoca
atgagcgaagaaaagaactactgcggatttattgccatcgttggtcgtccaaacgtgggcaaatccacattgctgaacaagctgctcgggcagaagatctcgatcacttcccgaaaagcgcagaccacgcgtcaccgcatcgtcggtatccatactgaaggcccgtatcaggcgatctacgtcgatacccccggtctgcatatggaagaaaaacgcgcgattaaccgcctgatgaacaaggcagcaagcagctctattggcgacgttgagctggttatctttgtggttgaagggacccgctggacgccggacgacgagatggtgctcaacaagctgcgcgacggtaaagcgccggtgattctggcggtcaacaaagtcgacaacgtccaggaaaaagcggatcttctgccacacctgcagttcctcggcagtcagatgaacttcctcgatatcgtaccgatttctgcggaaacggggctgaatgttgatacgatcgccggtatcgtgcgcaagcatttgccggaggcgattcaccacttcccggaagattacatcactgaccgttcgcagcgctttatggcttccgagatcattcgtgaaaagctgatgcgtttccttggcgcagaactgccatattccgtcaccgtcgaaattgagcgttttgtcaccaatgagcgcggcggttacgacattaatggcctgattctggttgagcgcgaagggcagaagaagatggtgattggtaacaaaggggccaaaatcaaaaccatcggtatagaagcgcgtaaagacatgcaggatatgtttgaagcgccggttcaccttgaactttgggtgaaagtgaaatccggctgggctgatgacgaacgcgcgctgcgcagtctcggttacggcgacgatctctaa

SEQ ID NO: 174550 - DNA, 732 bp, Klebsiella oxytoca
atgatggaaggctggcaacgcgctttcgtactgcatagtcgtccctggagcgaaaccagcctgatgctggacgtcttcacggaagagtccggtcgcgtgcgccttgttgcaaaaggcgcacgttccaaacgctccaacctcaaaggcgctcttcagccttttacccccttactgctccgctttggcgggcgcggcgaagttaaaacgctgcgcagcgcggaagccgtctcgctggcgctccctctcagcggaatcacgctctacagcggactttacgtcaacgaactgctctctcgcgtgcttgagcacgaaacgcgcttctcggaactctttttcgattatctgcactgtatccagtcgctggctggcgctacaggttcgccggaaccggcgcttcggcggtttgagctggcgctgcttgggcatctgggatatggcgttgatttcctgcactgcgccggcagcggagaagcggttgacgatacgatgacctaccgctaccgtgaagagaaaggctttatcgccagcgtggttattgataacaacacctttaccgggcaccatctgaaggcgctggccagccgcgaatttccggacagcgatgcgctgcgcgcggcaaagcgtttcacccgaatcgccctgaagccctatcttggtgggaagccgttaaaaagtcgcgagctgtttcgtcagtttttgcccgcacgggccgataaaacaaataacgattaa

SEQ ID NO: 174551 - DNA, 732 bp, Klebsiella oxytoca
atggctgaattactgttaggggtcaacattgaccacatagcgacattacgcaacgctcgcggtaccgcttatccggatccggtacaggcggcctttatcgccgagcaggcaggcgctgacggtattaccgttcatctgcgcgaagatcgccgccatattaccgatcgcgacgtgcgtattttgcgccagactctggatacccgcatgaaccttgagatggcggtgacggaagagatgctgaagattgcctgtgagactcaaccgcatttctgctgcctggtgccggaaaaacgtcaggaagtgacaaccgaaggcggactggatgtggcggggcagctcgataaaatgcgcgatgcctgtaagcgtctggccgaggccggtatcctggtctccctgtttattgatgctgaccacgcgcaaattaaggccgcagcggacgtcggcgcgccttatatcgaaattcacaccggctgctatgctgatgcgcaaacggacgccggacaggcaaaagagctggaacgtatcgccaaagcggcaacctatgccgcgagcctggggctgaaggtcaacgccggtcacggcctgacgtaccataacgttaaggctattgccgcgctgccggaaatgcacgagctgaacatcggtcatgcgattattggccgggcggtaatgagcggcctgaaggaagcggttgcggaaatgaagcgtctgatgcaggaagctcgcggctga

SEQ ID NO: 174552 - DNA, 381 bp, Klebsiella oxytoca
atggcgattctcggactgggtactgatattgttgaaattgcccgtattgacgcggtgatagcccgcagcggcgatcgtcttgcccgtcgcgtactcagcgattttgaatgggcgatatgggaacagcatcagcagccggtccgttttctggcgaagcgtttcgccgttaaagaagcggcggccaaggcgcttggcaccggcatccgcaacgggctggcgttcaatcagtttgaggtttacaacgacgagctgggtaagccaaagctgcgattgtggggcgaggcaaagggtctggcggagcgtatgggcgtaagcagcattcacgtgacgctggccgacgagcgtcactatgcctgcgccacggtgattatcgaaagctaa

SEQ ID NO: 174553 - DNA, 261 bp, Klebsiella oxytoca
atggcgctgttaatcaccgaaaaatgtatcaactgcgatatgtgcgagccggagtgcccgaatgaggcgatatccatgggtgatagcatttatgaaattaacagcgatcgctgcaccgaatgcgtcggccactatgatacgccaacctgccagaaggtgtgcccgatcccaaataccattctgaaagatccggcccataacgagaatgaagagcagctgtgggataagtttgtcctgctgcaccacgtggacaaactgtga

SEQ ID NO: 174554 - DNA, 714 bp, Klebsiella oxytoca
atggtggatctgaaaaatgcagagaacgaacttctgccttatcagaaccagcaacgggacacaatatctattggcgtgtcaggcagctatctggttctgcccgcctttcgtagctttatggcgcaccatccggcgatctctttaaatgttaaggagttctctacggagcaaacgataaaaaaactgacggacagcgccgtcgatattggcattgtttaccgaacgcccctccccgcccagcttagctcgacgatgctatttgaggatgaaattatcgccgccattccgctttcgcatcctctggcgcagtacgagcgtatcgatccacaggatttaaacgatcaatccattatagtgctcaatgattccctgctattgagaggcatcatcacgactgaatttaatcaccgcaaggtcgttcccaacatcatctgcgagctggataaccactattcgtgccttgaatatgctgaggcccagattggtatcgcctttattacccgctcgttaacccgtttgtccacgccgaaaaacgttcgtctggtttccctgaatattcctgcgttctttattccggtgatgctggtgcatagcaaagacctttcgctggacaacgcgactatctgtctgctcaagcagatcaaaaatttttacaccgttgagggccaatcagcggtggaaaagagctggcccgagcgaaaaatgggcgtataa

SEQ ID NO: 174555 - DNA, 1197 bp, Klebsiella oxytoca
atgacagcatcaatcaaccgctggggaatgcttgcagcccacgtgtgcataaattttgtactcggaggcgtctacgcctttagctattttaaaacgccattaatggcgcaatatcactgggacccggctacgctggctttagcattctctatcaatatggggatcattcctttacccatgatttggggtgggagaatgatcgataatggtaaaggcaagcaggcgatagttatcggcggtatcctgttctccttaggctttatcctatccggattcgtggataatttgccaatgctattcttaacctatggcgtcattgcagggctcggttccggccttgcttttaccggcaatctgaataatattctgaagtttttccccgatcgccgaggtcttgccagcggtattgtcctggccggagttggcgtgggtacgttactttgcacccgcctggctgaatattttatgacgcaaacgcacgatgtcagccgggccttattatatctcggtattgtatatctggtggttatcttcattgttcagttttttattcgtagcgcgccagcgaaagatagtggcgaaattaaagcatcgccactggataaagactttcgacatatgttaaaggatctccgtttttggctgctattcgtcattctggctttgggcgttttctccggaatggtcatcagctcaagttcagcgcaaattggtatgatgcagtatggtttactgtctggcgccttggttgtcagtctggtatcgatatttaattctattggccgtttattctgggggggattaaccgataagcttggaggatataatacactgataatcgtttatctttttacctgcctctgcatgctcttgttattattctttaatggtaatacggcggtattctacttcagcgctctgggcgtgggctttgcttatgcgggtatattagttatctttcccggattgaccagtcagaattttgggatgcgcaatcagggactcaattatggctttatgtattttggctttgccgtcggcgcagttattgcgccgtatgtaacctccgccattgcaaaatacacaggaagctacaacacggtatttatcctgaccgtggcgctattgcttattggtgtcgtattaaccctgattaccaaaaaatatatcgcagtggttttagccaaaattcattga

SEQ ID NO: 174556 - DNA, 918 bp, Klebsiella oxytoca
atgaaaattgcaatcgcaggcgccggggctatgggctgtcgttttggctacatgctgctgggggccgggcacgacgtgacgcttatcgatggctggcacgaacatgtcaacgccatatgcagcaacgggctgtttgtcgaaacggaagtaagccagcagtattaccccatttcggcaatgctggctgatgaatcgcagggggagtttgagctgattattctgtttactaaagccatgcagctcgatcgcatgctgcagcatattaagccgctgctgccagccgcgaaggtcgtcatgattttatcgaatggcctcggaaatattgaaaccctggagaaatacgtcgatcggcaaaaaatttatgctggcgtgacgctatggtccagtgaactggagggccccgggcatattatggccaccggtaccggaacgattgaactgcaaccggttgccagccaggacgccgctctggaagaaaatatcgttgccgttctcaatagcgccggattgaatgctgaaataagccctgacgtactcttatcgatctggaagaaagcggcttttaatagcgtgatgaatacctactgcgcgctgctggactgtaatgtcggcggcttcggtcaactgccgggcgcattagatttagcgcaggcggtggtggatgaatttgtattagttgccgccagccagaatattccgttgagcggagagatggtaatgaatacggtgaagaaggtcttcgacccgcgcgaaagcggccatcactatccctctatgtatcaggatttgcaaaaggggcgacttacggaaattgactatttaaacggcgccatcgcgcgaattggcatgcagaataatatccccgtgccggtgaatacgcttctgacgcagcttattcacgcaaaagaagcgcaataa

SEQ ID NO: 174557 - DNA, 849 bp, Klebsiella oxytoca
atgaactgtttgacccgtattcgccagcgctacccaacgctggccgcaagcgataaaaaactggccgatttcattctggcccaaccggataaaacccgccaccttagctcacaacagctggcgggcgaagccggggtcagccagtcaagcgtagtcaaatttgcgcagaagatgggtttcaaaggttttccggcattaaagctggcgttaagcgaagccctggcaagcgcccctacgccacagtccgtgccggtacataatcagatccgcggcgacgatcctctccgtctggtaggcgaaaaactcattaaagataatatcgcggccatgcacgcttcgctggacgtcaacgccgaagagaagctgttcgaagccgtcacgctattgcgccacgcccgccgggtcattattaccggtatcggcgcgtcggggctggtggcaagaaacttcagctggaagctgatgaaaatcggcattaatgccgtgtcagaacaggatatgcatgcgctgctggcgacggtacaggcgatgtcgccggacgatctgctgttggctatctcctactccggtgaacgacgcgagatcaacatggcggctggtgaagcgttacgagtaggaagccagatcctggcgatcaccggatttaaccctaacgctcttcagcaacaggcgacgctgtgcctgtataccatagcggaagaacaggctacgcgcagcgccgcgatctcctctaccagcgcgcagatgatgctgaccgatcttctgtttatgggactggtgcagcaggatcttgagcgtgccccggagcggattcgccatagcgaagcgctggtgaaaaagctggtttga

SEQ ID NO: 174558 - DNA, 636 bp, Klebsiella oxytoca
ttgaatagcagtacgcggagagtggttttctttgatctggatggaaccttacatcagcaggatatgttcggcagctttttgcgctatgtcctgcgccaccagccgctaaatgtcctgctggtgattcctttattaccggttattgccgccgggctgatgctgttcggacgcgctgcgcgctggccgatgagcctgctgctgtgggcgtcaacttttggccgcagcgagcgtcacctgaaacgccttgaggcgagtttcgcccgctggtttcgccagcacgtcacggcgttcccggtagtacaggcgcggctcaacaactatctgaccagcaccgatgcggacgtctggctgattaccggctcgccgcagtcgctggttgagcaggtttattttgatactccctggctgccgcgagtgaacctgatcgccagccggatggagcgtcgttgcggcggctggggattaaccctgcgctgcctcggcaatgaaaaagtggcgcagctggaacaaaaaatcggcgctccgctgcgattgtacagcggctacagcgacagcgagcaggataacccgctgctctatttttgccagcaccgctggcgggtgacgccgcagggcgatcttcagcagttagaatag

SEQ ID NO: 174559 - DNA, 507 bp, Klebsiella oxytoca
ttgtctgaccatgaattaaatgatgaatactggatgcgtcacgctctgacgctggcgaaacgcgcctgggaagagggcgaagtgccggtcggcgcggtactggtgcataatcatcaggtcatcggcgaaggctggaatcggccaatcggacgtcacgatccgaccgcgcacgccgaaattatggcgctgcgtcagggcggactggtgcagcaaaactatcgtctgattgacgcaacgctgtacgttacccttgaaccctgcgtgatgtgcgccggggcgatggtccatagtcgcatctctcggctggtttttggcgccagagatgcgaaaaccggcgcagccgggtcgctcatcgacgtgctgcaccatccgggaatgaaccatcgggtcgagataacggaaggtattttggctgaggcctgttccggcatgctgagcgattttttccgctggcgacgcgaagagaaaaaagcgctgaagcgagctagccggcaagcggaaggttaa

SEQ ID NO: 174560 - DNA, 1665 bp, Klebsiella oxytoca
gtgaccctcctcgcgaataagttgccaactggcgcattcttaagcaaaatgccgctcattccacgacaaccttttacttattctggtcatagtctgctgaggaacccgaagctgcagaagattaactatctgaaaaaattaaagattaattatctgctcatcggcattgtgactctcctgctggcggctgccctgtggccgtctctcccgtggatgggtaagccggaaaaccgcgtggccgggatcatggcgcgcggagaactgcgtatcagcaccattaattcgccaatgaccttcgcgaccattaacgatcggacctacggttttgattatgagctggcgcagcagtttgccgactacctcggcgtcgagctaaaagtcaccgtcaggcagaatatcagccagctgtttgatgacctcgatgaaggcaaagccgatatgctggctgccggcctggtctataattccgaacgggtgaaaaactatcaggtcgggccaacctactactccgtttcgcaacagctggtttatcgcaaaggtagcctgcgtccgcgcagcctggcaaatcttaccgccgaccagttggcgattgctcccggacacgtggcgattaacgatcttcaggccctaaaaaagcaaaaataccccgatctcgactggcgcgtggacgagaaacgcgggacgacggcgctgatgcaggcggttattgatggcaaactcgactataccgttgctgattcggtcgccgtcagcctgttccagcgcgtccatccggagctggccgtcgcgcttgatatcagcgacgagcagccggtcacctggtttagcgaaaaaggtgaggacaactccctgccggcggcaatgctcgatttcttcaataatattaacgaggacggcacactggcgaggctggaggagaaataccttggtcatggcaacgattttgattatgtagacacccgtaccttcctgcgcgccgtggaaagcgtgctcccggacctgcagccaatgtttgaaaaatatgcccgtcagatagactggcggctgctggcggctatctcatggcaggaatcgcactgggatccgcaggccacctccccgaccggcgttcgcggcatcatgatgctgacccgcaataccgctcaaagtctgggcctgaccgatcgtaccgacgccgagcaaagcctcgacggcggcatgcgttatttacaggatatgatgaataaagtgccggagtcggtcccgcaggacgaacgcatctggtttgcgctggcggcttacaatatgggctacgcgcatatgctcgacgcaatggcgctgacgaaaaagcagaaaggcaacccgaatagctgggccgatgtgaagcagcgtctgccgctgctaagccagaaaaactactacagccggctgaagtacggctttgcacgcggccacgaagcctacgcctacgtcgaaaatatccgtaaatatcatattagcctcgtgggctatctttctgaaaaagagagaaaggacgcccagatagcggcactaggcgagcactatccggcagtcatgccggaggagctgggtaaggaagagcagtacgccatgtcctttttcagcttccgcgcagaaacgctggtggacaacgcgaagctgaaaatccccggtacggggcattaa

SEQ ID NO: 174561 - DNA, 3942 bp, Klebsiella oxytoca
atggcgcccgtttcccccctggctcaccatgaaagcttcgaagacgagagacttatgatggaaattttgcgtggttcacctgcactgtcggcattccgtatcaataaactgctggcacgtttccaggcggccaaccttccggtcagcacgatatatgccgagtacgttcattttgccgaccttagcgccccgctcagcgacaacgatcgcgagagtctggcaaggttgctcaagtatggcccgaacttaagcagccataccccaaccggcaagctactgctcgttaccccccgtcccggcaccatctctccctggtcttctaaagctaccgacatcgcccataactgcggcctgtctcagattgtgcgccttgagcgcggcgtcgcgtattacgtcgaagccagcagcctcaacgatgaacagtggtcgctggtggcggccgaacttcatgaccgcatgatggaaagcgttttcggcgcgctggaagagggtgaaaaactgtttgcccatcatcagccaacgccggtcaccagcgttgacctgctgggcctggggcgtcaggcgctgattgacgccaacctccgtctggggcttgctctggcggatgacgaaattgactatctgcaggatgctttccagacgctgggccgcaacccgaacgatatcgaactctatatgttcgcgcaggctaactccgagcactgccgacacaagatttttaacgccgactgggtcatcgatggcgaaaagcagccgaagtcgctgttcaaaatgatcaaaaacaccttcgagaaaaccccggactacgtgctgtctgcttataaagacaacgccgcggtaatggaaggttcagccgtggggcgctactttgccgaccacgcaaccggtcgctacgacttccaccaggaagacgcgcatattctgatgaaggtcgaaacccataaccacccgacggcgatctctccgtggccgggcgcggcgacaggttccggcggcgaaattcgcgatgaaggcgccaccggacgcggggcgaagccaaaagccggcctggtgggtttctcggtttccaacctgcggattccggggtttgaacagccgtgggaagaagatttcggcaaaccggatcgtatcgttaccgcgctggatatcatgactgaaggtccgctgggcggcgcggcgtttaacaacgaatttggtcgtccggcgctcaacggctatttccgtacctatgaagagaaggtaaccagccacaacggcgaagagctgcgcggctaccataagcccattatgctggcgggcggaatcggcaacattcgcggcgaacacgtgcagaagggcgaaattgtcgtcggcgcgaagctgattgttctcggcggtccggcaatgaacatcggtctcggcggcggcgcggcctcttcaatggcctccggccagtccgatgccgacctcgatttcgcctccgtacagcgcgataacccggagatggaacgtcgttgccaggaggttatcgaccgctgctggcagctgggcgacgccaacccgattttgtttatccacgatgtcggcgctggcggtctgtcgaacgccatgcctgagctggtcagcgacggcggacgcggcggtaaattccagctgcgcgatatcctcagcgatgagccgggcatgagcccgctggagatctggtgtaacgaatcgcaggaacgttatgtgctggcggtcgcgccggagcaactgccgttgtttgatgagctgtgccgccgcgaacgcgcgccgtacgcggtgattggcgaagcaaccgaagcgctgcatctgagccttgatgatgcccattttgacgatcgtccgatcgacctgccgcttgacgtgctgctgggcaaaacgccgaaaatgacccgtgacgtgcagacgttgaaagcgcagggccagagtctgcaacgccagggcatcactattgccgacgcggtgaatcgcgtgctgcacctgccgacggtcgcggagaaaaccttcctcgtcaccattggcgatcgcaccgtcaccggtatggtggcgcgcgatcagatggtggggccgtggcaggttccggtggctaactgtgcggtcaccaccgccagcctcgatagctactacggcgaagcgatgtccattggcgaacgtgcgccggtggcgctgctggacttcgccgcctccgcccgtctggctgttggcgaggcgctgaccaacatcgcggcgacgcagattggcgcgctcaatcgcgtgaagctgtcggcaaactggatggccgctgccggtcacccgggcgaagacgccggtttatatgaagcggtaaaagcggtgggcgaagagctctgtcctgccctgggactgactattccggtgggtaaagactccatgtcgatgaaaacccgctggcaggaaggggctgaacagcgcgagatgacttctccgctgtctctggtgatttccgcctttgcccgcgttgaagacgtacgccgtaccgtcaccccacagctctccaccgaagacaacgccctgctgctgattgatttaggcaaggggaacaatgcgctgggcgcgaccgcgctggcgcaggtttatcgtcagcttggcgatgtgactgccgacgttcgcgatgtcgcgcagctgaaaggcttctgggacgcaatgcaggcgctggtggctgaagataagctgctggcctggcacgaccgttccgacggcggtctgctggtcaccctggccgagatggcctttaccggccactgcggcgtcaacgttgatatcgccgcgctcggcgaggatcgcctggccgcgctgtttaacgaagagcttggcggcgtcattcaggttcgtgccgccgatcgtcaggccgtggaagccacgttggccgctcatggcctggcggattgcgttcactatattggccaggctacggcgggcgatcgcttcgtcatcgaggccgacggtcatccggtattcagcgaaagccgcaccacgctgcgcatgtggtgggcagaaaccacctggcaaatgcagcgtctgcgcgataacccggaatgcgctgaccaggagcacgaggcgaaagccaacgatgccgatccagggctcaacgtgaagctctcctttgatatcaatgaggatatcgctgcgccttatattgccaccggcgcgcgtccgaaggtcgcggtgctgcgtgagcagggcgtgaactcccatgtagaaatggccgcggcgttccatcgcgccggctttgatgccatcgacgtgcacatgagcgacctgctggcgggccgtaccggtcttgctgatttccaggcgctggtggcctgcggcggcttctcctacggtgacgttttaggcgccggtgaaggctgggcgaaatcgattctgttcaatgagcgggttcgcgacgagtttgccaccttcttccatcgtccgcagaccctggcgctgggcgtgtgcaacggctgccagatgatgtctaatctgcgcgagctgatcccgggcagcgacctgtggccgcgctttgtgcgtaatcagtctgaccgctttgaagcgcgcttcagcctggttgaagtgacgcagagcccgtctctgctgctgcagggtatggtgggatcgatgatgccgattgccgtatcccacggtgaagggcaggtggaggttcgcgatggcgcgcatctggcgcagctggaaagtaaaggcctggtggcgctgcgcttcgtcgataacttcggtaaggtgacggaaagctatccggccaacccgaatggttcgccgaacggtatcactgcggtaaccagcgaaagcgggcgcgcgaccatcatgatgccgcacccggaacgcgtgttccgcaccgtgtcgaactcctggcacccggaaaactggggcgaagacagcccgtggatgcgtattttccgcaacgcgcgtaaacagctgggctaa

SEQ ID NO: 174562 - DNA, 1455 bp, Klebsiella oxytoca
atgattgagatcctatccgtgaagcgactctcccttttcccccgttcgctgcgccagctggtcacgctatccttcgtgctgatcctgcttccgctgctggtgctggcatggcaggcgtggcaaagccttaacgccctcagcgcccaggcggcgcatattaatcgcaccacccttatcgacgcccgccgcagcgaggcgatgattaacgcgtcgctggaaatggagcgtagctaccggcagtactgcgtgctggacgatccgacgctggcgcgggtctatcaaaatcaacgccaacgctacagcgaaatgcttgacgctcacgcgggcgttctgcctgatgaaaaaatctggcaggcgctgcgtcaggatctcgacgatctggccgagctgcagtgtaaaaatagcggcccggcggcgaagtcagcagtcagcctggaagcgtttgcttccgccaatagcgacatggtccaggcaacccggacggtggtctattcgcgtggacagcagctgcagcaggaaatcgccgagcgcggccagttcttcggctggcaggcgctggtgctgttcctgctcagcctggcgctggtgctgctgttcacccgcatgattatcggcccggtaaagggcattgaaagaatgatcaaccgactgggcgaggggaaatcgctggacgatgccgcgctgtttaccggcccgcgcgagctgcgctccgtcggtaaacgcattatctggctgagcgaacgccttgcctggctggaatcccagcgccatcagttcctgcgccatctttcccatgagctgaaaacgccgctggccagcatgcgcgaagggacggaactgctcgctgaccgggtggccgggccgctgacgcccgagcagcaggagatcgtggagattctggataacagcagccgcaacctgcaaaagctgattgagcaactgctggactataaccgcaaacaggccgatggcccgattgcgcgcgagacggtcaacctggccgaactggtggaaaatgtggtttctgcccatagcctgccggcaagagctaaaatgatgcataccgaactgttgctcagcgagcgtttttgcgaagcggagcccgctctgctggtgagcgtactggataatctctactccaatgcggtgcactatggtgctgaatccggtaacattcgaatccatagctatcggcacggcgagcaggtgcgcattgacgtcattaacgacggcgagccgatcccgtccgcagaaagaaacatgatttttgagcctttttatcagggaagccaccagcgtaaaggggcggtaaaaggcagcggtctggggctgagcattgcccgcgactgcgtacggcaaatgcagggcgagctgagcctggttgatgagaagtcagggctaatctgttttcgtattacgctccccgtcgccgagtctggaaaaaataacgtataa

SEQ ID NO: 174563 - DNA, 705 bp, Klebsiella oxytoca
atgtcccacttcttcgcatttgtccgtcccctcaggggatggctgctgtcaggcatttcctgcctggcgctggcgggatgttccgcctctacatcaccatacgccgcggatggcaaaacgctctccgcgctgccgcagcatcaggtcgccgattttctttcggtggagtgcgctgatatctggaatctgcaaagcgaagccagcgacaaaaatccgctctactggctgcgtggaattgactgcgccgatcgtcttgctccggtgcaggcacgggcggaggcccggctgcacagcggcgacagctggcaggatgcctttaagcgcggcattttactggctgatgccaaaattacgcctaacgagcgccgggaactggtcgccagtctggatagcttcagcccgcaaatcgcccctcaggtgcgcccgctctatcagctctggcgcgatgcccagggccggcagcttcagctgattgacgagcgttcccgctacgccaaactgcagcagtcaaacgatgcggagctggagacgctgcgacagcaggaaattgagctacgcagtcagctcgaactgacgacccgcaagctggagaatctcaccgatatcgagcgtcagctctccagccgtaaacccggcgggaacttcagctctgacgccgggcacggcggcgataaagtcccggaggtgattcatgacgatccgtaa

SEQ ID NO: 174564 - DNA, 1338 bp, Klebsiella oxytoca
atgacgatccgtaaacccgcccgtctgctattagtggacgacgatccggggctgctgaagctgctgggtatgcgtctggtcagcgaagggtatagcgtagtgaccgccgagagcgggccggaggcgctgcgcacgctaagtcgcgacaaggtcgatctggtggtcagcgacctgcggatggatgagatggacggactccagctgttcagcgaaatccagaaggttcagccggggatgccggtgatcattctcaccgcgcacggttccattccggacgccgttgccgcgacccagcagggcgtgtttagctttctcaccaagccggtggataaagacgccctttataaagcgattgatgacgcgctggagcagagcgcgccaaccaccgacgagcgctggcgtcaggcgattgtgacccgtagcccgctgatggagcgactgctggagcaggccgggatggtggcgcagtcggacgtcagcgtgctgattaacggccagagcggtaccggcaaggagattgtcgcccaggcaattcataacgccagcccgcgccgtgataaaccttttgtcgccattaactgcggcgcgcttcccgaacagttgctggagtcagaattgttcggccacgcgcgcggcgcttttaccggcgcagtcagcaatcgcgaggggctattccaggccgcggaaggcgggaccctgtttcttgatgaaattggcgatatgccggttgcgctacaggtgaaactgctgcgcgttctgcaggaacgtaaagtgcgcccgctgggcagcaatcgcgatatcgatattgatgtgcggattatttctgcgacccatcgcgacctgccgaaggccatggcgcgaggcgaatttcgtgaagatctgttctatcgtctcaacgtggtgagtctgaaaatcccgccgctggctgagcgtacggaagatattccgctgctggcgaaccatctgctgcgccagtctgccgatcgccataaaccttttgtccgcgcattttccacggatgcgatgaagcggctgatggccgctaaatggccgggcaacgtgcgccagctggtgaacgtgattgagcagtgcgtggcgctgacctcttcgccggtcattagcgacgccctggtagagcaggcgctggaaggggaaaacaccgcgctgccgacgtttgtcgaagcgcggaatcagtttgagctcaattacctgcgcaagctgctgcaaattaccaaagggaacgtcacgcatgcggcccggatggccgggcgcaatcgcaccgaattttataagctgctgtcgcgccacgagctcgacgctaacgactttaaagagtag

SEQ ID NO: 174565 - DNA, 339 bp, Klebsiella oxytoca
atgaaaaagattgatgcgattattaaacccttcaaactggatgacgtgcgtgaagcgctggccgaagtcggcatcaccgggatgacggtaacggaagtgaaaggctttggccgtcagaaggggcataccgagctgtatcgcggtgcggagtatatggtcgattttctgccgaaagtgaaaatcgaaatcgttgttaccgatgatatcgtcgacacctgcgtggataccattatccgtacggcgcagaccggcaaaatcggcgacggtaagatctttgtctttgatgtcgcacgcgtgattcgtatccgtaccggcgaagaagacgacgcggcgatttaa

SEQ ID NO: 174566 - DNA, 1191 bp, Klebsiella oxytoca
atgctcgacgcccagaccatcgctacggtgaaagccaccatccccctgctggttgaaaccggtccaaaactgaccgctcatttttacgaccgcatgtttgctcacaatcccgaattaaaagaaatcttcaatatgagcaatcagcgcaacggcgaccagcgcgaggcgctgttcaacgctattgccgcctatgcaagcaatctcgagaacctgcccgccctgctgccggcggtagagaaaatcgcccagaagcacaccagcttccagattcaacccgagcagtacaatattgttggtactcacctgctggcgaccctcgatgagatgttcagtccgggccaggaagtactggatgcctggggcaaggcctacggggtgctggccaacgtctttattaatcgtgaagcgcaaatctataacgaaagcgccagcaaaaccggcggctgggaaggcacccgcgcattccgcatcgtcaaaaaaacgccgcgcagcgcgctgattaccagctttgaatttgagccggtcgacggcggcgcggtagcggaatatcatccaggccagtatctggcggtctggctgaagccggaaggttttccgcatcaggaaattcgccagtactctttgacccgcaaacccgacggtaaaggctatcgtatcgcggttaaacgtgaaaacggcggccaggtttcaaactggctgcatgattcagcgaaagaaggcgacgtgatttatctggccgcgccggccggtgatttcttcctcaacgtggcgccggaaaccccggtcacgctgctctccggcggcgtcggtcagacgccgatgctggcgatgctggatgtgctggcaaaagcgcagcatccggcgcaggtgaactggttccatgcggcagagaacggcgacgtacacgccttcgcggacgaagttaaaacgctgggtgaaacgctgccgaagtttacttctcacgtctggtaccgcagcccgagcgaagcggaccgtgaatccggcgcgtttgatagtgaaggtttgatggatttaacggcgctggccgacaagatcggcgacccgcaaatgcagttctatctctgcggcccggtggcgtttatgcagtttgccgcgaagcagctggtagatctgggcgtgagcagcgacaacattcattatgagtgcttcggcccgcataaggtgctgtaa

SEQ ID NO: 174567 - DNA, 1254 bp, Klebsiella oxytoca
atgttaaagcgtgaaatgaacattgccgattatgatgccgaactgtggcaggctatggagcaagaaaaagtacgtcaggaagagcacatcgaactgatcgcctccgaaaactacaccagcccgcgcgtaatgcaggcgcagggctctcagctgaccaacaaatacgctgaaggatacccgggcaagcgctactacggcggctgtgaatacgtcgatatcgtagagcagctggctattgaccgcgctaaagaactgttcggcgctgactacgctaacgtgcagccgcactccggctcccaggcgaacttcgcggtctataccgctctgctgcagccgggcgataccgttctgggtatgaacctggcgcaaggtggccacttgactcacggctctccggtcaacttctctggcaaactgtacaacatcatcccttacggtatcgatgagtccggtaaaattgactatgacgatatggctaagcaggctcaggaacataaaccgaagatgattatcggtggtttctcggcttattccggcgtggttgactgggcaaaaatgcgtgaaatcgctgacagcatcggcgcatacctgttcgtcgatatggctcacgttgccggtctgatcgccgcaggcgtttacccgaacccggttccgcatgctcacgtcgtgaccaccaccacccacaaaaccctggctggtccgcgcggcggcctgatcctggcgaaaggcggcagcgaagagctgtacaaaaaactgaactctgccgtattcccgagcgcccagggcggcccgctgatgcacgttatcgcggcgaaagccgtcgcgctgaaagaagcgatggagccagagttcaaagtttaccagcagcaggtagcgaaaaacgctaaagcgatggtcgaagtgttcctgaaccgcggctacaaagtggtttccggcggcactgaaaaccatcttttcctgctggatctggtcgataaaaacctgaccggtaaagaagctgacgcagccctgggccgcgccaacatcaccgtcaacaaaaacagcgtgccgaacgatccgaagagcccgtttgtgacctccggtatccgtatcggttctccggcggtgacccgtcgcggctttaaggaagcagaagtcaaagagctggccggctggatgtgcgacgtgctggacaacatcaatgacgaagcggtcattgagcgcgtgaagggtaaagtgctggatatctgcgcacgcttcccggtctatgcgtaa

SEQ ID NO: 174568 - DNA, 468 bp, Klebsiella oxytoca
ttgtgtattacgtttaaatcacacgtctctcataacgagctgatcatgaacactctacgctactttgactttggttcctcccgctctctgctgctgctgattgcgcgtatcgcggtagtggtgctgtttattcttttcggttatcccaagctgctcggctttagcggcacggtgcagtatatggcctcctccggcgcgccgatgccaacgcttgcggccatcattgccattattatggaggtgccggcggccattttaattgtgctgggctttttcacccgcccgctggcggtgatctttattttttatactcttggtaccgcggtgattggccatcactactggaatatgtccggcgatgcggtactaccgaacatgattaacttctggaaaaacgtcagtattgccggagccttcctgctgctggcaataaccgggcccggagcgatttcgctcgaccgccgctaa

SEQ ID NO: 174569 - DNA, 1197 bp, Klebsiella oxytoca
atgcagcgtaccggtttaaataatgcccgggtcagacaggccaataaatccatttttttggctcatctctggcgggagaagcagctgagtaaatcccagctttctcagctcaccggactctctattccggcggtgagcaatattcttgaagagctgctcagcgagggactgatcgatcactccacggaaaaaatgagcaaacgcggcgtgaacagcggaagctaccagatccccgcgcgcggagcctggacgctatgcatgaatattacgccgaccagtattgagtatcagcttgccgatgcccgtctactggcggttgacggccaccagcatttgcccatcgatgcccctacgccgcaggcccttctggaggccatcgtggaatgctggcggcgtatccaccgcctctacccgcagcacagcatcaatctcgcccttggcgtccatggtcaggttgatccgatcaccggcgtttcacaaaccatgccccaggcgcgctggaaaacgccgattgaaataaagtatctgctggaagaacagctcggcgtgcaggtacgggtagataatgactgcgtgatgctggcgctggcggagaaatggcagcatccgggcccacaaccggatttttgcgtgatcaacgtcgattacggtattggatcatcgtttgtgattaacgatcagatttatcgaggaagcctctacggcagcgggcagattggacacacgattgtgaaccctgacggcaaagcctgcgactgcgggagatatggctgtcttgaaaccgtagcctccctcagcgcgttgaaaaaacaggcgcggatgtggcttaaaacccagcctgaggcgcagcgatctccggagcagttaaccacggcatcgctcattgaggcctgggaacagggagacgtgcatattcgcgcatgggttgataacgccgccaacgctattggcttaagtctttataatttcttaaatattttgaatattaaccagatctggctatacggtcgcagctgtgcttttggcgaacagtggctggagagtatcgtcaaacaaaccggctttaatccgtttgaccacggcgatacgccgagagcgcatgccacccaaatcggttttggcacactgacccgcgctcagcagctgatggggatcggttatctgtatgttgaggagcaactgcagacgctgcgttaa

SEQ ID NO: 174570 - DNA, 3276 bp, Klebsiella oxytoca
atgtacggttcggttaaggtctggcaggaaataattacattacctacgtggacaacgggggcggaggatccgaaccccatgtttctggaaaaacgcgtttatcaaggttcttcaggtaacgtctatccctacggcgtgattgacaccctgaccggcgaacgtgagatgcgcgattatcaggcagtatggatggagaatgatttcattcgaattatgctgttaccggaactcggcggccgtatacatcgggcgtatgacaaggttaaacagcgcgatttcgtgtattacaatgaagttgtgaagcccgccctggtggggctgctggggccatggatctccggcggtatcgagttcaactggccgcagcatcatcgcccgacgacctttatgccggtcgacttttcgatccagtgcggggaaaacggcgtgcagaccgtatggatgggggaagcggagcccatgcgcggtttgcaggtcatgaccgggtttactctctatcctgaccgcgcgctgattgaaattaccggtaaggtctttaatggtaacgccacgccgcgccatttcctgtggtgggccaacccggcggtaaaaggcggcgatgctcaccagagcgttttcccgcccgacgtcaccgccgtgttcgatcacggcaagcgcgatgtttccgctttccctattgccaccggtacctactacaaagtcgactattctgcgggcgtcgatatctcccgttataaaaacgttcctgtgcccacctcgtatatggcggagaaatcggattacgattttgtcggcgcttatcaccatgacgagcgcggtgggctactgcatgttgccgatcatcacatctctccgggcaaaaaacagtggagctggggctatggcgactttggccaggcatgggaccgcaatctgaccgacgaaaatggcccttatattgagctgatgactggcgtctacaccgataaccagcctgactttacctggcttgcgccttatgaagagaagatttttgtgcaaaatttccttccctatagcgagctgggaatggtgcaaaatgccaatacgcagctggcgctgaagctggttcgcgagtctgagcagctacagctcggcgtttacgccattgcgccgctggaaaatatcgttgttgaactcagtgctgaacagcagccgctgtatgaaactcagcttacgctgaagcccggcgagagttggcggcatacgctgccggaacatgacgtcggtcgcttgaccatcaaggtgaaaagtgcagacaagcaagtgctactggattatcacgaacatattactcagcagacgccgctgcccgaaccggcctcagcgccagcgatgccggaagagattcacaacggtgatgagctctattttatcggccagcatcttgaacaatacaatcacgccagccgctatgccgcagattactatcgccgggcgatagccctcgatccgcaggattatcgcaataatgttgccctcgggacgctggcgtttaaccaggccgactgggttttagcggagcaatgctcccgcgccgcgctacttcgcgcccatcgtctgaataaaaatccgcgcgatggcgaagccagtatgctgcttgccagcgcgctggaaaggcagggagatgaacaaggcgcctgggatcactattacaaagcatcctggagcggtaactgccgcgatgctgcatggtgggcgctggcaaggctggcgatgaagcgtggtgatacggccgacgcgctggaaaaggtcaacaccagtctgcagttcaacgccagcaaccatctggctatggggctgaaagcgctggcgttagcggacagcgggcggacgaaagcggcgcaggagtatattttcgcctgtcttaaacaatacccgttgagctatccgctgcactgcgcgcgctggatgattgagcccagcgacgaagcgcgagagaacctactgtgggtaacggggcgcagagggatcaacggcagcctgctggcgggctggctgctttctatcggacagaagcaggcggcgaaagagatgcttgaggtgctggattgccaggaagcgctgccgatgctgtggcgagcctcgttaagcgatgacgccaataaacggcaacggttgattgccgaagccgagcgctgccatccgcaaaaagtgcgtttccccaatacgctcgatgaagttcagatgctgcaaaccctgagcgacagcgctttcgcccgctatctgctcggttgcttctggtacagcaaacgacgctatgaagaggcggtcagctgctggcgcgagacgctggcaaaatcacccgactatgcgcccgctcatcgcctgctcggggtttacgcctggaataaacaacaggatgcggcgcaggcgctggcttatctacagcgcgccgtagagcttgagcctgaaaacgcgcgcttcctctttgagcttgattttctgcaaaaatcactgggtacgccggtaaacgaacgactggagaagctggcggcgcgcaaatcggtggtgctgaagcgggacgatctgaccgctgagctgctaagcctgtggaatgcttccggccattattccgatgccgccgctattctcggtacgcgcgtgtttcatccctgggaaggcggggaagggaaaatcaccggtcagtatttgctcaatcagctgcatcgggctttgcagtttattgaacgcgaggcgtttacgcaggctgcggactgtctgaaagacgcattacgctatcccgataatctgggggaggggcgactgcccgggcagacggacaacgatatctggtatttgctgggctactgcacggaacaggctggggatgcgcagcaggcagaggaatattatcagcttgccctacaaggaggctcaacgctggacgccgggcgttactacaacgatcagcccgctgattaccttttctggcagggcatcgcgctgcgtaagagcggtaacccggcgcaggccgagcagcacttccagaattttatcacctgggccgggcagcatcgggatgacgttccgcatgccgacttttttgccgtctctcttccggatttggtggtgcttgatgtctcagcgcagcagcaacatcagcagcactgcttgtttattgaagcgctgggccatctggggctggggaatgtatccgccagccagcaggcgatgcagcggcttctgcaactgaacccggctcatgataaggcgcatttgattcgtcatgccctgcaaagcggcattttttcctga

SEQ ID NO: 174571 - DNA, 1437 bp, Klebsiella oxytoca
atgaataacgcgcagacacatctcaaaatgggctacgtctggactatctgtctggtcgccgcctgcggtggtttactgtttggctatgactgggtagtcatcggcggcgctaagccattttatgaagcctggttttccattaccgatccggcacaatccggctgggctatgagttcggcgctggtgggctgcgttttcggcgcattaatctcgggatggtgcgccgataaactcgggcgcaagctgcccttaatactttccgccgtgctgttcagcgcgtcggcgtgggggacggcggtcgccagcagtttcgacatgtttgtggtttaccgcattgtgggcggcgtggggattggtctggcatccgctctcagcccgctttacatcgctgaagtcagcccggcagaaaaaagagggcgctttgttgcggtcaaccagctcactatcgtgattggcgtgctggccgctcagcttattaacctgatgattgcggaacccgtagagacgggggcgacgcagcaaatgattgtagaaacctggaacgggcagatgggctggcgctggatgttcggcgcagaactggttccggcgctggcgtttctggtactgatgttttttgttcccgaatcgccgcgctggcttatgaaagccggtaagcctgagcgtgcccgagccgcgctggaacgcattggttctgccgactatgccgacagaatattacgcgacatcgcgcacacgctggaaaaagataaccataaagtatcctatggcgcactgctggctccgcaggtgaaaccgatcgtgatcattggcatggttctcgccgttttccagcagtggtgcggaatcaacgtcatctttaactacgcacaggagatttttgcctcagcgggcttcgatattaacagcacgcttaaatcgatcgtcgcgacgggggttgtaaacctggtatttaccctcgccgcgctgccgctggtggataaaatcggccgccgtaaactgatgctgcttggcgcttcaggcttgacgctgatctatgtgctgattgccggcgcttacgccatgggcattatgggctggccggtactgctgctggtgctggcggctattgccatttacgccttgaccctggcgccggtcacctgggtactgctggcggaaatcttccccaaccgcgttcgcggactcgccatgtctttaggtaccctggcgctgtggattgcctgtttcttgttaacctacactttcccgctgcttaatgccggactgggcgcggcgggcagcttcttgctgtatggcatcatttgcgctgccggctatctctatattctgcgcaacgtgccggaaacaaaggggatcactctcgaagccctggaagaacagctggcgcaacgccatacgggcgttaatgcggcgaagcaggagcagacgcgctaa

SEQ ID NO: 174572 - DNA, 837 bp, Klebsiella oxytoca
atggcggaagagtggattatggagaacgcgcatctgcggatgtgcgtctcttctctgggcggcaaagtgcaaagtttattctcgcggcaatatcaggcgccggtgctatatgaaaatcccgcaggcggcatgtttccgatgctgccgatggccaatcgcgttgccggaaatcgctttatttttcagggacgcgagatagtcctgccacgtcaccacgccgacgcgcatttttttctccacggcgacggttggctgcagtgctgggatatcattgcgcgcggcggcgatttttgcgtgttacagctgcgtcggcaacatgtctgcggtttcgattacctggcgcagatccgctatcagttgctgcgtaaccaactgatagcgtcgctgacgcttacccactgcggtagcacgcctatcccctacggctgcggttttcacccctttttctcctttgataagcgcagcacggtacagtttgccgccagtggctactggccggaaggggaacagcatcttccgctggactggcaaagccctcttcccggctatgccgatttcagtcacccgcagtacggtgaggatcgctggctaaacgtcggctattccggctggagtggacgagcgaggatagtaagtaatgtgatgaatatcgcaattctttcgcaaacttcgtggttgatgctctttagaatgcagggtgaaccgttcctttgcctcgagccgcaaactcacccggtaaacgcccataacatggaaggccagccggggctgcgggttttgggcaccggagatacgctgaatttttcgctaaaaatagacgttcaggggcgcgagtag

SEQ ID NO: 174573 - DNA, 1134 bp, Klebsiella oxytoca
atggtcttacactccacgcgctggctggcgcttagttacttcacctatttctttagctacggtatcttcctgcctttctggagcgtctggctttccggacttggcctgacgccggaaaccatcggtatgctgctcggcgccgggctggtgtcgcgttttcttggcagcctgctgattgcgccgcgggtcagcgacccgtcccgactgatctcttctctacgcattctggctttgctgacgctgctttttgcgctcgcattttgggtcggccatcatgtcgcctggctaatggtgattatcgtcggctttaacctctttttctcgccgctggtgccgctcaccgacgcgctggcgaatacctggcaaaagcagatcaccatggactacgggcgcgtgcgtctgtggggatcgatagctttcgtcattggttcggcgctaaccgggaagctggtcagcctgtatgactaccggatgatactggtgatgctcagcgtcggcattgcttcaatgctgctcggcatgctgctgaaaccgtcggtgcagccgcagggagagtcccgccagcaggaagcggccggcctggcggcctggcttacgctggtgcggcaaagctggcgcttccttgcctgcgtctgtttgctgcagggagcgcacgccgcctactacggatttagcgctatctactggcaggaggcggggtattcggcctccgcggtgggctatctgtggtcgcttggcgtggtggcggaagtggtgattttcgcgctgagcaaaaaagtcttccgtcgctttagcgcccgcgatctactgctgctgtccgcggtgtgcgggctgattcgctggacgttgatgggctggacgacggcgctaccctggcttatcgtcgcgcagatcctccactgcggcacctttacggtgtgccatctggcggcgatgcgctatatcgcagcgcgtcagggcagcgaagtgatccgcctgcaggcggtctactccgccgtcgcgatgggcggcagcattgcggtgatgacggtatttgccggtttcctctaccagcatctgcaccagggcgtgttctgggtaatggcgttggtggccttaccggcgctggtggtgaggccaaaagcggtagcctag

SEQ ID NO: 174574 - DNA, 1278 bp, Klebsiella oxytoca
atgatgacagtgattgaaccaccatctgtgctttccagtccacagcgccgtagccaggtgctcctgatgttttatctgcccgggcagtccgtgacgcccgaatggctgggtaacctcacccaggttgatgaggataccgcccggcaggacatcgcggagacgggacgcgaaattcagcgttatcaccgcttgaccctgacttcacaagcggacggcagctatcggatggaaggcgccgcgctcgatcaacgcttatgcctgctgcacggcctgcgccgcgggctgcgcctgtgcccgcattttgtcagccaccattttaccccggctctgaaaacgcagcttaaacagcaaggtatcgcacgcacgctctatgatgacaccaatcttcaggcattggtcaaccgctgctcgcgcgccctgaaccggcagtttgactgccgcgacgtgcattttctgcgtctttatttacagtattgtttgctgcagcaccaccttgggcagagtccctctttcactcacgagcagcagcgctgggcgcaggccgccgccgaatttgccctcgcggaggagattgtccgccactggcagcggcgggttgcggcagcgccccacgcaggagaacagctgtttttgaccctgctgtttatgctgttgaaaactcccgatcctattcgcgatggtcatcagcaggatcgacgtctgcatctggctatatctggcctgattcaccgctttcagaacctggcgggtcgtccgtttagcgatgaacaggggctcagcgatcaactctatatccacctctcgcaggcgttacatcgcagcgttttcgctatcggtatcgataacgcgctgccggaggaaattggccgtctttatccccgcctgatgcgcaccacccaagccgcactggaggagtttgaagccagctggcaagtgcggtttagccaggaggaagtcagcctgatcgcggtgattttcggcgcatggctgatgcaaaaaagcgatctgcaagagaagcaggtggtgctgcttaccgatgataatccggatcttgagcagtcgctggagcagcagctgcgcgagttaaccctgttgccgctcaatatcaagtatttgagcgtgagcacctttcagaaagagggcgccccgaaggaagtgacgctgatcgtcactccctataccaccgcgctaccgctgttttcaccgccgctgtttcatgctgaagaggcgttcagcgatcatcagcagcagcagatttgcaaaatgctggaggcctag

SEQ ID NO: 174575 - DNA, 639 bp, Klebsiella oxytoca
atgaagagagtgaaacaatgcgtcagcgtagcgtttttcatgtttttatcgctatctgcggcggcgcatccgcacagtttcattagtctgcaaaccgaggccgtagcggaaaatgggcaacttaccggctttaaaatgcgctggacgatggatgaaatcacctccgccgatctgctctatgatgcgggcaacgccaaacccggtagcgaaatctggaaaaagctggcggcggaagtgatggctaacgtactgggccagcactatttcagcgagctgtggcataacggtgagagagtgaagtttgataatcggcccgatggctatggccttgagcgcagcggccatcaggcggtactctcttttactctgccgctggcgaagccgcagcctctggccgggcaaaccttcaccttttccacctacgacccaacttattatgttgatatgtattatgaccaggacgcagactttgttctgccggctgcaatgacagcgggctgcacggcaaaagtgatgacgccgaaacctaatgaaaaaatgttgtcctacgcgcagtcgctggataaagcggatgcgccgccggaggatatggaactggggaattacttcgcgcaaaaggtaacgctgcaatgtcagtga

SEQ ID NO: 174576 - DNA, 981 bp, Klebsiella oxytoca
atgtcagtgatttttgcacaaaacggccgttcgccgcgctggcgtcagctgtggccgctggcgctgtttctgctgctggcagccggagctggcttctggctatggcgggcctggccgcaggtgctgctgcaaagcgcggtctggcagcgcgcgctgaatgtcgaactgagtcggcttctgcaggcggttgcggagaatcctgccgctgccgggctgtcgctgctgggatttagcttcgcctacggcgtcctgcatgcgctggggccggggcatggcaaggtggtcataaccacctggctggcaacccatccatcgaagctgaaatcgagcatcggtctgaccctggccgcctcgctgctgcaggggctggtggccatcgccttaatcgtcgtggtgctgacgctgctgcggctgccggcaagacagctgcatctgagcagcttctggctggaaaagggaagctatctgctggtcggcgcgctgggccttttgctgtgctggcgtgcgctaaaaaagctgcgcgtactgctgcgccggccgacattcaccgccttcaccgcgcatcacgttcatcacgccaactgcggctgcgggcatcagcatctgccggcgccggaacagctgcaaagcggcgacgactggcgggcgcggctggctatcgtgctgtcaatggggatgcggccctgctccggagcgattatggtgctgttattcagcaaggttatcggcgtatttagctggggcatggcggccgcgatggcgatggcggcaggtacctcgttaacgattagcgcgctggccctgctggtgcatggcttccgtcagctggcggtcaggctgagcgccggccgggcgccggcgctgtggaagcagattggctgggcaacgctggcgctggccggcggcgtcatcttactggcggcggcgatagtgatgtggagcagcgcgatgccatcgggcggcggcctgcgtccgttttga

SEQ ID NO: 174577 - DNA, 804 bp, Klebsiella oxytoca
atgcatccgatgctgaacatcgccgtgcgcgcagcgcgcaaggcgggtaatttaattgccaagcactacgaaacccctgactccgtagaaaccagccagaaaggcagcaatgattttgtgaccaacgtcgataaagccgcagaggcgatgattatcgaaaccattcgcaaatcttacccgcagcacaccatcatcaccgaagaaagcggtgagcacgctggtgaagatcaggatgttcaatgggttatcgatccactggatggcaccaccaactttgtaaaacgtctgccccacttcgccgtatccattgccgtacgcattaaaggccgtactgaagtagccgtggtttacgatccaatgcgtaacgaactgtttaccgcaacccgcggtcagggcgcgcagctgaacggctaccgcctgcgcggcagcagcgctcgcgatctcgatggcacgatcatcgccaccggcttcccgttcaaagcaaaacagcacgcgacctcctacatgaacatcctcggcaacatgtttaccgaatgcgcggacttccgccgtaccggttccgccgccctggatctggcctacgttgctgctggccgcgttgacggctactttgaaatcgcgctgaaaccgtgggatttcgcggccggcgagctgatcgcccgtgaagccggcgctatcgtctgcgactttaccggtggccataactacctgctgaccggcaacatcgttgcaggcaacccgcgcgttgtgaaagcgatgctggccaatatgcgcgagcagctgagcgaagcgctgaagcgttaa

SEQ ID NO: 174578 - DNA, 738 bp, Klebsiella oxytoca
atgctgcaaaatattcgaatcgtactggtagaaacctcacacaccggcaatatgggctccgtcgcccgcgcaatgaaaaccatggggttaaccaacctctggctggttaatcctctggttaaacctgattctcaggccatcgctctggcggccggagccagcgacgtgattggcaatgccaacatcgttgataccctcgatgaagccctggcggggtgcagcctggtagtgggaaccagcgcgcgttcccgcacgctgccgtggccgatgctcgatccgcgtgaatgcggtctgaaaagcgttgcggaagcgaagcatgcgccgatcgcgctggtatttggccgcgaacgcgtaggcctgactaacgaagagctgcagaagtgtcactaccacgtggcgattgcagcgaatccggaatacagttcgctgaacctggcgatggcggtacaggttatctcctatgaagtccggatggcctggctggcggcgcaggaacaaaatgaacctgtcgctgagcatgaggaaaccccgtatccgctggtggatgatttagagcgtttctacggtcatctggagcagacgctgctggcaaccggatttattcgcgccagccacccgggtcaggtgatgaacaaactgcgccgtttgtttactcgcgcccgtccggaaagccaggagctaaacatcctgcgcggcatgctggcgtcaattgagcagcagcagaaaaataaagaataa

SEQ ID NO: 174579 - DNA, 492 bp, Klebsiella oxytoca
atgagactgacatctaaagggcgttatgccgtgaccgcgatgcttgacgttgcgctcaactctgaatcgggtccggttccgttggctgatatttcagagcgtcagggaatttcgctttcctatctggaacagctgttctctcgcctgcgcaaaaatggtctggtttccagcgtacgtggtccaggcggcggttatctgttaggtaaagaagcgggtagcatcgcggttggcgaagttatcagcgcagtagacgaatccgttgacgccacccgttgtcagggtaaaggcggctgccagggcggcgataagtgccttactcacgcgctgtggcgcgatctgagcgagcgactgaccggttttctgaataacatcacgctgggcgaactggtgaataaccaggaaatcctcgatgtctccggtcgtcagcacaaccatgaatcccagcgtaatacccgtgctcaggacgctatcgacgtcaaactgcgcgcgtag

SEQ ID NO: 174580 - DNA, 1302 bp, Klebsiella oxytoca
atgctccgacatcctgtgtactcggtcgtacatccagccggttgcctgattccttgcattgaagcgatgtacggagtttatagagcaatgaaattaccgatctatctcgattactccgcaaccacgccggtggacccgcgtgttgccgagaaaatgatgcagttcctgaccctggacgggacctttggtaacccggcctctcgttcacaccgttttggctggcaggctgaagaggcggtagatatcgcccgtaatcagattgccgagctggtcggcgctgacccgcgcgaaatcgtttttacctccggcgcgacggagtccgataacctggcgattaaaggtgcagccaacttttatcagaaaaaaggcaagcacatcatcaccagcaaaaccgaacacaaagccgtgctggatacctgccgtcagctggagcgcgaagggtttgaagtgacctacctcgccccgcagcgtaacggcattatcgatttaaaagagctggaagccgcgatgcgtgatgacaccatcctggtttccattatgcacgtgaataacgaaatcggcgtggtgcaggatatcgctaccaccggcgagatgtgccgcgcccgcggtatcatttaccacgttgacgcgacccagagcgtgggcaagctgcctatcgatctgagccagctgaaagtggacctgatgtccttctccggccacaaaatctacggcccgaaaggcatcggcgcgctgtacgtgcgtcgtaagccgcgtatccgtatcgaagcgcagatgcacggcggtggtcacgagcgcggtatgcgttccgggacgctgccagtccaccagatcgtcggtatgggtgaagcttaccgtatcgcgaaagaagagatggaaagcgaaatggcccgcctgcgcggcctgcgtaaccgtctgtgggacggcgtaaaagatatggaagaggtctacctgaacggcgatctcgagcagggcgcgccgaacattctcaacgtcagctttaactacgttgaaggcgagtcgctgattatggcgctgaaagacctggcggtctcctccggttcagcctgtacttccgcaagcctcgagccgtcctacgtgctgcgtgcgctggggatgaccgacgagctggcgcatagctctattcgtttctctttaggtcgttttactaccgaagaagagattgactacaccatcaatctggtccgtaactccatcggccgtctgcgcgaactctctccgctgtgggaaatgttcaagcagggcgtggatttgaacagcattgaatggtcacatcactaa

SEQ ID NO: 174581 - DNA, 387 bp, Klebsiella oxytoca
atggcttacagcgaaaaagttatcgatcattacgagaatccgcgcaacgtcggctctttcgacaatagcgacgaaaacgtcggcagcggtatggttggcgcaccggcgtgcggcgacgtgatgaagttgcagattaaagtcaacaatgaaggtatcattgaagacgcgcgtttcaagacctacggctgcggttccgctattgcctccagctccctggtgaccgaatgggtgaaagggaagtcgctggacgaagctcaggcgattaaaaacaccgatatcgccgacgagctcgaactgccgccggtgaaaattcactgctctattctggcggaagacgcgattaaagccgcgattgcggattacaaaagcaaacgtgaagcaaaataa

SEQ ID NO: 174582 - DNA, 324 bp, Klebsiella oxytoca
atgtcgattactttaagcgacagtgcagcagcgcgagtcaacacctttctggccaaccgcggtaaagggtttggtctgcgcctgggagtcagaacttccggctgctcgggtatggcttatgtactggagtttgttgacgagccggcggcagaagacaccgtgtttgaagacaaaggcgtgaaggtcgtgatcgacggcaaaagcttgcagttcctcgacggcacgcagctggacttcgtcaaagaaggtcttaacgaagggtttaagttcaccaacccgaacgtgaaagacgagtgcggctgcggcgaaagctttaacgtgtaa

SEQ ID NO: 174583 - DNA, 516 bp, Klebsiella oxytoca
atggactattttaccctcttcgggttaccggccagctataccctttcgttagaacctctggctgcccggtaccaggagctacagcgccagtatcatccggacaagttcgccagcggcagcgcggccgaacagcttgccgcggtgcagcagtccgccaccatcaatcaggcgtggcaaacccttcgccacccgctgacccgcgccgaatatctcctttcgcttcacggattcgatctcgccagcgagcagcataccgtgcgcgataccgcgttcctgatggaacagctggaactgcgcgaagagcttgatgagataggcaaggcgaaagatgaagcgcggctggaaagttttatcaagcgggtcaaagcgcaatttgatacccggcatcagctgatggttgaacaactgaataacgagacgtgggaggcggcggcggataccgtgcgcaagctgcgttttctcgataaactgcgaagcagtgcggaacaactcgaagaaaaactgctcgatttttaa

SEQ ID NO: 174584 - DNA, 1851 bp, Klebsiella oxytoca
atggccttattacaaattagtgagcctggcctgagcgccgcgccgcaccagcgacgtctggcggcgggtatcgacctgggcaccaccaattcactggttgctaccgtgcgtagcggccaggccgaaaccctgcccgaccatcaggggcgctatttgctgccatcggtggtgaactatcaggcttcgggtttgacggtgggctacgacgcgcgacaaaacgccgctcaggatccggtcaacaccattagctccgtcaaacgcatgatggggcgctctttggccgatatcgaggcccgctacccgcatctgccttatcacctgcaggccagcgaaaacggcctgccgatgattcagacaacgggcggactgctcaatccggttcgcgtttctgccgatattctgaaggcgctggccgcacgcgccaccgaggcgctggcgggcgagcttgacggcgtagtgatcaccgtgccggcctacttcgatgatgcccagcgtcagggtaccaaagatgccgcgcgtctggcgggcctgcacgtcctgcgtcttctgaacgaacccactgcggcggcgattgcctacggtctggactccggtcaggaaggaactatcgcggtttacgatctcggcggcggcacttttgatatctccgtgctgcgcttgagtcgcggcgtatttgaagtcctggcgaccggcggcgattccgcgctcggcggtgacgatttcgatcatctgttggccgattatctgcgcgagcaggctggcctgaacgatcgcagcgataaccgcctgcagcgtgagctgctcgacgcggccatcgcggcaaaaatcgccctcagcgatgccgatacggcgcgggtgaatgtcggtggctggcagggtgaagtgacccgcagccagtttaatgagctgatcgcgccgctggtaaaacgtacattattggcctgccgtcgcgcgttgaaagatgcaggcgttgaggcgcaagaggttctggaagtggtgatggtgggcggctcgacccgcgtgccgctggtgcgtgaacgcgtcggcgagttctttggccgtacgccgctgacctctatcgatccggataaagtcgtcgccatcggcgcggcgattcaggcggacattctggtaggcaataagccggacagcgaactgctgctgcttgatgtcatcccactctccctggggctggaaaccatgggtggcctggtggaaaaggttattccgcgtaacaccaccatacctgtcgcgcgcgcgcaggagttcaccaccttcaaagatggccagacggcgatgtctatccatgttatgcagggcgagcgcgagctggtgcaggactgccgttccctggcgcgctttgcgctgcgcggcattccggcattaccggcgggcggagcgcatattcgcgtgaccttccaggtggatgccgacggcctgctgagcgtgacggcgatggagaaatcgaccggcgtcgaggcctcaattcaggtgaagccgtcctacggtctgaccgacggcgagatcgccagcatgattaaagattcgatgagctacgccgaacaggacgtccaggcgcgtatgctggccgagcaaaaagttgaagccgcacgcgtgctggaaagtctggtcagcgcgctggcctccgacgccgcgctgttaagcgccgcagagcgtcaggctatcgatgacgccgcggagcaagtacgcgccgcagcggcaggcgatgatgccgatgcaatcaaagaagcgattaaaaatatcgacacacaaacccaggaatttgccgcacgtcgtatggatcaatcggtccgtatcgcgctgaaaggccaatccgtggacgaggtttaa

SEQ ID NO: 174585 - DNA, 336 bp, Klebsiella oxytoca
atgccaaaaattgtttttctgccccaccaggacctgtgtccggatggcgtagttgtggaagctgagaccggtgagaccattcttgatgctgctctgcgtagcggcattgagattgaacacgcctgcgaaaaatcctgtgcctgcaccacctgccactgcatcgtgcgcgaaggctttgactcgctggctgaaagtaccgaagatgaagacgacatgctggataaggcctgggggcttgaacccgacagccgtctgagctgccaggcgcgggtgactgacgaagatttggtcatcgaaattccgcgttacaccatcaaccacgcacgcgagcattaa

SEQ ID NO: 174586 - DNA, 201 bp, Klebsiella oxytoca
atgggactgaaatggaccgatagtcgtgaaatcggcgaagcgctgtacgacgctttcccggatctcgacccgaaaaccgttcgcttcaccgatctgcatcagtggatttgcgacctggaagagtttgatgacgatccaaacgcatccaatgaaaaaattcttgaggcgattctgctagtctggttagacgaagccgaataa

SEQ ID NO: 174587 - DNA, 1287 bp, Klebsiella oxytoca
atgaccgaagctatgaaaattacgcttaccgctcagccagccgatgcgcgctggggagaaaaagcgtcttacagcatgaataacgacggcatcgccctgcacctgaacggcaaagacgacctgggtttgattcagcgcgcggcgcgtaaaattgacggcatgggtattaaacatgtcgcgcttgacggcgagggctgggataccgaccgcgcatgggcgttctgggcgggttataaaggcccgaaaggcagtcgcaaagttgagtggccagctcttgacgatgcgcagaaaagcgaactggataaccgcctgaccattattgactgggtgcgcgacaccatcaacgccccggcggaagagctggggccggaacagctggcgcagcgtgcggtagacctgctgtgcagcgtggcctgcgataacgtctcttatcgcatcactaagggcgaagatctgcgcgagcagaactacctgggcctccacaccgtcggccgcggatccgagcgtccgccggtcctgctggcgctggactataacccgactggcgacaaagaagctccggtatacgcctgtctggtcggcaaaggcattacctttgactcaggcggatacagcatcaagcagagcgcatttatggactcaatgaagtccgatatgggcggcgcggcgacggtaaccggcgcgctggcgttcgccattactcgcggcctgaacaagcgcgtgaagctgtatctgtgctgtgccgataacctgattagcggtaacgccttcaaactgggcgatattattcactatcgcaacggcaaaaccgtggaaatcatgaacaccgatgcggaaggtcgtctggtgctggcggacggcttgatcgatgcttcggcgcaaaagccggagctgatcatcgatgccgccacgctgaccggcgcggcgaaaaccgcgctgggcaatgactatcacgccctgttcagctttgacgacaggctggcgaatcgcctgctggcgagcgcgcaggctgaaaacgaagctttctggcgtctgccgctggctgagttccaccgcggccagctgccgtccaactttgctgaactgaacaataccggcagcgcggcctatccggccggcgccagcaccgcggcgggcttcctgtcccacttcgtggagaattaccatgaaggctggctgcacatcgactgctcggcgacctaccgcaaatctgcggttgagcagtggtcggcgggcgcgaccggcctcggcgtgcgcactattgcgaatctgttgaccgcggaataa

SEQ ID NO: 174588 - DNA, 777 bp, Klebsiella oxytoca
atgtccgaaactaaaaatgagctagaaatcctgctggagaaggcggctatagaaccaggccatcgtccggcttttttccgcagtttgctggaagccaccgtttgggtaccgggagccgccgcgcagggcgagcaggtcgttgaagacagcgtactggatctgcagcactgggaaaaagatgatggtacatcggtcattcctttcttcacctcgctggcggcgctgcagcaggccgttgaggacgaacagtctttcgtggtgatgccggtgcgcacgctatttgccatgaccctcggcgagacgctctatctcaatgccaaactcgccaccggcaaagagtttgcgccgcgtgagatcagccatctgctgggcgaagagggcagcccgctcagcacccagaccgtgctggaaggcggagagtcgctgctgctgtctgaggttgccgagccgcccgcgcagatggtggactcgctgaccacgctgtttaagacgctgaaaacggtgaagcgcgcgtttttatgctctatcaaagacagcgccgatgcgccagccaacctgctgattggcattgaagcggaaggcgatattgaggaggttattcaggcgaccggcagcgtggcgaccgatacgcttcccggcgatgagccgattgacatctgtcaggtggtggagggtgaaaagggaattagccactttatgatcgcccacattacgccattttatgaaaagcgctggggcagcttcctgcgcgactttaagcaaaatcgtattatttaa

SEQ ID NO: 174589 - DNA, 846 bp, Klebsiella oxytoca
atgtctacctcgttttttgtcgctgccgactggctggcagagcatattgatgacccggaaatccagattatcgacgcgcggatggcgccgccgggacaggaagagcgcgatcttaacgctgagtatcaggccggtcatattcccggcgccgtcttttttgatatcgaagccctctccgatcacaccagcccgctgccgcacatgatgccgcgcgcggaggcgtttgccgtcgccatgcgcgaactaggcgtcagcagcgataagcacctggtggtatacgatgaaggtaatctcttctctgcgccgcgcgcctggtggatgctgcgcacgttcggcgttgaaaaggtgtcgattgttgcgggtgggctggaaggctggcgccgcgatgggctaccgctggagcaaggccttcccgaactgccggaaggggattttgacggacgcgtcgatccgctggcgatcaagcggctgaccgatgtgctgctggtcagccatgaaggatcggcgcagatcgtcgatgcgcgtccggcagggcgctttaatggccaggtggcagagccgcgaccgggcctgcgctgcgggcatattcccggcgcgctaaacgtgccgtggactgaactggtgattaacggcgaacttaaaaccactgatgaactcaacgagatttttgcgcgtcagggcgtcgattttgaacggccgattattgccagctgcggctctggcgtaacggcggcggtcgtcgtgctggcgctcactactctcggcgttaacggcgttagcctgtacgacggctcatggagcgaatggggcgcgcggacggatttaccgattgagccggcccaatag

SEQ ID NO: 174590 - DNA, 1185 bp, Klebsiella oxytoca
atgattaaccctgatatcaccgcgattatcgccagacaagaacaggcgatgatcgcttttcgccgcgacctgcacgcccatccggaacttccctgggaggagaagcgcacgacggatcgcgtcgccgccgaactggaggctatcggtatcccttaccgccgcactcatcccaccggaatcatcgccgacatcatcggcggcaagccgggtaaaactgtggctctgcgcgccgatatggatgcgctgccggtacgggagctgaacgatccgctcgactataaatcacaaacgcccgggaaaatgcacgcctgcggccacgacgcccataccgccatgctgctgaccgccgcccatgcattatatgatgttcgcgaacagctgacgggcaacgtacggctcatctttcagcctgcggaagagattgccgaaggggcaaaggcgatgatacagcagggagcgattgataacgtggataacgttttcggaatgcatatctggtcgggcacgccgtccggcaaaatctcctgtaacgtcggttcatcctttgcctcagccgatttactgaaagtgaccttccgcggccgcggcggccatggttcgatgccggaggcctgcgtcgatgcggcggtcgtcgcttccgctttcgtgatgaatctacaggctattgtggcgcgagaaacttccccgctggaatctgcggtagtgactatcggcaaaatggatgtcggcacgcgctttaacgtcatcgctgaaaacgccgttcttgacggtaccgtacgctgctttagtcttgaagcgcgccagcggctggaaacggcgattagccgctatgccgagcatactgccgcagtgtatggggcgaccgctcaggttgactactgctacggtacgctaccggtgatcaacgaagagcgcagcgcgctgctggcgcagtcggttatccgcgacgcattcggcgatagcgtccttttcaacgaaaagccgactaccggcggagaagatttcagtttttatatggaaaatatccccggcgcctttgcgctgcttggctcaggaaataaagagaaaggcagcgactacgcgcaccatcacggctgctttaatattgacgagcaggtgatgaaaagcggcgctgaactgtacgcgcagtacgcctggcgctatctgcagcaaaacgcgttttaa

SEQ ID NO: 174591 - DNA, 1212 bp, Klebsiella oxytoca
atgtctcaaatggtcgcactgtcgattattattttaattctttatatcggcgacgttgtttctacccgcacaaaagcctggattccctcggtatttgtctgtgccgttctgtttttagtcggctactggacattttttccggcagatatcattagccgggccgggatcggtacgccagttgccataatgctcatgtatctgttaatcactaatatgggcaccctgctgtcgctgaaagagctggcgcagcagtggaagaccgtggtcatctctctcgccggtattgccgggatcgcggtggccgtctttgcggtgagcatgatgctattcgatcttaacaccgcgctggtcaccattcctccgctggtcgggggtatcgtgtcatcgctgattatgtcgcagggcgccagtaacgccggcctggtagacctgtcggtttttgccattttgatttacgtgatgcaggggttcgccggatatccgctgaccgcgattatgctgcaacgagaaggcaaaacgctgcttgcccgctaccgcagcggcgaacagcgccctgatgacattgccgaagagcacgcgatgctcgccgtcggcgaggagaaaatgccgcgcctgttcagtaaaatccccgtcagctacaacagcaattactttaaattcctgcgtctggcgctggtcggctgtctggcctgggtcgtcgctgacctcgcaaagccaatcgtgaatatcagccccttcgtactgtgtctgttttttggcgtcgtatttacctcgttaggcttcctggaaaaacataccctgcataaggctaacggctttggcttcgccattatggcgttgatgctctttatctttgatacgttgaacaaagccacgccggagatgctgctgcgtctgctattcccgatggtagtgttaatcgccacggcggtgataggtatgtttgttgtctcctggctggtcggaaaactgcttggcgtcagcggtccgatggcattcgccatctctttgaccgcgctgtacggttttcccgccgactacattattaccaacgaggccatcaacgccctcacccacgatgaaaaagagcgccagatgctcacccaccatatgctgggcccgatgctggttggcggattcgtctccgtcaccatggtttcggtggtgttagccggaattctggtcggctatctgacgccggtgctcggttga

SEQ ID NO: 174592 - DNA, 4947 bp, Klebsiella oxytoca
atgaaaccatttcgtttggcggcgctgtctctggcgctacttaccgcgctatcgataaccggctgcgacgacagcggcaaaccgcaggcggccgcgccggcggcatccgcagcggcggataacgcgcccgcgaagccggacagcgcccagctggcggcgctggctgagaaaagcaaaggcaaagcgttaacgctgctggatgcctctgaagttcagctcgacggcgcggcgacgctggtgctgactttttctattcctctacagccggatcaggatttctcccgcagcgtgcatctggtcgacaaaaaaagcggcaaagttgacggggcatgggagctggcgcccaaccttaaagagctgcgtcttcgccatcttgagccaaaacgcgagctgatcgtttcggtggatcccaccctggcggcgctgaataaagcgacttttgacagcagctttgaaaaaaccattaccacccgcgacatcgccccgagcatcggctttgccagccgcggctcgctgctgccggggaaagtcgtggccggactgccggtgatggcgctgaatgtcgataacatcgacgtcaattttttccggattaaacctgaatcactttcggccttcgtcagccaatgggaataccggaattccttgagcaactgggagtcggacgagctgctgaagatggccgatctggtctacaccggccgttttgacctcaaccccgcgcgcaatacgcgcgaaaagctgctgttgccgctggcggatatcaagccactgcaggagccgggcgtctatatcgcggtgatgaatcaggcgggccgctacagctatagcaacgctgcgacgctgttcaccctcagcgatattggcgtatccgcgcaccgttatcaccatcggctggatatctttacccagagtctggaaaacggcgcggcgcagtccggtatcgatgtgcagcttctgaacgccaaagggcaaaccctggcgcaggcgaagagcgacgctcaggggcacgtgacgttgcaaacggataaagacgcggcgctgctgctggcgcgtaaggacgggcaaaccactctgctggatcttaaacttccggcgctggatctggctgagttttctattgccggcgcgccgggctttagcaagcagctgtttatgtttggtccgcgcgatctctaccgcccgggcgaaacggtgatcctcaacgcgttactgcgcgatagcgacggcaggccgcttcccgaacagccggtaaagctggaagtggtgcagccggatggccaggtaatccgctcgacggtcagcaaaccgatcaatggcctgtatcaatttacttatccgctcgatagcggcgcggcgaccgggatgtggcacattcgcgccagtaccggcgataaccagccgcgcgagtgggattttcacgttgaagattttatgcctgagcgcatggcgctgaatctcacgccgcaaaatgcccccgtttcgccggctgcggatgtcagctttgccgtaagcggggcgtatttgtacggcgcgccggccagcggcaactcgctgcagggtaaactgttcctgcgtccgctgcgcgacgcggtacctgcgctgccgggcttccagtttggcgacattgccgaggagaatctttcccgcagcctggatgaagtgcagaccaccctggatgaccagggacatgcggaagtcaccgccgccagccagtggcaggagagccgctcgccgctgcaggtgatcctgcaggccagcctgctggagtccggcggcagaccggttacgcgcaccgtcaggcagccgatctggccggccgaaacgctgcctggcatccgtccggaattcgccctgaaagaggtttatgactatcgtaccgacagcacgatcaagcagccggtagtggatgaaaacagcaacgccgcatttgaaattgtctacgccgatgccaaaggcgaaaagaaagcggtctccgggctgcaggtgcgattaattcgcgaacgtcgcgactactactggaactggtccgagagcgaaggctggcagtcacagttcgatcaaaaagatcttcaggaaggtgaggaatcgctcgatctctctgccgggcaaacggcgaaagtcagtttcccggtagagtggggcgcctatcgcctggaagtcaaagggccagatgatgtcgtcagcagcgtacgcttctgggcagggtacagctggcaggataacagcgaaggccagggggcggcgcgtccggaccgcgttaccatgaagctggataaaccggcctataaacccggcgatacgatcaagctgcatattgccgctccggctgccggtaaaggctacgcgctggtggaatcaagcgaagggccgctgtggtggcaggagattgacgtcccggcggaagggatggagttatctatcccggtggataaagcctggaatcgtcacgacctgtacctcagcaccctggtgattcgcccgggggataaatcccagtccgcaacgccaaaacgggccgtggggctgctgcacctgccgcttggcgatgataaccgtcgtctgaatctggcgctggaagcaccggataaaatgcgtcctgaccagccgctgaaagtgaagattaaggccagcctcaaagaaggcgagacgccgaaacaggttaacgttctgctctctgccgtcgatagcggcgtactcaatattaccgactacgccacgccggatccctggaacgcgttctttggccagaaacgctacggcgccgatatttacgatatctatggtcaggtcattgaaggacaggggaggctcgccagcctgcgctttggcggcgacggcgatgaactgaaacgcggcggtaagccgccggttaatcacgtgacgattatcgcccagcaggcacagccggttatgctggatgagaaaggcgaagggacggtgaccctgccaatcggcgactttaacggcgaactgcggatcatggcgcaggcgtggacggctgatgatttcggcagcagcgaagaaaaaacgatcgtggcggcgccggtgattgcggagctgaatatgccgcgtttcctcgccagcggagataccactcgcctggcgctggatctcagcaacctgaccgataagccgcagacgctcaacgttgcgctggcagccagcggtctgctgcagcttgcagggggagaaataccgccggtgcatctggcgcccggcgcgcgcagcaccctgtttgtgcccgttcgcgccctacaaggctttgccgatggtgaggtaaatgccactatcagcggcctgaacctgccgggtgaaactttcacgccaatgcagaagcagtggcagctgggcgtgcgtcccgccttcccggcgcaaaccgtgaattccggcgctgtcctccagccgggggaaagctggcaggctccggcggcgcaaagcgagggtttctcgccggccacgctgcaggggcagctggtgtttagcggcaagccgccgctgaacctggcgcgctatattcgcgacctgaaggcctatccttacggctgcctggagcagaccaccagcgggctattcccgtcgctctataccaacgccgcccagcttaaagccctggggatcggcggcgatagcgatgaaaaacgacgcgcggcggtggatatcggcatttctcgcctgctgcagatgcagcgcgatgacggcggtttcgccctgtgggacagagaggggccggaagagtactggctaaccgcctacacgatggacttcctcgtccgggcgggcgagcagggctatagcgtaccaaccaacgccgtcaataacggcaaccagcgcctgctgcgttatttacaggagccggggctgatcgccgtccgctacagcgatgatgcccaggccagccgttttgccgctcaggcctacgccgcgctggtgctggcacggcagcagaaagcgccgctcggcgcgctgcgtgaaatctggagccgtcacgaccaggcgcgttccggtctgccgctactgcagctgggcgtggccctgaaattgatgggcgatgcgccgcgcggcgacgaagccctgaagctggcgatgaccacgccgcggcaggaggcgaaccgctggctcggcgattacggcagcgagctgcgcgacgatgcgctgaagctggcgctgctggaggagaacaaactgctgccggaagcgcaaaatacgctgctcagccatctggcggaagaagcctacggccagcgctggctctcgacgcaggagagtaatgccctgttcctggccggacgtacgttgcaggatcttcccggcagctggcaggcgcaaacctccgtgcaggccgaaccgctctccggcgagaaagcgcaaacccgtaacctgaccggcgatcagctggcggccttgcaggtgaccaataccggtcagcagccgctgtggctccgtctcgacagcagcggctatccgcagaacgcgccgcagccggggggcaacgtgctgggcattgaacggcaagttttcgatacccagggtcagcagaaatcgctctcttcgctgcgcagcggcgaactggttttggtgaagctggaggtgacggctaagcgtaacgtcccggacgcgctggtggtggatttactcccggcggggctggagctggaaaaccagaatctggccaacagcagcgccagtctgcaggagaacggcgaggtggtgcaaaatctgcttaaccagatgcagcaggccgatatccagcatattgagtttcgcgacgatcgctttgtggccgcggtagctatcaatgaaggccagccggtgacgctggtttatctggcgcgcgcggtgacgccgggcacctatcaggtaccgcagccgcaggttgagtcgatgtacgtgccgcagtggcgggcaactggcgcagccagcggaccgctaaccgttgcgccataa

SEQ ID NO: 174593 - DNA, 2325 bp, Klebsiella oxytoca
atgcgggtgctgaggcgtatcaaacgccgctggcgctggctggcggcgtttatttttttgctgtggctattgctgctggcggcagaccggctgtggccgctgccgctgcgtgaggttacccctgccagagtagtggtggcggaagacgggacgccgctgtggcgctttgccgatgcgcagggcgtctggcgctatccggtaacgctggctgacgtttcgccgcgctatttgcaggcgctgatccactatgaagatcgctggttctgggagcatcccggcgttaacccgttggcgatcgctcgcgccgcctggcaggatctcacttccgggagagtgatctccggagggagcaccctgaccatgcaggtggcgcgcctgctcgatcctcatccccgcaccttcggcggcaagctgcgtcagctatggcgggcgctgcagctggagtggcatctgtcaaaaagcgagatcctcacgctctatctcaatcgggcgccgttcggcggcacgctgcaggggattggcgcggccagctgggcttatctcggtaaaccgcccgcacagctaagctacggcgaagcggcgctgctggccgttctgccgcaggcgccaagcaggctgcgcccggaccgctggccggaacgtgcgcaggcggcgcgcgataaagtgctgctgagaatggaaaatcagggcgtgtggccgcagcagccggtgcgagaagctatcgaagagcccgtctggctgtttccgcggcagatgccgcagctggcgccgcttttctcccgccgcgcgctggcgagcagccggtctgagaaggtagtaacgacgctggatgccgggctgcagcggcagctggaggatctggcgctgaactggaaatcgcgcctgccgccgcgcagctctttagcgatggtggtggtcgaccataccaatatgaaggtgcgcggctgggtaggatcggcggatatcagtgatgatagccgctttggccacattgatatggtatcggcgatccgctccccgggttcggtactgaaaccgtttgtttatggcatggcactggatgaggggctgatccatccggcttcgctattacaggatgtcccgcgccggtttagcgactaccggccgggcaactttgacagcggttttcacgggccggtaagcgccagcgaagcgctggttcgctcgttgaaccttccggctgtgcaggtgctagaggcctacgggccgaagcgttttgccgccaggctgcgcaatgccggattgccgctgatgctgcccgccggcgcggagccgaatctatcgctgatcctcggcggcgccggcgcgcgtctggcggatatcgtggcggcgtacagcgcgttcgcccgtcacggtaaggcggggcaactgcgcatcactcctgattcaccgctggttgaacgaccgctgctgtcgccgggggccgcctggattgtgcggcgcattctggccggcgaagcgcagccggttcccgatgcgtcgctggtacaggtggtgccgctggcgtggaaaaccggaaccagctacggctatcgcgatgcctgggcaatcggcgtgaacgcccgctatctgataggtatctggaccggaagacctgacggcacgccggttgtcggacagtttggcttcgccagcgcggtgccgctgctgaatcaggtcaataatatgctgctggcgcggccggcaatgagccgcggcggattgccgagcgacccgcgtccctcatcggtcagcgccggaacggtttgctggcccggcgggcagtatttacctgcgggggatgcgaactgtcgccgacggctggccacctggctacttgatgagagtcagccgccgaccttgctgctccctggacaggaaggtatgcgtgggatccgctttccggtctggctgaacgaaaaaggacagcgggtggcggcagattgccccggcgcggtagagaaaagtttcgacgtctggccgctgccgctcgaaccctggctacccgcaggcgaacgacgtcgggtcaggctgcctgcagtttcggcggcgtgtccgccggtccaaagcgctgatgccgcaccgctggtgctctcgggcatacgcgagggcgcagtcgttaaacgactgcccggcgagcagagggtgatgctgtcgctgcaaacgaccggaggggaagggcggcgctggtggtttctgaacggcgagccgctgctggcggaaggctccagcgcgacccttaacatcgatcgccctgaccgttatcaactggtggtgatggatgaggcggggcaaattgttgccgcgaacttcacggtgcaataa

SEQ ID NO: 174594 - DNA, 513 bp, Klebsiella oxytoca
atgatgattataattcgcgccgtatttatcggtctcatctgctcatctgcaaaacagaacaacatatataaagaggttatcatggctattgaacgtactttttccatcatcaaaccaaacgcggtggcaaaaaacgttattggcggcatcttttctcgctttgaagctgcagggttcaaaatcgttggcactaaaatgctgcatctgaccgttgagcaggctcgcggcttctatgctgagcacgaaggtcgcccgttctttgacggtctggttgagttcatgacttccggtccgatcgttgtttccgtgctggaaggcgaaaatgcggttcagcgtcatcgtgacctgctgggcgcaaccaacccggcgaacgcgctggcgggtacgctgcgcgcagactacgctgacagcttcaccgagaacggcacccacggttccgattccgttgaatccgctgcgcgcgaaatcgcgtttttctttgctgaaggcgaggtttgcccgcgcacccgctaa

SEQ ID NO: 174595 - DNA, 1167 bp, Klebsiella oxytoca
atgtctgaacaaatagtcacacctgatagcgccgcactgacggtgccgaacaaagatgccaaaatcaacctgctggatctgaatcgtcagcagatgcgcgagtttttcaaaaacatgggcgaaaagcctttccgcgccgatcaggtgatgaaatggatgtatcactactgctgcgataactttgacgagatgaccgacatcaacaaagttctgcgcggcaaattaaaggaagtcgcggaaatccgcgccccggaagtcgtggaagaacagcgctccagcgacggcaccatcaaatgggcgattgccgttggcgatcagcgcgtcgaaaccgtgtatatcccggaagacgatcgcgccaccctgtgcgtttcttctcaggtgggctgtgcgctggagtgtaaattctgctccacggcgcagcagggctttaaccgcaatctgcgggtttcggaaattatcggccaggtctggcgcgcggcgaaaatcgtcggtgcggtgaagaccaccggtgtgcgtccgattaccaacgtggtaatgatgggcatgggcgagccgctgctgaacctgaccaacgtggttccggctatggaaatcatgctcgacgacttcggctttgggctctcaaaacgtcgcgtcacgctctccacttccggcgtggtgcctgcgcttgataagcttggcgatatgattgacgtcgcgctggctatctctctgcacgcgccaaacgataccattcgtgacgaaatcgtgccgatcaacaagaaatataatatcgagaccttcctgaactcggtacgtggttatatttcgaagtccaatgccaaccagggccgcgtgacgatcgaatacgtcatgctggatcacgtcaacgacggtaccgagcatgcccacgagctggcggcgctgttaaaagatacgccgtgcaagatcaacctcatcccgtggaaccccttcccgggagcgccgtatggccgcagctccaacagtcgcatcgaccgtttctccaaggtattgatggagtatggtttcaccactatcgtgcgtaaaactcgcggtgacgatatcgacgcagcctgcggccagctggccggcgacgttatcgaccgaaccaaacgtacgctgcgtaaacgtatgcagggcgaagcgatcgacgtgaaggcagtctga

SEQ ID NO: 174596 - DNA, 990 bp, Klebsiella oxytoca
atgaatactgaagccactcaagaccatcaagaagcaaacactacgggcgcgcgtttgcgtaacgcccgcgaacaactcgggctcagccagcaagcggtggctgagcgcttatgcctgaaggtttccacggttcgtgatattgaagacgataaggcacccgccgatctggcttcaaccttcctgcgcggctatatccgctcttatgcccgcctcgtgcacatccctgaagaagaactgctgccgatgatggcgaagcaggctcccattcgtgcggcaaaagtggcgccaatgcagagcttctcgctgggtaaacgtcgcaaaaaacgcgacggctggctaatgagttttacctggctggtgttgttcgtggtgattggcctcagcggcgcgtggtggtggcaggaccacaaagcgcagcaggacgagatctccaccatggccgatcagtcctccgccgagctgaacgctggcgataacaacagccaaagcattcctctggacaatggttcggcgaattcttccgccgataccgctgctaacagcgcgccggcagagacctcttctgcgccagcaacctctgctccggctgcgactgcggccccggtcgataacaacgccgttgttgcgccttctcaggcgaacgttgacacggcggctaccccagcgcccgccagtccaacttcgccgctaccgaccgaccaggcaaacgtgaccgctgcgccggcctcggctcaggatctggtgctgaatttcaccgccgactgctggctggaagtgagcgatgcgacgggtaaaaagctgttcagcgggttgcagcgtaaaggcggtaatctcaatctgagcggccaggcaccttataaattgaaaatcggtgcaccggcggcggtacagatacagtatctgggtaaaccagtcgatttgagtcgttttatcagaactaaccaggttgcacgtctgacccttaatgccgaacaatcaccggcgcagtaa

SEQ ID NO: 174597 - DNA, 1122 bp, Klebsiella oxytoca
atgcataaccaggctccgattcaacgtagaaaatcaaagcgaatttacgttgggaatgtgccgattggcgatggcgcccccatcgccgtacagtcgatgacaaacacgcgcaccaccgatgtggcggcgacggtaaatcaaattaaagcccttgagcgcgttggcgcggatatcgttcgtgtttcggtgccaacgatggacgcggcagaagcctttaagcttatcaaacagcaggtgagcgtaccgctggttgccgatatccacttcgattaccgcattgcgctgaaggtagcggaatacggcgttgattgtctgcgtattaacccgggcaatatcggtaacgaagagcgtatccgcatggtggtggactgcgctcgtgataaaaatattcccatccgtatcggggtaaacgctggttctctggaaaaagatctccaggagaaatacggtgaaccgactccgcaggcgctgctggaatcggcaatgcgccatgtcgatcatctcgatcgtctcaatttcgatcagtttaaagtcagcgtaaaagcttccgatgtgttcctcgcggtcgaatcctatcgtctgctggcgaaacagatcgaccagcctctgcatctcgggattaccgaagcgggcggcgcgcgcagcggcgcggtgaagtccgcgatcggcctcggactgctgctgtctgaagggatcggcgataccttgcgcgtttctctggcagcggatccggttgaagagatcaaagttggcttcgatattctcaagtcgctgcgcattcgctctcgcgggatcaacttcattgcctgcccgacatgttcacgtcaggagtttgacgttatcggtaccgttaacgccctggagcagcgcctggaagacatcattacgccgatggacatttcgatcattggctgcgtggtgaatggcccaggcgaggcgctggtgtcgacgctcggcgtgaccggcggcaacaagaaaagcggcctgtacgaagacggcgtccgtaaagaccgactggataacgacgatatgatcgatcagctggaagcgcgtattcgcgctaaagcatcgatgctggatgaggcgcgtcgtatcgatattcagcaggttgaagcgaaataa

SEQ ID NO: 174598 - DNA, 1275 bp, Klebsiella oxytoca
gtggcaaagaacattcaagccattcgcggcatgaacgattatctgccgggcgaaaccgctctctggcagcgcattgaaggctcactgaagcaggtgcttggtagctacggttacagcgaaatccgtatgccgattgtagagcagaccccgttattcaaacgcgctatcggcgaagtgaccgacgtggttgaaaaagagatgtatacctttgaggaccgtaacggcgatagcctgaccctgcgtccggaaggtacggcgggttgcgtacgcgccggcatcgaacatggtctcctgtacaatcaagaacagcgcctgtggtatatcgggccaatgttccgccacgagcgtccgcaaaaaggccgctatcgtcagttccaccagattggtgcggaagcgttcggtctgcaggggccggatatcgatgccgagctgatcatgctgaccgcccgctggtggcgtgaactggggatctccagccacgttgcccttgagctgaactctatcggttcgctggaagctcgcgccagctatcgcgacgcgctggtggcttatcttgagcagtataaggataagctcgatgaagactgcaaacgccgcatgtacaccaacccgctgcgcgtgctggattctaaaaacccggaagttcaggcgctgctgaacgatgcgccgacgctgggtgattatcttgacgaagagtccaaagcgcacttcgccgggctttgcgcgctgctggacgatgccggtattcgctataccgtgaatcagcgtctggtgcgcggtctcgactattacaaccgcaccgtgtttgagtgggttaccaccagcctcggctcacagggaaccgtctgtgccggtgggcgttatgacggtctggttgagcagcttggcggtcgcgcaacgcctggcgtcggctttgcgatggggctggaacgtcttgttttactggttcaggcagtgaatccggaatttaaagccgatcctgttgtcgatatatacctggtagcctccggaactgacacccagtccgcagcaatgcgtctggctgaacaggtacgcgatgcgttacccggcgttaagctgatgaccaaccacggcggcggcaactttaagaagcagtttgctcgcgctgataaatggggcgctcgcgttgcgctggtgctgggcgaagcagaaatcgctgacggaaacgtggtagtgaaagatttacgctcaggtgagcaaactaccgtaacgcaggatagcgttgccgcgcatttgcgcacacttctgggttaa

SEQ ID NO: 174599 - DNA, 621 bp, Klebsiella oxytoca
gtggaactttacaataacgaaaacgatcaggtcgacgcgctgaagcgcttctttgctgaaaatggcaaagcgctggccgttggggtgattttgggcgttggcgcgctggttggctggcgctactggacctcccatcagttggataccgccagaggctcgtctctggcttatgaaaatgcgatttccgcgcttaaagcggataaaccagaggcgctgaacgcggcgcagaaatttgccgccgacagcaaaaacacctatggtgcgtttgcttctcttgagctggcgcagcagtttgttgagaaaaacgatctgcagaacgctgaaaagcagcttcagcaggggcttgccgctgcttctgatgataacctgaaatcggttatcaatatgcgtcttgctcgcgtacagctacagcttaagcagcctgatgccgcgctgaaaaccctggatgccgtgaaaggcgaaggctggaccgcgattgtcgccgacctgcgcggcgagatcctgctgagcaaaggcgataagcaaggggcgaaagcggcctgggaagcgggcgcgaaaagcgatgcttcgccggcgctcagcgaaatgatgcgtatgaaaataaataatttgtccatctga

SEQ ID NO: 174600 - DNA, 1179 bp, Klebsiella oxytoca
atgcaattgcgtaaattacttttgccagggctgctttccgttaccttattgagcggttgttcgctgtttaacagcgaagaagatgtggtgaaaatgtcgccactgccgacggtggaaaaccagtttacgccgtccacgtcctggagcacctccgttggcggcggtattggcgaattctactctaacctgcacccggcttttgctgatggcgttgtgtatgccgccgatcgtaaaggcaccgttaaagccctgaattcaggcgacggcaaagaggtgtggtcggttaacctggccgagaaagacggctggttctcccgcgcgcctgcgctgctctccggcggcgtgaccgtctcgggtggccatgtgtatatcggtagcgaaaaagcgaaagtttacgcgctgaataccagcgacggcaccgtcgcatgggaagcgagcgtagcgggtgaagcgatttcccgtccggtcgtcagtgacggtatggtgttgattcacaccactaacggtcagctgcaggcgctgaacgaagctgacggcgcggtgaaatggaccgttaacctggatatgccagcgctctctctgcgcggcgaatccgctccggctaccgcatacggcgcagcgattgtgggcggcgataacggtcgcgtcagcgcggtgctgatgcagcaggggcagatgatttggcagcaacgtatctctaccgccaccggtccgacggaaatcgaccgtcttaacgacgtcgatacgacgccggttatcgtgaacggtgtgatttatgcgctggcctataacggcaacctgacggctttggatctgcgcagcggccagattatgtggaaacgcgagctgggttcagtgaacgatttcatcgtcgacggcaaccgtatttacctggttgatcaaaacgaccgtctgctggcgctcaccaccgacggcggcgtgacgctgtggacgcaaagcgatctactgcaccgtctgctgacggcgcctgtgctgtataatggcaacctggttgttggcgatagcgaaggctatatgcactgggtcaacccggaagatggtcactttgtggctcagcagaaggtagacagctcaggcttcctgaccgatccggttgttgctgacggcaaactgctgattcaggcgaaagacggtacgctgtacgcgattacgcgttaa

SEQ ID NO: 174601 - DNA, 1479 bp, Klebsiella oxytoca
atgatacctgtggtcgcgcttgtcgggcgccctaacgttggaaaatccacgctttttaaccgcttaacgcgcactcgcgatgcgttggtcgcggatttcccggggctgactcgtgaccgtaagtacggtcgtgctgaagtggaaggccgcgaatttatctgtatcgataccggcgggatcgacggtaccgaagatggcgtagaaacgcggatggcggaacagtcgctgctggcgattgaagaagcggacgtggtgctgtttatggtcgatgcgcgggcgggcctgatgccggcggactcggcaatcgctaaacatctgcgctcccgcgaaaagccgaccttcctggtggcaaacaaaactgacggcatcgatgccgatcaggcgatcgccgatttttggtcgctggggttaggcgagatttatcctatcgccgcttcacacggtcgcggcgtcaccagtctgctggagcacgtcctgctgccgtgggttgatgaggtgaacccgccggaagaagtggacgaagacgcggcatactgggcacagtttgaagccgagcagaacggcgaagcagttgaagagccggaagaagattttaacccacaggatctgccgattaagctggcgatagtgggtcgcccgaacgtgggtaagtcaacgctcaccaaccgtatcctgggcgaagaccgcgtagtggtctacgacatgcccggaacgacccgcgacagcatctacatcccgatgcagcgcgacgagcgtgaatatgtgctgattgacaccgccggcgtgcgcaaacgcggtaagatcaccgatgtcgtcgagaaattctcggtgattaaaaccctgcaggcgatcgaagacgccaacgtggtgctgctggtgattgatgcgcgggaggggatttccgatcaggatctctctctgctgggctttatcctcaacagcggtcgctcgctggtgattgtcgttaacaaatgggacggcctgagccaggaagttaaagagcaggtgaaagagactctggactaccgtctgggctttatcgactttgcccgcgtgcactttatctccgcgctgcacggtagcggcgtaggcaacctgtttgaatccgtgcgcgaagcgtacgacagcgcaacccgtcgcgtgggtaccgctatgctgacccgcatcatgaccatggctgccgaagaccatcagccgccgctggtgcgcggtcgtcgcgtgaagctgaaatatgcccacgccggggggtataacccgccgatcgtggttattcacggtaatcaggttaaagatctgccggattcgtataagcgctacctgatgaactacttccgtaaatcactggaagtgatgggcacgccaattcgcattcagttcaaggaaggggaaaacccgtttgccaacaaacgtaatactctgacgcctaatcagatgcgtaagcgtaagcgcttgattaaacacatcaagaaaagcaaataa

SEQ ID NO: 174602 - DNA, 378 bp, Klebsiella oxytoca
atgaaaagcttcttaactctcctgatgctgtttctttttcccatagcctgtaccgctgaatcacaacctgttgaaccgcgcgttaagcctgcttatccagcgaaagccgcaaaaaaagggataccgggtcaggttaaagcgcaatttgacgttgacgagaatgggcgggtgactaacattcagttattaagctccgatccctccggaatgtttgataatgaagtcagggccgcaatgggaaaatggcgatacgttaaagggaagccttccagcaataacatcattaccattcatttcacgccggggccgtgttccgttgaggtgccagcgccaaatcagcccggcagtattcgaagcggtggcgtcccttttcgctaa

SEQ ID NO: 174603 - DNA, 393 bp, Klebsiella oxytoca
atgaaaaaaacaatcgtgatgttcgctttggtcatattaaccagcagctgtacgccgtttcatcctgctgactgtcataaaacctcagcgcttgggagctgtagctctggacgattcagcgatgatgatgaatatggcaggcaggcgagatcgataaaagagtctattgattcccgattatccaatcgctacggctggacggggaaaaaatgcacgatccatgtgagtttcagctatgaggggaaactgaatagcatcacaacgagtgaaggtaataaaaaatattgcgctgcgctgattgatgccgctaaacgggccaccttcccgccgttcaccgataagcaggtgtacgacgcttttgctcagtcccggttcagtatgcagggtgagtaa

SEQ ID NO: 174604 - DNA, 216 bp, Klebsiella oxytoca
atggaatttgattgccccgtgtgccatgcgcagcttgctgtgcagggcaatagcgcccactgcgcgcattgcgcgaaagagtatgttgttgaagcccgctgcccggactgccacaagccgctggaagtattaaaagcctgcggcgcggtagattatttttgtcagaatggccacgggctgatttcaaaaaaacgcgtcgagtttgtgccggtttaa

SEQ ID NO: 174605 - DNA, 345 bp, Klebsiella oxytoca
atgaatcttgccgatcttagcgatgatgcgattattgaactggctcgcgaggggggcgtcgcctggatcccggcgctcagtggaatgcgtaagattgtggttgcgaagctcaacgagcaacagaagcagcggatcgcttcaattcttcaacaatcgctaccgctgggcaagccgccggggcagcccgactcgccgggcagcggcgaccagcgtttttttcgcattcagatcgtcagcgagcagcactaccacagcctgattattctcatcccggaggagcgtgcgccagaatcactggttgaactctggcgcgacggtgaaagctgcgtcagcgataaaaattaa

SEQ ID NO: 174606 - DNA, 1029 bp, Klebsiella oxytoca
atgcctgttgcttatcctcgttatgtgattccgccctatattttacgccgcattgtcgaccatggctcgcttcagcagcagcgctgcgcgcagaataccctcagccatgttcagtccctgatggcgcatgttcccggacgccccgctgctccccatgtcaccacgccgggccagcttgagcgcgacatttacgatgccgggcaaacccaggaactaccgggaacgcaggtccgttttgaggggcagccctccaacggtgatgtggccgttgatgaagcctatgactatctcggcatcacccatgagtttttctggaagagctaccagcgcgattctctggataaccgcgggctaaagctcaccggcagcgtccactatggccacgaatatcaaaatgcgttctggaacggccagcaaatggtatttggcgacggtgatggcgagatttttaatcgctttactatcgccattgacgtcgtcgcgcacgagctaagccatggcgtgacggagagcgaagccggtcttatctacttcgaacaatctggcgcgcttaacgaatcactctcggacgtctttggctcgctggtcaaacaatatcagcgccagcaaacggcggacaaggcggactggctaataggtgagggactgctcgcgaaaggcattcacggcaaaggtctgcgctctatgtctcagcccggctccgcttacgatgaccccatccttggcaaagatccgcagcccgctcacatgaaagattttgtgcatacccagcaggataacggcggcgtacatatcaattccggcattcctaatcacgccttttatctcgccgcccgcgcgatcggcggttttgcgtggcaaaaagcgggccacgcctggtatgacgcggtgtgtgataactctctggcaaaagacgctgatttttcaacctttgccaggctcacggttcgccatggcgaaaaacgttttggcaaagagatcgctgatgccattactcaagcctgggggcgcgtcggagtggtgctatga

SEQ ID NO: 174607 - DNA, 1374 bp, Klebsiella oxytoca
atgttgccatctcaatccccctcaatttacacggttagccgcctcaatcagtcggtccggctgctgctggaacgtgaaatgggccaggtatggatcagcggcgagatttccaatttcagccagccctcttccggtcactggtactttaccttaaaagacgataacgcccaggtgcgctgcgcaatgtttcgcaacagcaaccgccgggtgaccttccgtccgcagcacgggcagcaggtactggttcgcgccaacatcaccctttacgagccgcgcggcgattatcagattatcgtggagagcatgcagcctgcgggcgaaggactgcttcagcagaagtatgaacagctgaaggccgccctggcggcggaaggcttgttcgatcagcagcataaaaaagcgcttccctcccctgcgcactgcgtaggcgtcattacctctaaaaccggcgccgcgctgcatgatattttacaggtgctcaagcgtcgcgacccttccctgccggtgattatttatccgaccgccgttcagggcgaagacgcaccggggcagattgttcgcgcgattgaactggccaacgcgcgccgcgaatgcgacgtacttatcgtcggacgcggcggcggttcgctggaagatttatggagttttaacgacgagcgggtggcgcgggcgatatttagcagtccgattcccatcgtcagcgccgtgggccatgaaactgacgtcactattgccgatttcgtcgccgacctgcgcgcgccaacgccttccgcggcggcagaaatggtcagccgtaaccagctggagctgctgcgccagctccagtcaggacagcagcgtcttgagatggcgatggactacttccttgccaaccgccatcgtcgctttacccagatatttcaccgcctgcagcagcagcatcctcagttgcgccttgctcgccagcaaacggagctggaaaggttgcgtcagcgcatgcgtttcgctcttgagacgcagatgaagcgcgccgatcagcgccagcagcgcgctacgcagcgtctgaatcagcaaaatccgcagccgcgtattcaccgtgcccagagccgtattcaacagctggaatatcgcctggcggaaaatatccgcagccgcctcggcgagcagcgcgagcgcttcggcaatatggtcacgcatctggaagccgtcagcccgctggcgacgctcgcccgcggctatagcgtgacttccgccagcgacggcaaagtgctgaagcagaccaaacaggtacgcgagggagaccttctcactacccgcctgaacgatggctgggtggagagcgaagtgaaaaacatcacgccggcgaagaaaacgcgctcccgtaaaaaagcctga

SEQ ID NO: 174608 - DNA, 1467 bp, Klebsiella oxytoca
atgctacgtatcgctaaagaagctctgacgtttgacgacgtcctcctcgttcccgctcattcaaccgttctgccaaacaccgccgatctcagcacccagctgacgaaaaccattcgcctgaatattcctatgctctccgcagcaatggataccgtgacggaagcgcgtctggcgattgccctggcacaggaaggcggcatcggttttattcataaaaacatgtctatcgagcgtcaggcggaagaagttaagcgcgtgaagaagcatgagtccggcgtggttaccgacccgcagaccgttctgccgactacgactctgcgcgaagttaaagagctgactgaacgtaacggttttgctggctatccggttgtgaccgaagacaatgagctggtcggcatcattaccggccgcgatgtgcgtttcgtcaccgacctgaaccagccggttagcgtatatatgacgccgaaagagcgtctggttaccgttcgcgaaggtgaaagccgcgaagtggtctttgccaaaatgcatgaaaaacgcgttgagaaagccctggttgtggatgacagcttccatcttctcggcatgatcaccgttaaagatttccagaaagcggaacgtaaaccgaacgcctgtaaagatgagcagggtcgcctgcgcgttggcgcagcggttggcgcgggcgcgggtaacgaagagcgcgttgatgcgctggttgccgcgggcgtcgatattctgctgatcgactcttctcacggtcactctgagggcgtattgcagcgtattcgcgatacccgcgcaaaatatcctgacctgcaaatcatcggcggcaacgtggcgaccggcgcgggcgcacgtgcgctggcggaagcaggctgcagcgcggtgaaagtgggtatcggccctggctccatctgtacgacgcgtatcgtgaccggcgtgggtgttccacagatcaccgccgtttctgacgcggttgaagcgctggaaggcaccggtataccggttatcgccgacggcggtattcgtttctccggcgatatcgccaaagccatcgccgctggtgcttcagccgtcatggttggctcgatgctggcgggtaccgaagagtccccgggcgaaatcgaactctaccaggggcgttcttacaaatcttaccgcggtatgggttcccttggcgcgatgtctaaaggctcctccgatcgctacttccagaccgataacgccgccgacaaactggtaccggaaggtatcgaaggtcgcgtcgcctataaaggccgtctgaaagagattattcaccagcagatgggcggactgcgctcctgtatgggcctgaccggttgtggtaccatcgacaccctgcggaccaaagcggaattcgtgcgcatcagcggcgcgggtatccaggagagtcacgttcacgacgtgaccattaccaaggaatccccgaactaccgcatgggctcctga

SEQ ID NO: 174609 - DNA, 1578 bp, Klebsiella oxytoca
atgacggataacattcataaacatcgtattcttatcctggacttcggttctcagtacacccagctggttgcgcgtcgcgttcgtgaattgggtgtctactgcgaactgtgggcatgggacgtgacggaagctcaaattcgtgagttcaatcctaacggcatcattctttccggcggcccggaaagcactaccgaagataacagcccgcgcgcgccgcagtatgtcttcgaagctggcgtgccggtctttggcatctgctacggtatgcagaccatggcgatgcagctgggcggccacgttgaagcctctaatgagcgtgaatttggctacgcgcaggttgaagttcagaccgatagcgcgctgatccacggcattgaagatgcgctgagcgcggacggcaacgctatgctggacgtctggatgagccacggcgacaaagtcaccgccatcccatctgacttcgttaccgttgccagcaccgaaacctgcccgttcgccattatggccaatgaagagaagcgcttctacggcgtgcagttccacccggaagtgacccacacccgtcagggcctgcgtatgctggagcgttttgtacgcgagatttgccagtgtgaagcgctgtggaccccggccaaaattatcgacgacgccatcgaacgtattcgtcagcaagtgggcgacgataaagtcattctcggcctctccggcggcgtggactcgtctgttaccgcaatgctgctgcatcgcgctatcggcaaaaacctgacctgcgtcttcgtggataacggtctgctgcgtcttaatgaagctcagcaggttatggatatgttcggcgatcgtttcggtctgaacatcgttcacgtcgaaggcgaggcgcgtttcctggctgcgctggcgggcgaaaacgatccggaagcgaagcgtaaaatcatcggccgcgtgtttgttgaagtgtttgacgaagaagcgctgaagctggaagacgtgaaatggctggcgcaggggactatctaccctgacgtgatcgagtctgcggcttccgcaaccggcaaagcgcacgttatcaaatctcaccacaacgtgggcggcctgccgaaagagatgaagatgggcctcgttgaaccgctgcgcgagctgttcaaagatgaagtgcgtaagattggcctcgagctgggcctgccgtacgacatgctgtatcgtcacccgttcccgggcccgggtctcggcgtgcgcgtgctgggcgaagtgaagaaagagtactgtgacctgctgcgtcgcgcggatgccatcttcattgaagagctgcacaaagctgacctgtacaacaaagtgagccaggcgttcaccgtattcctgccggtgcgttccgtcggcgtaatgggcgatggccgtaagtacgactgggtggtctccctgcgcgcagttgaaaccatcgactttatgaccgctcactgggcgcacctgccgtacgatttcctcggccgcgtgtccaaccgcatcatcaatgaagttaacggtatctcccgcgtggtgtatgacatcagcggtaagccgccggctaccattgagtgggaataa

SEQ ID NO: 174610 - DNA, 705 bp, Klebsiella oxytoca
atgcctcgaaaaataatttacagtcatatcatgataatcatcttcgctttttgcgggataagttctgctttagccgatattgtcatcaccggaacccgcttcgtctatccggaaaaagagcgtgaagtaacggtaaaaattgataatgttggagataagccggctctcgcacaggtctggattgacgccggggaccctaatgccacgccggagacggccaaagcgccctttacgattactcctcctattaaccgcatcaacggcggtaaaggccagacgctgcgcatgatatatacgggagaaaagctgcccggtgataaagaatccttattctggctaaacgtgctggaaattccggcgacgaaaaaagacaataaaaaccagctaaaaatggcggttcgttcaagaattaaaattttttaccgcccgcagggattagccggcagcgccaatcaggcaggaaagtcaatcatctggaaaaaggtcaatggtggaattgaaggttcaaatcctaccccgtactttgtctccctggcgaatatcaccgaggataaagaagggaaaacagtggttgccaacggagggatgattgcaccgggaggaaagagcgttttccccatgaagaagcacctcgcgacgatttatccatcttatattagtgatgagggagcgattaattcctttgcgcagcagatcatcccctaa

SEQ ID NO: 174611 - DNA, 1173 bp, Klebsiella oxytoca
atgaaagtgttattaactgtcgttcgtttttttaaaacacaattccggccggtaaaatacctgagcctcggtctggcctgcatattcacatctcaggcccaggctcttcattgtgaattcacaaagttatataccgataacatttcaatccccgttgttggtctcggaatatccaccgccggtgaagacgttccggtaggtaaaattttatatcgccaggactatcgaagtgccagcagaactacatcattcgcatgtaccgttgagcttgaagatattgcatccgcgccatacacaatgaacacatatacaaaaactgaggttatatccacgccgtcggggccggcagtgaagtcaggtggtaaagatatattcccaaccaacgtttccggtattggggctattttttatctttccgggatagaggtagattatacttccttccctcacctttgggagagaagtcaaagtataagctatggcactcttacccaaggtctgggccaattttggaaagtaaccgtagaacttatcaagaccggtcctattgcaggaggtactcagcaggttgatggttcatcctttccaacatttcagattacctctggttcaaactcccctttcattgtaaacaatgtttttgtcaatttgaatttcgtgggttcaacaatgatccacaccaaaacctgtcagctggcaacgtccaatattgatgtgaatcttgacaaccatgcggttggtgattttaccagcccgggaacggttaccgagtggaaggattttgatatcgtactgcagggatgcccaccattctatggttatggcaattacacctatactgaaaacacggacaaacttaccggttccaatgccgaaaacgttgtctctattacctttaaaagcgctaacggcgtcattgaaggcaacccttcactggccaaactggattctggagccaatgcagccaccggggtcggcattgaattatcacaaagaaatatatccggcagcataccgctggatggttccggcggctttaacctgaccaatcttacacaacaagataacgccacctataccatcccgctaaaagctcgctatgttcagtctgataccaacgtcacggcagggccagctaatggttccgtcatttttactattacctatttgtga

SEQ ID NO: 174612 - DNA, 699 bp, Klebsiella oxytoca
atgattatcaatcaccttacacagaccaccgaagtcaacgttctgacccagaatgtatacctgaaaaaggccctcgagtcgttaatagtggaatgtacggcgggcgataagaaggtgcgctcagggtatcaccctgcttttattaacaagcctgaacatttcagagtggcacttatcgataccgaatacatttatcacctaagaggtgcctggtataaaatttacaaagaaattatcagggcagattattacgttttcatttccttaaccgatatgaagtttggccgggtccccttcctgccgctgtgcggctcggtcagtaaaataaagaaagcgctgctgcatattatcaacagcgtcgggcagaaaaagcactccttaacaaggagtaacccgctgtcctctctgagcttttccgaaaaggagctgttcttttttttaatttcgggatacggcatggatgaaatttttctcgcactgggtaaaagcaaaaaaacggtatatcagtcgagaaccaatttaatgaagaagatgagattaacgaataaaaaagatttgcatatgatgctgaagttttgtgaattcgttgagtattacactttcagggaaagcactcaagccaccggcgataacgcctctctggttaacaatggacgtttaccgtttctcccgaatccggttgaacatgatatgcactga

SEQ ID NO: 174613 - DNA, 2535 bp, Klebsiella oxytoca
atgcgtcttcagtttggatattcattgattgccatcgctgtcatggctgcaattatgaccccgcggcaggtcgttgcaacatcgctttcatcgtctcccgcgaatgaagacaatcttacttttgaccccattttcctgaatacctcgggtgaagaaaaaatcgatttatcgcgctttgaaaatggcggctccgccacgcccggaacatggtcaacggatattttcgttaacggtgaatcagtcactcagagcccggttttatttgccgagcaggcggataaaaaagtgcgcccgtgtatcactgccggcctgattaaaaatctcaatctgaatttcgataaggtcccggcctcttttaccaccgctctgcgggagaaccgtgcgtgctataaccttgaagaattattacccggggtcagcatcatctatgactcctccacgcagcggctggatgtcgaaatcccacaggccctgttgcgtaacacggctcgcggttatgtcagcccggcattatgggataccggtattcctgcggccctactgggctataacgccagcacttacaccacccgctcacacggaagggattacacatcctcctatattggcctcaacggcggactgaatattggtggctggtatttccgccatgatggtaactacagctggcagcaaagcaacggcggccagtatcagtccatcaataattacgtacaaaaagatatctcatccatcctcggccgggtgctgcttggcgaaacctccaccggggggcagctctttgataccctccctttccggggcgttgagctggtcagcgacgacaggatgctgccgcagtcccgccgcggctatgcgcctgatatccgcggtatcgcgcgtaccaacgccagggtaaccgtacggcagaacgatcgcatcatttatgaaaccacggtaccgcccggagctttcgtgattgaggatttgtatcccaccggttacggcggcaatcttgacgtgaaggtcacggaagccgacggcagcgtgcagagcttccaggtgccttacgcgtcggtgacccagcttctgcgcccgggcgcgcaccgctatgatgtggtggcaggacgactgaacgatcccagcctttcctttaacccaacgctgtatcaggcgacctatcagcgcggcctgtcgaatatcctgaccggatacaccgggatccagggcagcggcgccgcctactatgcggtgcagctaggtatggctattagcacggctatcggcgctttttctgtcgatgtcacccaggcgcgcgtacacctgaaaactacagacgagactgcgaatagcggccagagctaccaggtaagctacagcaagtatttaccggatacggacagtaacctgactatcgcagcgtaccgattctccacgtccggatattacgacttccagaccgcaatgcgcgccattgatgaagaaaaacgcggcggtctggcctccggaatatggcgtcccaaaaatcgcctgaatattacgatgaaccaggggcttggcccgggatggggacagctgtatgtcaccgggtacacccaggattactggaacaacggtaagtctgacattcagtatcaaatgggctacagcaataacttcggccgggttaactataacctcagcgcaggacgcgtcagaaactacagcggaaaaatggaaaacaactttctgctgaacatttccaccccgctgggtggatacgataagaagcatgtgccgatgctcaccgccagtctgaacaaaagcggcaacggtcgcatgggtgaacagctgggcctttccggcacctacggggaggataaccagtataactacgggatgacggcggcgaactataaccagggcaccggcagcagcatgaccgcgagcggcggatggcgcacgccttacagccatctgacggccagctatggcgccggcaagcattaccagaacaccagtctggccgccagcgggacggtgattgcctggcagaacggcgtggtggccacgccttatacgggagacacctttgccgtggtcgaggcgaaggatgcgaaaggcgccaaagtcggcggctatccggggctgaaaattgaccgctttggacacgcggctattccgtacctgacaccgtatgaaatgaacgaggtcagtattgacccgaaagggctgtcacaggaagttgagctgagcaataccaccgagaaggtcgcacctcactggggcgcagtcagcaaggttgttttcaatacccgcaaagggatcccgctgcttatcagtgcaaaaaatttgcaaggcgagcccttacctttcggcgcggaagtatttgatgcatccggagccaacgtcggcaacgttgggcagatgggacaaatatatgcgctgaccgaagccgccgccggccagctgaccgtgaagtggggcagcaaggataatgaacagtgccggataacctatcgggtcaacgatgagaaaccatcagggttcagaaagttgaccgaaacgtgcaaataa

SEQ ID NO: 174614 - DNA, 732 bp, Klebsiella oxytoca
atgagaccttcatctctcatccgaacactctcaacggtagcctgcctcgctgcggcggtaacgtcatggtcatccctggccagcgttatcgttaacgggacgcgcgtgatctacaacggaaatgaaaaggaagtgtctgtcagactgacgaataccggcacgcttccggttctggtacaaagctggattgatgagggtgatatgaatgccaggccggatcgcatccgtacgccctttactctgacgccgccgatcaaccgtattaatgccgataaaagtcagactctcagaatcagctataccggctcaccggccctgccgcaaaacaaggagtccgtttactggctgaatcttcttgaggtgccggcatccaaaaaagacgacagtttaaataaactgcaggtggcttttcgtacccgaataaaactgttttatcgcccggcgggcctcactgacagagcaaaagtcaccgaagcggctgaaaaaattaagtggaccgtatccgggggaaaactgattgcctctaattcctcaccctattttatttcgctggtgtccgtttcgctgaaaaacgccggcaaaaatggctcggttgaaggcgaaatggttcctccaatgggcagctatacctttaatttgccgaaatccgtaaacgccggtgcaggttcattactgatttatgaatatgtgaatgactggggcgcactcagaaaagtcgaatacaccttataa

SEQ ID NO: 174615 - DNA, 561 bp, Klebsiella oxytoca
atgaaaaagtcagttgttagtacctcaatctttgctgttttcgctctcgcagcattttccgcccaggctgcttccacggggaccattacttttaacggtgaactgaccgacacaacctgcgaagtggatatcaatggccagggctccgacgcaaccgtcatcctgccgaccgtcggcgtaaaccagctgactgccagcggcgacaccaccggacggacctctttcaatatgaatatctctgactgcgtcatcggtaccgaaggcggccactccaaagtagccgctttcttccagccgggtaacaccgttgacctcagcaccggtcgtttgaaaaacgttggcggtagcgccactaacgttgatctgcgtctgctcgacgcctccaacagctatgcgccgattaacatcggtaacaccgatcaggttgatggcatggcttatgtcgatatcaataccgacggtaccgctctgctgccatacgctgtcgaatatttcgcgaatgcccagaccacgccaggtaccgtcaccagcagcgtcatttataacctgcagtacaagtaa

SEQ ID NO: 174616 - DNA, 444 bp, Klebsiella oxytoca
atgacgcaaaacccaagaaaattagatcatcacctttatggatattgcattggggataatctagagttcaggatatcacctgccttattagtaaatacattgacaggcatcagcattcgtctgcggccaacaatggcgcgactgctttcttatatcttaaatcattcaaacgaaagaatgattgaagatgaaaaaataatgcgggatgtttttgagaattatggcctcaagtgtaacaagcagcggctgtggcaggccattaactcgctaaaaaaaactttggcaaagtgtggtttcagccgctttattatctacagagtaaataacaatggttttttaatttccaatgtgagaattggaatgttgttatgttacgccctcaacaactctcactttgagatgtttgagactgctaagccagaaaaacatgaccagaacatatag

SEQ ID NO: 174617 - DNA, 786 bp, Klebsiella oxytoca
atgcagaatatttatgtactaaatgattcagttatattttggccagaacagaatcttttgtcgtgcgtgtctgatagtagtaaaaaagtgcaattgacaggcccctcagctcgctgcctggagttattgatttccagaaaagatctggtgctacaaaatgatttctatgagtatgcctggcaaggaagtggatttatcccgtctcctaatactttgtatcagagcatatctgtcattcgtcgggcattcagagagatatgtgaaaatgagactgattatattctaaccgaaaccaggaaaggttttcgactaaacccaacggtaaccgtgttggctaaaatgcaggattataacgaggatgacagtgaaaaaaatgagaatgggacagacgcaccagaacaaactgtcgaacccgtgatttatcaaaacagaaagctaactcactttacaacaatggcttttatactaatcatcatgatgatgtcaggcacattaacttttgaaatatatggtacacaaaccagaggctacaaattctttgaaaactacagtggcccagtttttatgcccgggagtacgtgtaagttttttctatccccgaaaaatggcaaagaccgattgtctattttgaacctgtcatttttgaaatgtcagcatcaatatttcgtttatgtaactatacttccctattcgcctgatatctcagttatttcgtgcgatagagctattgatttgagaccaaaaaaatgtgaagtcatggatttgagagatgaaaatgtattttaa

SEQ ID NO: 174618 - DNA, 480 bp, Klebsiella oxytoca
atgaaaatgtattttaaaaatagcagaattataatcttagttactgttttgatatcaattattattccggtgatggtgtttttttatgtcaactacaaaagcactcattttcgatgtgatgctacatattcggcgaggaaatctggtaagcttctggtttctaaaagcagccttgtcattaatggcaggcacggtactataatgatggatgggcgtattactgatggcaatgcaaatgtgtatttttttaaactgagaaattatcttgaaattgaaagaaataacttttcctataactttacctcacaaaaagtgtcaattttaccggaaagcttaaatcattcgaaagtgctgagtgattttcttgctgatgtattaattaaagaaggtgtaagtacctttttttacctttatcctttaaacgataattatgttattacaagtggtaatatgccgatatttttttgtataaagcactga

SEQ ID NO: 174619 - DNA, 1431 bp, Klebsiella oxytoca
atgacaaaattaaacaaactaacaattgcttcattattagtgttcattgccctaaataaaacagcatcagctgaacaaagcgagtttcttaacgccataaaaaatataaacttacagagtattggtgcaaatgaaacagtagaaccatcggataacagatcgcagaatattaatagtgaagccagcatcaatgataagttagaacaaaaaaataaaaaactccagatgaagtatgaaaaactattgggatcgtacaatgaaataaaattgaacggtggctctggtaatgcggaatcccaaaaagcaactatctccgttctcactaatgaaaaggataaacttaacgctgagaataccgcgctacgtaagcagctagctgatgccacttcaactctttccgccatgcgcaagcaagaagagctgtccttcgccagtcagaaaaaagaactgagctctctgggccaggaaaacgcccgcctgctcagcgaatctgaggctacacgtaaacagcttgccgaggccgcttcgcagctggcagcgttgcgtaagcaaaacgaactctccgccgccagtcagaaaaaagaactgagctctctgggccaggaaaatgcccgcctgctcagcgaatctgaggctacacgtaaacagcttgccgaggccgcttcgcagctggcagcgttgcgtaagcaaaacgaactctccgccgccagtcagaaaaaagaactgagctctctgggccaggaaaacgcccgcctgctcagcgaatctgaggctacacataaacagcttgccgaggctgctaataagctggccagcctggaaaaaagttcgcagcagtcagctattttaaaaaccaatttattaaaaacccccgaaggcaaaaactcatattccttgggtgttttttattatgataaaattaacgctgaatttgaaaaaatcactaaaaacaacattaaactcgcgccttcattgatgattgacggtatgaatgatgctttcaataaatcactcaaaataaataaatcagagataatggaaaatgtggtcaaaattgatcgaatcgtgcaaagcattaatagcgactatgctaaaaagatccttaaattaattaacaagaagaaatatgaagtacttgcaaatggttcatttttagttaccgataaatcgacatcgaaaaaatacagtgcgaatgagatagtaacattcgatatgctggagaaaaacctgaacggcaagcctatacttaacaccatgaatactaatgttaattttaatcaaatccgtgatccgttgcttagaaaagtcgtttcagagggtggtaaaggtggtgcaatgacgctgtatggcaaggcagatatcttatataaaaacgtacctgatggcgtgtcaccggaaagtctggtatcgataacctttatgttaaagtag

SEQ ID NO: 174620 - DNA, 1185 bp, Klebsiella oxytoca
atgaatacacctgcgaactcgcactccgcgccgggctttatcacgctggccgccgggtgcaatcagctgattaactggggaatctcgttttatatgcccggcacttttgccagggctatcgctcaggagaccggctggaccgccacggaaatctatttcggactgaccctcgccatgctcatgatggcgacgctttctccgtttatcgcccggcttcttgcccgctttggcggccagcgaatagtgattaccggtacgctggcgatttcagcggggtgtctgctgatggcttacgtccatagcctgacgggctggttcgccgcctggcttcttaccggcatcggtatgcggctggcgctgtacgacgcgctgttcgcggcgctggtgaatctttacgggcagcgtgccaggttgaccatatcgcgcgtgacgctggccggaggattagcctcggccctgttctggccgcttggcgcctggctgctgacgcggatggactggcggcacgcgctgctggtctacgccctgtttggcctgcttagcgctcttctgttgtggaaaatgccgaataccaaattaccgttgccggtaagggtgaaaaaaaaccagcagcagtcaaagcatgatagacgtccggccctgctgtacgcgtcgttgattgcgctggttacctttgtatccaacggcacgtcaacgcatcttcccgagttcatcgccagcgttgggctccctgtcgcggtgggaatgctatggggaattggacaaaccggcgcgcgctttctcgaagtggcatccggctacgcgctcacaccgctgcggctaacgatattgacgacctcgctgatgccgctctgctttgcgcttggactgagcggcgcttttctgtcgtgggcagccggcggatttgtactgggttacggcgcgatcaacggcctgaccaccgtgtttaaggccactttaccgctgcagctctttgccgccgaggattatgcccggctaaccggcattctgttgattcccgcgcaactgctggccgccatatcgccgtttgcctacgcatggattaatcattatcttgggatgtcaggctgcttagcggtctctgccgctctgtccctggtggtagcagggttagcaataatgattgctatcaatcaatacagactaacagcgaccattcggtaa

SEQ ID NO: 174621 - DNA, 897 bp, Klebsiella oxytoca
atgatgacgctcaatctgggaaatctggcgacgttccgcctggtcgtacagcgcgggagcttctccgctgcggcagacgtactgggattgtcgcagcctgcggtcagcctgcaggtacgtcagctggaacagtttctacaaaccaggctgcttgagcgcaccgggcggggaattaaagcgacggcggccggtatcgccctgctggcccacagcgatcggattgaacaggcggtgggcgcggcggtgcaatcggtgagtgaattcaatcgtgaaatcagcggctcggtaacgctgggatccggagcaaccgcctgtattcatctgctacctccgttactgcagaagctacatcatgagcatcctttattgacggtgagggtcacggttggcaatacgcttgaggtggttcgggctattgaagagaatcggctcgaccttgggctttgtacgctaccggcgaatggacgcagtctggcggttatgccggtgttagaggaggagtttgtgtgtattttcagcgatgggcaggatgagttaccgtggtcgctgacgccagagattctgcaatcattaccgctaatcgcttttgaatcgggaagcggaacccgggatctgatcgatggctggtttcttgccgatgggcgggcgatagcgccagtcatgcagttaggcagcattgaggcgattaagcgcatggtacgtgcggggttggggttcagcattgtgccgagaatggcggtagagcatccgcaggatcgtattggcttaaatgttcaatcactgactccgctgctgcatcgtcagttaggcataatcatgcggcaggataaaattatcagcaaaggtattgctgagatcctgcgtttactgcagaagttggagaatggtcaggcgtag

SEQ ID NO: 174622 - DNA, 903 bp, Klebsiella oxytoca
atgagcaatattgattttcgtcgtattaagcagctgtggatgtttctcgcagtagcggaagaggaacactttggccgcgcggcgctgcgcctcgggatgtcgcaaccgccgctaacggaacaaatcaagctcctggagcacgggctgaaactccagctgttcgagcgttcgcggcgcgggacccgcctgagtccggccggagccgcactcctgcccgcggtacgccagttcgccgaccagctcagccagttgggcagaaccgtcgatgaaatcgccgcaggccactcggcggtattgaatatcggggcgataacctcggccatgctggagaccttacccccactgcttgaggagcttaagcgcgctacgcccgggctaacaatatttatccgggaaatcgatagtgtcgatgcgatccccgcactggagaacggtgaactggatctggcttttgtgcgcctggaaggtgagaccgaaggccacatcacgactttgccgctggaagagtcacgcctggctgtcgcgctaccggtcgatcatccgctggccttacagcatcgcgtcagcctgcgcgcgctggcaaaggagccgatggtaatgtctgctcgccaggtcagcccggcctggtttgatctcctcacctcgctgtgtcgcacccacggttttactccccgcattctgcatgaggtccgctcggtaagttcacaaattgcgttcgtcagctgcggccagggcatcgcgctggttcccgcctccacccgcaaactggcgccggctaatgtggtgataaaggccctggaagagaagcagatggttgttaccgcggcggcggcgtggaacagcgagcgtcaccacccgctggttgattcagccattgctttattgaaaacacgctacgcctga

SEQ ID NO: 174623 - DNA, 813 bp, Klebsiella oxytoca
atgaaaatacagccggagttgacatggcagcgcttgccaatgacggtgcagggcatcgggcttgatatcgcgtccattagccgtgaaggaacgggggagccggtcgtctttcttcacggttttggctccagcaaagaggattacgctgatttcgtgcgccatcgagcctttgaggggcagccgtttattgcctgggatgcaccgggttgtggtgagagccaatgcgctgattacagcaagatggggttaccctttctgcttgagacggcgctgaaggtgatttcccacgcggggtttacgcgctttcacctggtcgggcattcaatgggaggattaacatcgcttctgctggcgcacgctttccccgagcgagtgctaagttttgtgaatattgagggcaatatcgcgccggaagactgctttttgagccggcaaattgtgcaatatgctgagccggacgcggaacgtttcttcgcgcgctttattgaacgcactcgccaatcgccagcctgggccagcgcgctctatgccagcagcctgccgcaaaaggttcgcgctgaggcggtgccggggattttctcttcgatggtggattattctgaccacggtgagctaatggcgaaattccttaatttaccgtgtccaaaaatgtttatgtacggcgaccagaatgccgggctaagctatttatcttctattgcccgccgtggtgtaaagttggcggaaattccgcattgcgggcatttccctatgtattcaaactcgccggagatgtggcgacagatagctttattgcagcaggcctcacgatga

SEQ ID NO: 174624 - DNA, 897 bp, Klebsiella oxytoca
atgaataaagcgtcatcttcacagctgatcggcgtgctattttccgtctgcgcggcttttggtttctcgtttaaggcaatattcgtcaagcttgcctacgagcaggcaacggtagatgccattactttactcatgctgcggatgaccctgtcgttacctttcgttatcctggttgctctacgggtgctgcgtagcggtgtaccactgcagcgtcgtgattatctgctgctactgctgctgggaatagtggggtattacggttcggcgatcctggattttatgggcctgcgctatattaccgccgggcttgagcggctgatcttatttacctacccggcgctcactattctgattggcgtcctgtttttgggtaagcgtttcgaaaaaaaggtactcctggccttagcgctctcctggtcgggaattttgctggcgtttgtccacgatctgcagattagcggtgatatgcacagcctggtgctcggtggtggtctgatcgccgctgcggccttactgtatgccatttataatgccgggtcagaggtggcaatccggcgtatggggtcgatgaagttctcggttcttgccctgctggtttcatctcttgccacgcaaacccatttttatcttgctcaaccgttatccgcgcttaacctgccgtggcaggtatatctatggtgtggcgcgatggcgctcttctcaaccgtattaccgatcttctggcagtcggcggccgtgcagcgcattggtgcggaacgcgccgtgctgatcggccttctgggaccaatgctaacagtattctttagctggtggttactgggagaacccatttcgctggcacaaatagcgggcacattgttagtgatggctggtgtgctggttgtgcttcggcattag

SEQ ID NO: 174625 - DNA, 192 bp, Klebsiella oxytoca
atgcgtaaacgacatcgatttaaccgtcgcatgacccgtatcgtactgcttatcagctttatcttcttctttggacgctttgtctactcctctatcggtgcctggtaccatcatcaggacaaaaagcaatcacagcaatccactatcaccgttgagccttcggattcagcaaaagcgcctgagcaaaaataa

SEQ ID NO: 174626 - DNA, 2220 bp, Klebsiella oxytoca
atgaacttaattaaactttacaggcaatatcgggataaatggtgggcgctaccgcttatcttacctgtatgtttgcttcccgtgtcacgatgggctaataccgttgcgttgctggatggtaatgaagtctctctttactatttacccctggcgctagtactgagcctgatgctgtttttcggctgggccgcattaccggggatcgttctcgggttgttgctttccattacgcgcggcatgtcgctggaagatactatcggcgtcattttccattttcttattccgaccgttttatgctggggcggttatcgcgtttttgtcccgcgaaggcagcaaatctcgcatggcaacgtaagtctgatgcctcagcgattgttctggcagatgctgttgccgtccctgatctttcttatcctgtcgcagctggccgagtatctgggcattcatccacgcgctaccgggttgataggggtcaatcccttaagtttgcgttcgcttatcaccttccaggccctgatggcgggatgtttaaccggcgtgccgttgtgctacttcgttattcgaactatccgcaatccgctttatatccgcgggtttatatcgcaaattcgcttacagatcgacccaaaaataaagcgctttgaatttgttatatgggtagcggtgctgataattctattattccttctattgatgccgctgaatagtacgagcaccatattcagtacaaattatacgttatccttgctgatgccggtgatgttatggggggcgatgcgctttggctatcgctttatttcattagtctggtcacttgttttaattattattattcactttcactatcaatatctcccgcactccccgatttataacaatcagctggcgatcacctcctccagctatctggtattttcatttattatcgcctatatggcaatgctggcgacgcagcagcgagttttttactcgcgcatgcgtcggatggccttcatcgatccggtcgtacgcttgcctaatatccgggcgctgagtcgggcgttaaataaatcctcatggtccgtgctgtgtttcctgcgcattcctgaactggaaatattgggccgccactacggtgttctgttgcgtattcagtacaagcagctgctggccgagtcgctcagcgagttactgcgccctggggaggatatctaccagatggcagggcatgagctggtggttcatctgaacagtgaaggccatcagcagcgcattccccagctctatgagcacctcaaaaaatttcgttttgtctggaatggtatgccgctgcagccgcccgtgggattcagctattgcaacgttcgctcgccggtgatgcatctgcatttgctgcttggcgaactcaacagcgcggccgacctttctctggcgaccggaagccctgaaaacttacagcgccgcggcgccatcaatctgcagcaagagctgaaagacaaagtcgcgataatgaatcagctggtgaaggcgcttgatcaggatcggttcctcctgatggcgcagccgattgtcggcatccgcggggatagctaccacgaagtcctgctcaggatgttgaacgacaatgatgaaatcgtcatgccggatatctttttaccggtagcacacgagtttggcttctcggcgcgtattgatagctgggtactcgaacatacgcttatgtttatggacaagcagcgcaagaagctgccgggaatgcgtctggcgataaatatctcacctttttcagtgagcaacagccattttcatcaacaggtgcaagcgctgctggagcattacgacattgagccctggcagattatttttgagctgactgaaaaccattcactgacaaatccggaacaggcgcgtaaaaccctggcgcagcttcaggagctgggatgccgggtggcaattgatgattttggcaccggttatgccagctacgcgcggctgaaaacgatgaatgcggatttgctgaaaattgacggcagttttattcgtaatctggtctccagcagtctggactatcaggccgttgcttccatttgcctgctggcccggatgagaaacatgcaggtagtggccgaatatgtcgaaacgccggagattcgccaggcggtgatttcgctggggattgactatatgcagggctacgagattggcagaccagcgccgcttgaggcgctggttatggcttga

SEQ ID NO: 174627 - DNA, 1542 bp, Klebsiella oxytoca
atgccaataaacgaaaatgcccctcggccgcaggagttcgctgcggtcgacctcggttcgaacagttttcatatggtgatcgcccgtgtcgttgacggagcaatgcagatcatcggtcgtctgaaacagcgcgtacatctggccgacggcctggatgaaaactctgtactgagcgaagaggctattgcgcgcgggctgaactgcctgtcgctattcgccgagcgcctgcagggttttgacccatccagcgtctgcatcgtcggcacgcacacgctgcgccaggcgacaaacgccgcagaattcctcaagcgcgcggagcaggtcatcccctacccgattgaaatcatccccggcaatgaagaagcgcgtctgatttttatgggcgttgagcatacgcagccggaacgaggccgtaagctggtcatcgatatcggcggcggctctaccgagctggttatcggcgaggatttcgaacctcgcctggtggaaagccgccgtatgggctgcgtgagcttctctcaggcctattttgctggcggcgtcatcaataaagagaatttccagcgcgcgcgactttcagccgtgcagaagctggaaacgctggcctggcagttccgcatccaggggtggaacgtggccctgggcgcgtccggcaccattaaagccgctcacgaagtgctggtggcgatgggcgagaaagacgggttcatcactcccgagcgcctcgagatgctggtcgaagagctgctgaagtataaaaacttcgactcgctgagcctgcccgggctgtctgaagatcgaaaagccgtttttgcgcccggtctggctatcctgtgcggggtttttgacgcgctggcgattaaagagctgcgcttgtccgacggcgcgctgcgcgagggcgtgctgtacgagatggaaggacgtttccgtcatcaggatatccgtagccgcaccgcgcaaagcctggcgaaccagtacaacatcgaccgtgagcaggcgcgacgcgtcctggagaccaccacgcatatttatgagcaatggcaggagcagaatcccaagcttgccaatccgcatttggcggcgctgctgaaatgggcaaccatgctccatgaagttggcttaaacattaaccacagcggcatgcaccgtcattcggcttatattctgcaacatagcgatctgccgggctttaatcaggaacagcaaatgctgatggccaccctggttcgctatcaccgtaaagcgattaagctggatgatttgccgcgttttacgctgtttaagaaaaagcagtttctgccgttgattcagctgctgcgccttggcgtgctgttgaataaccagcgccaggcgacgaccacgccgccgaccctcacgctgaaaaccgaggccaaccactggacgctgaccttcccgcacgactggtttagccagaatgcgctggtactgctcgatctggaaaaagagcaggagtactgggaaggcgtacctgactggtggctaaaaatcagcgaggaagagaagcctgacgcggccagctag

SEQ ID NO: 174628 - DNA, 2061 bp, Klebsiella oxytoca
atgggccaggaaaagctatacatcgaaaaagaactcagctggttatccttcaacgagcgcgtacttcaggaagcggcggacaaaagcaatccgctgatcgagcgcatgcgttttttggggatttactccaacaacctcgatgaattttacaaggtgcgctttgccgaactgaagcgccgcatcatcattagcgaagaacaaggcagtaccgcacactctcgccatctgctgggaaaaatccaggctcgcgtgctcaaggccgatcaggagtttgacggtttatacaatgagctgctgctggagatggcgcgtaaccagattttcctgattaacgaacgccagctctccgtcaaccagcagtcctggctgcgcaactacttcaagctgtatcttcgtcagcacattacgccgatcctgattaaccgcgaaacggatctggtgcagtttctgaaggatgattacacctatctggccgtcgagattattcgcggggatagcatcaattacgcgcttctcgagattccatcagacaaggtgccgcgttttgtgaatctgccgccggaagcgccgcgccgtcgcaagccaatgattctgttagacaacattctgcgctattgtctggatgatatcttcaagggctttttcgattacgatgcgctgaatgcctactcgatgaaaatgacgcgtgatgccgaatacgatctggtgcatgagatggaatcgagcctgatggaactgatgtcctccagcctgaagcagcgtctgaccgccgagccggtgcgcttcgtctatcagcgcgatatgccggacgcgatggtcgaaatgctgcgcgacaagctctccatctctaactacgactctatgctgccgggcggtcgttaccacaattttaaagactttatcggcttccccaacgtcggcaaagccaatctggtgaataaaccgatgccgcgtctgcgccatctgtggttcgataaattccgtaacggctttgatgcaattcgcgaacgcgacgtgctgctttattatccgtaccacactttcgaacacgtgcttgagctgctgcgccaggcctctttcgacccgagcgtgctggccatcaaaatcaacatctaccgcgtagcgaaagattcacgaatcatcgactcgatgattcacgccgcccacaacggtaagaaagtgaccgtggtcgtggagctacaggcgcgtttcgatgaagaagccaatattcactgggctaaacgcctgaccgaagctggcgtgcacgtcattttctccgccccgggtctcaaaattcacgccaagctgttcctggtttcgcgtaaagagggtgatgaagtcgtgcgctatgcgcacataggtaccggcaacttcaacgaaaaaaccgcgcgtctgtacaccgactattcgctgctgaccgccgatgcgcgcatcaccaatgaagtccgccgggtatttaactttatcgaaaacccctatcgtccggtcagcttcgattacctgctggtatcgccgcaaaactcgcgccgactgctttatgagatgatcgatcgcgagatcgccaacgcgcaaaatagtcagccatcaggaatcaccctgaagctgaacaatctggtcgataaaggcctggtagaccgcctttacgccgcctccagctcaggcgttccggttaatttgcttattcgcggcatgtgctcgctgatccctggcctcgaaggaatcagcgaaaatatacgcgtcatcagcattgttgaccgtttccttgagcatgaccgcgtttattgctttgaaaacggcggcgataagcaggtttggctatcgtccgcggactggatgacgcgcaatattgactatcgtatcgaagtggccgcgccgctgctggatccgcgtctgaaacagcgcgtactcgatattttcgatctcctcttcaacgatacggtcaaagcacgctatcttgataaagaactgagtaatcgctacgtgccgcgcggcaatcgccgcaaagtgcgcgcacagatggcgatatacgactacctcaaatcacttgaacagcccgattaa

SEQ ID NO: 174629 - DNA, 642 bp, Klebsiella oxytoca
atgaaaaacatcgtggtgctgatttccggcaacggtagcaacctgcaggcgattatcgacgcctgcgcccggaaaaaaatcaacggcaccctgcgtgcagtcttcagcaacaaggccgacgcgttcggccttgagcgcgcgcgcgcggcgaatattccggctcacgccctcgccgccagccagtttgccaaccgggaagccttcgatcgcgagctgatgcacgagatcgacacctatgcgccggatctggtagtactggccggctatatgcgtattcttagtccggcttttgtcgcccactatcaggggcggatgctgaatatccacccttccctgctgccaaaatatccggggctgcatacccatcgccaggcgctggaaaatggcgatgaggagcacgggacgtcggtgcatttcgtgaccgatgagctggacggcggtccggtggtattgcaggcaaaggtgccggttttcgctgaagataccgaagacgacattaccgcccgcgtacaggcgcaggaacacgatatctatcccctggctattagctggtttgtcgacggccgcctgcgcgcggagggcaacgaagcctggcttgatgaagtgaagctaccgccgcaaggctacgctgccgaagagtaa

SEQ ID NO: 174630 - DNA, 1038 bp, Klebsiella oxytoca
gtgaccgataaaacctctctcagctataaagatgccggcgtggatattgatgcaggcaacgctctcgtcgaccgtattaagggcgtggtgaagaaaactcgccgcccggaagtgatgggtggactgggcggattcggcgcgctgtgcgcgctgccgcagaagtatcgcgagccggttctggtctccggcaccgacggcgtcggcaccaagctgcgtctggcgatggacctgaagcgccacgacactatcggtatcgacctggtcgccatgtgcgtaaacgacctcgtggttcagggcgccgagccgctattcttccttgattactacgcgaccggcaaactggatgttgatactgcggcgagcgtaatcagcggcattgccgaaggttgtctgcagtcaggctgcgcgctggtgggcggcgagacggcggaaatgccgggcatgtatcacggagaagattatgacgtggctggtttctgcgtcggcgtggtagaaaaatcagaaattatcgacggcagcaaagtagccgatggcgatgtgctggtggcgctggcctccagcggaccgcactctaacggctactctctggtacgcaaaattatcgaagtcagcggcgttgacccgcaaaccaccgatctcaacggcaaaccgctggctgaccacctgctggccccgacccgcatttatgtgaagtccgtgctcgacctgattgccaacgtagacgtgcacgctatcgcccacctgaccggcggcggcttctgggaaaatatcccgcgcgtcctgccggacaacacccaggcggtcattgatgaatcttcctggcagtggccggaagtgttcaactggctgcaaaccgcgggtaacgtcagcagccacgaaatgtatcgcacctttaactgcggcgtcggcatggtaatcgcgctgccggcagacgcggcggataaggcgattgccttcctgaacgacaaaggtgaaaacgcgtggaaaatagggtatatcaaagcctctgattccgaacagcgtgtggtcattgaatga

SEQ ID NO: 174631 - DNA, 894 bp, Klebsiella oxytoca
atgaaaattgccgcattcgatatcggtggcacggcgttaaaaatgggggtaatgacgcgcgaaggcgagctgctggataaaggaaagcagacccttatcgacagcgatggcgaccagatcctgcaggcgatgctggcgtggatcgccgctcacccggaatgtaaaggagtggcgatcagcgctcccggctacgttaatccgcacaccggctttatcgaaatgggcggcgccatccgtaagttcgataacttcgctatcaaggcctggcttgagcagcaggtgcgattgcccgtcgccattgaaaatgatgctaactgcgtgctgctggccgagcgctggcggggtaaagccgccgacatgagcaacttcctggtcctgaccatcggcaccggcatcggcggggcgattttctgtaataaccagttggtccacggcgcacgtttccgcgccggcgaatttggttatatgcaaaccgcgcgtccgggtacccgtgatgtgcggcgctattcgatgaatgaaaactgcacgctgcgcgtgctgcgccatcgctacgctgagcatctcggcaaagcgctggatgacgtcaccggcgaagagatttttgaccgctacgatgcgggcgacgcgacctgtcgacggctggtcgctgaattctttaatggcctgggtaccgggctttacaacctcgttaacttattcgatccgcaaacgattttgatcggcggtggaattgtggaacgaccgggatttctggcgctgctgcgcgagcatctggcctggtttggcattgcggagtatctcgacaccgtcagccacggcaacgatgccgggctggtaggtgcggtttaccatttcaatcagcaacaccggtcgcagagcggcgactgcgcatag

SEQ ID NO: 174632 - DNA, 1431 bp, Klebsiella oxytoca
atgtctggatttaaagaaggttttctgtggggcggtgcggtagcggcgcatcagctggaaggcggctggaaagagggcggtaaaggggtgagcgtcgccgacgtcatgaccgcaggcgcacacggcgtaccgcgcgaaatcactgatggcgtcctgccagggaaaaactatcccaaccacgaggcgattgaattctaccatcgttataaagacgacgttcagctgtttgccgaaatgggcttcaagtgtttccgcacctccattgcctggacgaggatcttcccgcagggcgatgagcaagaatctaacgaagccggcctgcagttttacgatgacctgttcgacgagtgcctgaagcacggcattgagccggtgattacgctctcccacttcgaaatgccgtaccatctggtgacggagtacggcggctggcgtaaccgtaagctgattgatttcttcgtccgctttgcccgggtggtgtttacccgctaccagcataaagtgaagtactggatgacctttaatgagatcaataaccaggccaatttccacgaagattttgccccgtttactaactccggactgaagtatctgccgggtgaagaccgtgagccggtgatgtatcaggcagcgcactatgagctggtcgccagcgcgctggcggttaaggccgcccgcgaaattaacccgtcgttgcaggtgggctgcatgatcgccatgtgtcctatttacccgctgagctgcgcgcccaacgatatgatgatggcgatgaacgccatgcatcgccgttactggtttaccgacgttcacgtgcgcggcaaatatccgcagcacctgctgaactacttcgagcgccgcggttttaaactggatatcaccgaagaagaccgcgcggcgctgactcagggctgcgtcgattatattggctttagctactatatgtcgtttgccacgaaagcaacggatgacaatccgctgctggattatgacgaaaccaccagcctggtttccaatccgtacgtacagaagtcagactggggctggcagattgatccggtcgggctgcgctactccctgaactggttctgggaccattaccagttgccgctgtttattgtggagaacggctttggcgccatcgacgtgcgcgaagcggacggttcggtagatgaccagtaccgtatcgactatctctccgcccatatcgccgagatgaaaaaagcggttgttgaggatggcgtcgacctgatgggctacaccccgtggggctgtatcgatctggtctccgcaggtaccggcgagatgaaaaaacgctacgggtttatctatgtagataaagacaatgaaggtaagggcaccctggcgcgtagccgcaagaaatcttttgcctggtatcaaaaggtgattgcatctaacggacgcgagctttaa

SEQ ID NO: 174633 - DNA, 669 bp, Klebsiella oxytoca
atggataacgactcatcaataccgaatatgaaactctccttcgaagatgtcctggtcggcggctataagatatgcctgatgatttttacgctgtggctgggttgggtaatttttgatgaagtcaaaatgcagcgggatgcagtaacaactttagcacaagtggccaaagcatccagcgccagcgcctatgaaagcgcgtttgaaggcgagtgttatttgcacggtcgttcggcgaattgccgggatagaaattctctggtcattaactaccaggcaggcggtaacaattaccaggcagaattgagcaatattctctctccccccggtgagcatccatcaatatgtattaattatgtaaaaaacagtcctgacattgtaaaacgctgcgagagtcgttggttcaaccagcataaagattatgtcattgcgccgcttattttctggtcgtttaaccttattggcgcatttttcatcgccttattctacgccggggaaaaaattaaacggcagtttgctgataataaaagcggaaacatggaactggtcgcgcctgagcacaatacagatatcgtccccagtcagcccgccgtggctaaaaataagaacaaaaaaagaagcggtcggcgcaaaccgaccgccaaaagcggatttaaagctcgcgtccgttag

SEQ ID NO: 174634 - DNA, 627 bp, Klebsiella oxytoca
atgaagatcgtggaagtgaaacacccactcgtcaaacacaagctgggcctgatgcgtgagcacgacatcagcaccaaacgcttccgtgaactcgcctcagaagttggcagcttactgacttatgaagccaccgccgatctggcgactgaaaaagtgaccatcgaaggctggaacggcccggtagaagttgagcagatcaagggtaaaaaaattaccgttgtgccaattctgcgcgcgggtctggggatgatggaaggcgtgcttgagcacgtgccaagcgcgcgcatcagcgtggtaggcatctatcgtaacgaagagacccttgagccggttccttacttccagaagctggtatccaatatcgacgaacgcatggcgctggtggttgacccgatgctggcaaccggcggctcgatgatcgccaccatcgacctgctgaaaaaagccggctgctccagcattaaggtgctggttctggtggccgcgccggaaggtatcgccgcgctggagaaagcgcatccggacgttgagctgtataccgcgtccatcgaccagggcctgaacgagcacggatacattattccggggctcggcgatgccggcgataagatttttggtacgaaataa

SEQ ID NO: 174635 - DNA, 1290 bp, Klebsiella oxytoca
atgacgcgccgtgctatcggggtgagtgaaagaccgccgcttttacagacaatcccgcttagtttgcaacatctgttcgccatgtttggcgcaacggtactggtgcccgttctgtttcacatcaatccggccacagtactgctgtttaacggcatcggaacgctgttataccttttcatctgcaaaggcaaaatcccggcttatctgggatcgagctttgcgtttatttctccggtactgcttctgctaccgttgggctacgaagtcgctctcggcggctttatcatgtgcggcgtgctgttttgcatcgtctcctttattgtcaaaaaagccggcaccggctggcttgatgtgatgttccccccggcggcgatgggcgcgattgttgcggttatcgggctggagctggcgggcgtcgcggcgaatatggccggtctgctgcccgcagaggggcaatcgccggacagcaaaaccatcatcatttcgatggtgacgctggcggtgacggtcttcggttcggtgctgttccgcggtttcctggcgattatcccgattttaatcggcgtcctggttggctacgcgctctccttcgtaatgggcgttgtcgatacgacgcccatcgccgaggctcactggttcgcgctgccgaccttctacaccccgcgctttgaatggtttgcgattttcaccattcttcctgctgcgctggtggtgatcgccgagcacgttgggcatctggtggtaacggccaatatcgtcaaaaaagatctgatccgcgatccgggcctgcatcgttcaatgtttgccaacggtctctccacggtgatctccggcttctttggctccacgccgaacaccacctacggcgagaacattggcgtgatggcgattacccgcgtttacagtacctgggttatcggcggcgcggcgatcatcgcgattctgctctcctgcgtcggcaagctggcggcggcgatccagattatcccgctgccggtaatgggcggcgtctctctgctgctgtacggagtgattggcgcatcgggtattcgcgtgctgatcgaatcaaaagtcgattacaacaaggcgcagaacctgattctgacctccgtcatcctgattatcggcgtgagcggtgcaaaagtgcatatcggcgccgccgaactgaaaggcatggcgctggcgacgattgttggcgtcggcctgagtctgatctttaaactgatcggcgtcttgcgtccggaagaggtcgttctcgacgctgccgatagcgaagaagcaaaacattga

SEQ ID NO: 174636 - DNA, 594 bp, Klebsiella oxytoca
gtgctgcggcaggagcatagcggatacatctatatctggtcacgcgaaggggcggggcgcagccatctcctgcacgcagcatgcgcggaactttcccagcgcggtgatgcggtgggctatgtgccgctggataaacggacgtggtttgttcctgaagtgctggacggaatggagcagctatcgctggtttgcatcgacaatattgaatgcgtggcgggcgatgagctgtgggaaatggcgattttcgacctctacaaccgcatcctcgaatccggtaaaacccggctgctgatcaccggcgaccgaccgccgcgccagctcaagctgggcctgccggatcttgcctcgcgcctcgactggggacaaatctacaagctgcagccgctatcggatgaagataagctccaggcgcttcagctgcgggcgaggctgcgcggctttgaaatgccggaagacgtctgccggttcctcctcaagcgcttggatcgtgaaatgcgctcgctgtttatgacgctcgatcagctcgatcgcgcttctataaccgcccagcgcaagctgaccattcctttcgtcaaagagatcctcaagctgtag

SEQ ID NO: 174637 - DNA, 360 bp, Klebsiella oxytoca
atgtccgatacggtcaaaatctatcacaacccgcgctgctccaagagccgcgacacgttgagcctgctgaaggctaacggtatcgaccctgaagtggtgctctatctggagacgccgccggatgccgccacgctgcgccagctgctgaagatgttagggatggccagcgcgcgcgagttaatgcgccagaaagaagatctctataaatcgctggatctcgctaatccgcagctcagcgaagatgcgctgatccaggcaatgatcgataatccaaaactgattgagcgccctattgtcgtcagccacggcgaggcccgtatcggccgcccgccggagcaggtactggagatcgttaactag

SEQ ID NO: 174638 - DNA, 1464 bp, Klebsiella oxytoca
atgttcaggcagttgaagaaaacgctggtggcgaccgtcatagcgtcgctgacgctgggttcaatattacctgcttttgccgacaccgcagacaccctgccggacatgggcacctccgcaggaagcacgctctccatcggccaggaaatgcagatgggagactactatgtacgccagctgcgcggcagcgcgccgttaattaatgacccgctgctggtgcaatatattaacggtttaggcatgcgcctggtctcgcacgccaattccgtgcgcaccccgttccacttttatttaatcaataacgatcagattaacgcctttgctttcttcggcggcaacgtggtgctgcactcggccctgttccgctactcggataacgaaagcgagctggcatcggtcatggcgcacgaaatttctcacgttacccagcgccaccttgcccgcgccatggaagaccaaaagcgtaacgccccgctcacctgggtcggtgcgctgggttcaattcttctggcgatggccagcccgcaggccggtatggccgcgctgaccggtaccctggcgggtagccagcagggaatgatcagctttacccgtcaaaacgaagaagaggccgaccgcattggtattcaggtccttcagcgctctgggttcgacccgcaggcgatgccggcgtttatgggaaaactgctcgacgagtcgcgctactccacccgtccgccggaaatgctgctgacgcacccgctgccggaaagccggcttgccgacgcccgcaaccgcgcgaatcaaatgcgcccggttgtcgcacagtcctcagctgacttctatctggcgaaagccagaacgctcggtatgtacacttccggcgataataagctgggcaatgacctgctgagcagctgggaaaaaggcaatattcgcgaacagcacgccgcccagtacggtcgcgctctgctggcaatgggcaacaacaactacgatctggcgcgcaaaacgctacagccgttgctgaccgcagaaccgcagaacgcctggtatctcgacctggccaccgatatcgacctcgggcaaaaaagagcgacagacgcgattaaccgcctgaaaagcgctcgcgaactgcgcaccaacccggtgctgcagctcaacctcgccaacgccctgctggaaggaggacaaccggcggaagccgcgaatatccttaaccgctacacctttaataatagagatgacatcaacggttgggagctgctggcgcaggcggaagccaaactgggcaatcgcgatcaggagctggctgccagagcagaagggatggcgctggtaggccgcctcgatcaggcgattaccctgctcagcagcgccagctcgcaggtgaaattaggcagcttacagcaggcccgctacgatgcgcgtatcgatcagctgcgccagctgcagcaacgctttaaaccgtaccagaaaatgtaa

SEQ ID NO: 174639 - DNA, 1068 bp, Klebsiella oxytoca
atgcttcagatgttaatgcagtggtaccgtcgacggttcagcgatccggaggcaatagcgctgctggtcattttgctggccgggttcggcattatgtttttcttcagcggcctgctggcgcctttgttagtgtcgattgttctggcctatttgctggagtggcctaccgtcagactggagcgtatcggtttttcacgtacctgggccacgtcggttgtgctgattctgttcgtcggtattctgctcctgatggcgttcgtggtgatgcctgttgcctggcagcagggtatttatctgattcgcgatatgccgggaatgctgaataagctttccgatttcgccgccacggtgccgcgccgttatccggccttaatggatgccgggattatcgacgcgatggcggagaacatgcgcagccggatgttaaccgtcggcgattcggtggtaaaatattcgctggcctccctggtcgggctgctgacgctggcggtctacctggtgttggttccgctgatggttttctttctgctgaaagataaagagcagatgcttaacgccgtgcgtcgggtgctgccgcgcaaccgcggcctggccgggcaggtgtggaaagagatgaaccagcaaattaccaactatatccgcggtaaggtgctggagatgatcgtcgtcggcgtggcgacgtggattggctttatcctttttggccttaactattcgctgctgctggcggtactggtcggattctcggtattaattccctatatcggtgcctttgtggtcactattccggtggtgggtgtggcgttgttccagtttggcgcgggcaccgagttctggagcctgtttgcggtttatctgattattcaggggctggacggcaacctgctggtgccggtactgttctcggaagccgttaacctgcatccgctggtcattattctgtcggtggtgattttcggtggtctgtggggattctggggagtgttcttcgcgatcccgctggcgacgctcatcaaagcggtggtgcatgcctggccggatggcctgatagtggaagacgagcattag

SEQ ID NO: 174640 - DNA, 471 bp, Klebsiella oxytoca
atgaacccactgaaagccggtgatattgcaccgaaatttagcttaccggaccaggacggcgaggaagtaaatttgaccgacttccagggacagcgtgttctggtttatttttatcccaaagccatgaccccgggctgcaccgtacaggcgtgcggtttacgcgataatatggacgacctgaaaaaagcaggcgttgaagttctgggaatcagtacggataaaccagaaaaactctcccgtttcgccgaaaaagagctgctgaacttcactctgctgtctgatgaagatcatcaggtgtgcgagcagttcggtatctggggtgaaaaaacctttatggggaaaacctacgacggtattcatcgtattagcttcctcatcgatgccaatggcaaaatcgaacatgtttttgatgacttcaaaaccagcaatcaccacgacgtggtgctgaactggctgaaagaaaacgcctga

SEQ ID NO: 174641 - DNA, 570 bp, Klebsiella oxytoca
ttgacagcctcattacaacactatctggttattaccgcgttgggtgctgaccgcccaggcatcgtgaatacgatcactcgtcacgtcagcagctgcggctgtaatatcgaagacagtcggctggccatgcttggcgatgagtttacgtttatcatgctgctttccggttcgtggaatgcgattaacctgattgaatcaactctgccgctgaaaggcgccgagctggatctgcttatcgtgatgaagcgtacaaccgcaaggccgccgcaggcgatgcagaatagcgtctgggttcaggttgaggtgccggattcaccgcacatcattgagcgattcacggctctgtgcgatacgtggaaaatgaacattgccgaactggtttcccgtactcagccgggagcgaacgacgattcagcacagctttttattcaaatcaccgcccacagcccgactacgcaaaatgcatcaaatatcgaacaagcgttcaaagccctatgtacagaactgaatgcacaaggcagtattaacatcgttaattattcacagcatgatgaacaggatggagtttga

SEQ ID NO: 174642 - DNA, 879 bp, Klebsiella oxytoca
atgtttacgggaagtattgtagcgcttgtcacgccgatggatgaaaacggcaacgtttgccggtcaagcctgaaaaaactgattgattaccatgtcgccaacggaacctcggcgattgtttcggtaggtactaccggagagtccgcaacattgagccatgaagagcatggtgacgtggtcatgcagacgctggaactggccgacgggcgtatcccggtcattgccggtaccggtgctaatgcaaccgcagaggcgattagcctgactaaaagatttaacgatagcggcgtggttggctgcctgacggtaacgccttattacaaccgtccgactcaggaaggactcttccaacactttaaagctatcgcagaacatactgacctgccgcaaattctgtataatgtgccctcccgtaccggttgcgatatgctgcctgaaaccgttggtcgtctggcggaaatcaaaaatattatcggtattaaggaagcgacggggaacttaagccgggttcatcagatcaaagagctggtttcagatgactttattctgctgagcggcgatgacgcgaccggaatggactttatgcagctaggcggccatggcgtgatttccgtaacgacaaacgttgcggcgcgtgaaatggccgagatgtgccgactggcgctagcaggtcaatttgccgaagctcgtgcgattaaccagcgtctgatgccattgcataccaaattatttgtcgaacccaaccctatcccggtcaagtgggcctgtaaggcgttgggtcttgtggcgaccgatacgctacgcctgccgatgaccccgattaccgaaaacggtacgaaggttgttaccgcagcgctgaagcatgccggtttgctgtaa

SEQ ID NO: 174643 - DNA, 1035 bp, Klebsiella oxytoca
atggcttactcagtacagaagtcgcgcctggcgaaggttgcgggtgtttcgctggttctactcctcgcggcctgtagttctgactcgcgctataagcgtcaggtgagcggcgacgaggcctatttgcaggctacgccgcttagtgaacttcacgcgccagcaggtatgattctgccggttcaggtgggtgattataatattccggttgcgaccagcaccggtaatacaggcaaagcgctggatattcgtccgccagcccagcctctggcgctggtcagcggcgcgcgcacgcagtttaacggtgataccgcaacgctgatggtggaaaacgggcgcagcggttcgctgtgggcgcaggtggcaagcatcgtgcagtcgaaaaactacactatcgctaaacgcgacgatgccagccagacgctgaataccgactgggtcgaatggaatcgcctcgatgaagaccagcagtatcgtggtcgctatcaaatctcagttaaacagcagggctaccagcaggcggtgatcgtgaagctggtgaatctggagcaggcaggtaaacctgttgccgatccggcttcgctgcagcgctacagtaccgccatgctgaacgtcatttccgaaggtctggatctgaacgcgaccagcgcgcagaacgccgcgcagaaaaatgccggggcaaccttcgacgtgcagagcggggctgatgataccggcctgccgatgctgatcgttcgcgcaccgtttaatctggtatggcaacgcctgccgggcgcgctggaaaaagtgggtatgaaggtaactgatagttctcgctctcagggtaacttgtccgtgacctataaaccgctttccgacagcggctggaccgatctgggcgctcgcgacccacagctggtgtccggcgattataaactgcaggtcggggacctcgataaccgcagcagtctgcagttcatcgacccgaaaggccatactctgacgcagtcgcaaaatgatgccctggttgccgtattccaggccgcattaagtaagtaa

SEQ ID NO: 174644 - DNA, 714 bp, Klebsiella oxytoca
atgcaaaagcaagctgagttgtatcgtggtaaggcgaagacggtatacagcaccgaaaacccggatctgttgatactcgaattccgtaacgatacgtcagcaggggacggcgctcgcattgagcagttcgatcgtaaaggcatggtgaacaacaagttcaaccatttcattatgagcaagctggcggaagcgggtatcccgacccagatggaagcgctgttgtccgataccgagtgtctggttaaaaagctggatatggtgccggtggagtgcgtggtacgtaaccgcgctgccggttcgctggtgaaacgcttagggattgaagagggcatcgagctgaacccgccgctgttcgacctgttcctgaagaacgacgccatgcacgatccgatggtcaacgaatcctactgcgaaacctttggctgggtgagcaaagagaacctggcgcgtatgcaggagctgacctacaaagctaacgatgtgctgaaaaagctgtttgacgatgcgggcctgatcctggtggacttcaagctggaatttggtctgttcaaaggcgaagtggtgctgggggatgaattttctccggacggcagccgtctgtgggataaaaagaccatggataaaatggacaaagaccgtttccgccagagcctcggcggcctgattgaagcctacgaagaagtcgctcatcgcctgggcgtgaagctcgactaa

SEQ ID NO: 174645 - DNA, 870 bp, Klebsiella oxytoca
atgcgctggcaagggcgtcgcgagagcgacaatgttgaagatcgtcgtagtcaatctggttcgccaatgggcggcgggggcggttttcgtctccccagcggcaaaggcggcattgtgctgctgattattgttctggtggcgggctattacggcgtcgatttaaccggcatgctgaccggcgagccggtatctccgcagcaaaccaccacccaacgctccatcagcccgcaggatgaagaagccgcaaaattcactaaggtgattctggcggacacggaagatacctggggagcaatatttaaagatatgggccgccagtatccgcagcccaaactggtgatgtaccgcggcgcgacgcggaccgcctgcggtaccggtcagtccgttatggggcctttttactgcccggcggacagcacggtgtatatcgacctgtcattctacgatgagatgagaaacaagcttggcgccggcggcgatttcgcacagggctacgttattgcccacgaggttggccaccacgtacaaaagctgctgggtattgaatcgaaagtgcgtcagctacagcaaaacgcttcgcaggcggaagcgaatcgcctgtcggtgaaaatggaactacaggcggactgcttcgctggcgtctggggctacaacatgcagaagcaggactacatggagaccggcgatctccaggaagcgctgaatgccgcagaggcgattggcgacgatcgcctgcagcagcagagccaggggcgggtggtgccggacagctttacccacggaacgtcgcagcagcgctatacctggtttaaacgcggcttcgatagcggcgacccggcgcagtgcaacaccttcggcaatgcgctgtaa

SEQ ID NO: 174646 - DNA, 2004 bp, Klebsiella oxytoca
atggatgaactgcgtcgtctgacggcgcagatggcgcgcgaaggcattcgtcgtctgctggttctcagcggcgacgatgcctggactcagcttcaggcgcaacaaatacgcacagcgctggccggagacggactgtgggttggcccacagccgatgcctgcgccgtacgtcccgcctgcagatctgagatcgctgcttggccgcgaataccagcacgcctttttcgatgcccgcgcgggctttgatgttgccgctttcgccgcgttagccggtacgctacgcgccggtagctggctggtattgctcacccccgacttcgcccaatggccggcccgtcctgatgcggattcccggcgctggagcgacgctcccgatcccatacccacgccgaactttgtttatcgtttttgccaacagattgttgcggataaagcgtccattctctggcggcagggccatgaacgggtcgtacccgtatttcccgagcgcccgcgatggcatttcgccgatggtcatccgcaggcggagcaggccgccgttcttgccgaactggccgatttcccccccggtattgccgcgttgaccgccgaacgcgggcgagggaagtccgctctcgcgggaatgcttctccgccagctaaaaggtgacgccatcgttaccgcgccggcgcgcggagcgacggaggtgatggcggctttcgccggggagagcgttaactttatggcgcccgatgcattactggcgtccggacgtcaagcgggatggctgatagtcgacgaggctgccgccatccccgggccgctgctgcgccagcttgtttcccgtttcccgagaacgctgctgatcaccaccgttcagggatacgaagggaccggacgcggttttttacttaaattttgcgccagcttcgcgcacctaaggcagtttagcctcacgacgcccatccgctgggctagcggctgtccgctggaagcggcaattgcacagttgctgctgttcaatgatgagaccttccagcatgcgccaggcggcgatatcgcgctggagaacgtcagccagcagtgctggcggcggcagcctgcgttaccggaagcgatgtatcagctgctctccggggcccactatcgcacgtcgccgctggatctccggcgcatgctggatgcgccaggacagcattttacctgcgcccatagcggcgagcgcatcgccggggcgttgtggctggtggaggagggcggtcttgagccgtcgcttagccgggcggtatgggccggctatcggcgtccgcgcggaaatctggtggcgcagtcgctggcggcgcatggcggtagcccattggcggccacgttgacgggcctgcgcatcagccgtattgccgtgcatccggctcgccagcgcgaggggctggggcagcggctggtggcccgggcggcggctcaggctgcggaccgggattatctctcagtcagttttggctatactcccgaactttggcgtttctggcaaagctgcggttttacgctggtgcggctgggcacgcatcgggaagccagcagtggctgttacaccgcgatggcgctctatcctctcagcgaagcgggacattgcctggcaagcgaagaagcccaacggctgcagcgcgacgaattctggctgcgcgagtggcgagatgaacctgtgccgctgacggcgctgaaagcgactattcttactgaagaagactggctggaggtagcgggttttgcttttgcccatcgtccgctgctgacctcggcgggtagcctcaatcgcctgcttatgctggtggtgctgccgcttccggcgctgcgggcccgcctgcagcagcaggatgagaccgcgctttgccgaacgttaggtttatccggacggaaagcgctgctggccaggctgcgcgaagaggcggcgcaggcgctgctcagcctggatgaaaaccgcgccaacgacctacgccggcaggttcagatgttgcaattttttaactaa

SEQ ID NO: 174647 - DNA, 699 bp, Klebsiella oxytoca
atgaaacacgatcattttattgttcaaagccccgcaacacctgcacagcaactgctgctgctgtttcatggcgtcggcgataacccggtggccatggggcaaatcggtagctggtttgcgccgctctttcccgatgcgcttatcgtcagcatcggcggcgcggagccgtgcggcccggctccgggacgccagtggttttctgtccagggcgtcagcgaagaaaatcgccagcagcgcgtagatgcgattatgccgacctttattgaaacggtgcgctactggcaacaacagagcggcgtcagcccgcaggcgacggcgctgatcggcttctcgcagggggcgattatgtcgctggaaagcattaaagccgaaccgggtctggcatcgcgggtgattgccttcaacggccgctatgcgactctgcccgagacggcgacgaccgcgaccacgattcacctgatccacggcggtgaagatcgggttatcgatctggcgtgggcggttgcggggcaggaggcgttgcagcaggccggcggggatgtgacgctggatatcgttgaggatctggggcacgcgattgacgatcgcagcatgcagtttgctctcgatcatctgcgctttaccgtaccgaagcactatttcgacgaagcgctcagcggcagcacgccgaaagacagcgatattattgaactgctataa

SEQ ID NO: 174648 - DNA, 204 bp, Klebsiella oxytoca
atggattggctatcgaagtactggtgggtcctggtgttggtatttttggtgggcgtgatgatcaacgtgattaaagatcttacccgcgttgatcataaaaaatttctcaacaataaaccggatctgccgccgcaccgcgatttcaatgataagtgggatgacgatgacgactggccgaagaacgacccgtcaaagaagaagtaa

SEQ ID NO: 174649 - DNA, 1128 bp, Klebsiella oxytoca
atgtcttgcccggtcattgagctggctcagcagcttattcgccgcccttccctcagccccgatgatgcgggatgccaggcgttaatgattgaacgtctgcgtgcgattggctttaccgttgaaccgatggatttcggagatacccaaaacttctgggcctggcgcgggcgcggggaaacgctggcgtttgccggccataccgatgtcgttccgtcgggcgacgccgatcgctggattaatcccccctttgaacccaccattcgcgacggcatgctgtttggccgcggcgccgcagatatgaaaggctcgctcgcagcgatggtggtcgcggcagaacgctttgtggctcagtatccgaatcataaaggtcgtctggccttcctgatcacttcagatgaagaggccagcgccaaaaacggtaccgtaaaggttgttgaagcgctgatggcgcgcaatgagcgcctggattattgcctggtcggcgaaccgtccagcaccgaagtcgtcggcgatgtcgtcaaaaacggccgtcgcggctcgctgacctgcaacctgaccattcacggcgtacaggggcacgtggcctatccgcatctcgccgataacccggtccaccgcgccgccccgatgctggcggaactggtgaacatcgaatgggataagggcaacgaattctttccgccgaccagtatgcaaatcgctaacgtgcagtccgggaccggcagcaacaacgtcattcccggcgacatgttcgtccagttcaacttccgctttagcaccgagctgaccgatgaaatgattaaagcgcgcgtcgtggcgctgctggagaaatacgcgctgcgctacagcgtggactggtggctctcggggcagccgttcctgaccagccgcggtaagctggttgatgcggtggttaacgctattgagcactataatgaaataaaaccgcagctgctgactaacggcggcacgtccgacggacgctttatcgcgcgtatgggcgcgcaggtggttgaactggggccagtgaatgccaccattcataaaataaacgagtgtgtgaatgccgccgacctccagctactggcgcggatgtatcaacgcattatggagcagctggtcgcctga

SEQ ID NO: 174650 - DNA, 354 bp, Klebsiella oxytoca
atgctcaccatgtacgggataaaaaactgcgacaccattaaaaaggcccgccgctggctggaagcccaacagatagaatatcgctttcatgattatcgtgtcgatggcctggatcgcaatttattagacacctttattgccgagctcggctgggaagcgctgctcaatactcgcggtacgacctggcgcaagctggacgaaacggttcgcaccggtatcaataatgccgacgccgcggcgaaactgatgctggaaatgccggcaatcatcaaacgcccattgctctgcgcgcccggtcagcctatgctgctgggtttcagtgaatcaagttatcagcagtttaacgaggtgtag

SEQ ID NO: 174651 - DNA, 3126 bp, Klebsiella oxytoca
atggcgaatttttttatcgatcgccccatttttgcgtgggttctggcaatcctgttatgcctgaccggtacgctcgcaattttgtcgcttcccgttgagcaatatcccgaacttgcccctcctaacgtcaggatcgcagcaaactatcccggggcctcagcacaaacgctggaaaataccgttacccaggttatcgagcagaatatgaccggcctcgacaacctgatgtacatgtcatcccagagcagcggcaccgggcaagccaccgtgacgctaagctttaccgccggtaccgatccggacgaagccgtccagcaggtgcagaaccagctgcagtcggcgatgcgtaaactcccgcaggccgtccagaaccagggcgtgacggtgcgtaaaaccggggacaccaacatcctgacgattgccttcgtctctaccgatggcagcatggataaacaggatatcgccgactacgtcgccagtaacattcaggacccgctcagccgggtaaacggcgtcggcgacattgacgcctatggttcccagtattcgatgcgtatctggctcgatccggccaaactcaacagttttcagatgacggcaaaagacgtcaccgatgccatctcttcacagaacgcgcagattgccgtcggccagctgggcggtacgccttcggtagataaacaggcgctcaacgcgacaattaattcgcaatcgctgttacaaaccccggaacagttccgcaatatcacccttcgggttaatcaggacggctcggaagttacccttggcgacgtcgcgaccgtggaaatgggagcggagaaatacgattacctcagccgctacaaccgccaggcggcttccgggctgggggttaagctggcctctggcgcaaacgaaatggcgaccgccgaacgcgtcatcagccgtctgaacgagctgtcgcaatacttcccgcatggtctggaatataaagtcgcttacgaaaccacctcattcgttaaggcgtcgattaccgacgtggtgaaaacgctgctcgaagccatcgcgctggtgttcctcgtcatgtatctgttcttgcagaacttccgcgcgacattgatcccaaccatcgccgttccggtggtgctaatggggactttcgccgtcctctacgcctgcggctacagcatcaacaccttaaccatgtttgcggtggtgctggcgataggcctgctggtggacgacgccatcgtggtggtggaaaacgtcgagcgtatcatgagcgaggagggcctctcgccgcgtgaagcgacgcgaaaatcgatggggcaaattcagggtgcgctggtcggtatcgccatggtcctatcggcagtattcgtgccaatggccttcttcggcggcaccaccggcgcgatctatcgtcagttctcgatcaccatcgtctcggcaatggtgctgtcggttctggtggcgatgatccttaccccggcgctgtgcgccacgctgctcaaaccggtgcataaaggcgaaacccacgggcaacggggtttctttggctggtttaaccgcacgtttaaccgcacgtttaaccgcaacgccagccgctacgaaaccgccgtcggcaaaattcttcaccgttcgctgcgctggataatgatctacgtcctgctgctgggggggatggtgtttctgttcctgcatctgccaacgtcattcctgccgctggaagaccgcggcatgtttaccacgtcggtgcaattgcccagcggttcgacccagcagcaaaccctgaaggtggtccagcaggcggaagactatttcctgaaaaacgaaaaacaaaacgtcgaatcggtgttcgccaccatcggctccggccccggcggcaacggacagaacgtagcgcgtatgttcgttcgcctgaaggactgggaccaacgcgatcctacaaccggttcctctttcgctatcatcgaacgcgcgaccaaagcgtttaataaaataaaagaagctcgcgtctttgccagcagcccgccggccatcagcggcctgggcagttccgccggtttcgatatggaactggaagaccatgcgggcaacggacacgaagcgctgatggccgctcgcgataccctactggagctggccgctaaaaataaccagctgacccgcgttcgccacaacggccttgacgatagcccgcagctacaggtggatatcgatcagcgcaaagcccaggcgctgggcgtctccatcgatgatatcaacgacaccctccagaccgcgtgggggtcaagctacgtcaacgactttatggaccgcggccgcgtgaagaaggtctatgttcaggcggccgcgccgtatcgcatgctgccggacgacattaatctgtggtacgtacgcaacagcagcggcacgatggtgcccttctccgctttcgccacctcccgctgggagaccggttcgccgcgtctggagcgctacaacggctattcagcggtagaaatcgtcggtgaagccgcgccgggcgtcagtaccggtaccgcgatgacaattatggaagagctggcccgccagctgccaaacggctttggccttgaatggacggcgatgtcgtatcaggagcgcctctccggcgcgcaggctccggcgctgtacgccatttcgctgctggtcgtgttcctgtgcctggcggcgctgtacgaaagctggtcggtgccgttctctgtgatgctggtggtgccgctgggggtcatcggcgccctgctggcgacctggatgcgcggtctggaaaacgatgtctacttccaggtgggactgctgacggtgatcggtctgtcggcgaagaacgccattctcattgtcgagtttgccaatgagctgaatcagaaaggcgaggacctgcttaccgccacgctctccgcctgtcgccagcgtctgcggccgatcctgatgacctcgctggcgtttatcttcggcgtgctgccgatggccaccagtaccggtgcgggttccggcagtcagcatgccgttggcaccggggtcatgggcgggatgatttcagccacggtgctggcaatcttcttcgtaccgctgtttttcgtgctggtgcgtcgtcgcttcccgctcaaggaacggccgcaataa

SEQ ID NO: 174652 - DNA, 1965 bp, Klebsiella oxytoca
atgaaccactttattttaagcgatagtcataagtgcatcggatgcaaggcttgtgaagttgcctgcgtcatggcgcataacgatgagcagcatgtattgaccccgcagcgttttttgccgcgcattacggttatcaaaaatgagcaaaagcgtaacgcagtaacctgtcaccactgtgaaggcgcgccgtgcgcccgcagttgtccaaatgacgccatcagccagcttaacggcagcgtccaggtgaatcaggaaaaatgcatcggctgtaaatcctgtatggttgcctgcccgtttggcgtgatgcaaatcgtcctgacgccggtacaggagggcagagtcaaagcgacggcgcataagtgcgatttgtgtaacggtcgcgaagaggggcccgcctgcgtgcaaaactgcccggccggggcgctggagctggcgacggacagcacgctgatgaatctggcgaaacagcggcgtcagcgcgcggcgcgtctgggtcaccccggtgccccgatggcatcttgctccgccgggaaagtcgcacagatggccgcgacgccgccgcgcggcgagcccgacaagctatccgccgcagcgcgtaaggccaattttgccgaaatttatcttccgttcagcgccggacaggccaatcgcgaggcggaacgctgcctgaaatgcggcgaacacagcatttgtgaatggacctgcccgctgcacaaccatattccgcagtggattgagcgggtgaaagagggggatatcgccgccgccgttgagctttctcatcagaccaactgcctgccggaaataaccggtcgcgtctgcccgcaggaccgcctgtgcgaaggggcctgcacgctgcgcgatgagcacggttcggtgactatcggcaacattgaacgctatatctccgaccaggcgctggccaacggctggcggccggatctttcgcaggtcgtgaacagcggtaagcgggtggcgattatcggcgccggtccagccggtctctcctgcgccgaccggctggtgcgcaacggcgtaagcccggtggtgtttgaccgccatccggaaatcggcggcctgctgacctttggcattccggccttcaagctggataaatccctgcttgcccggcggcgtgaaatcttcacccaaatgggcgtacgctttgagctgaactgcgaaataggcaaggatattccgctgacgacgctgcttgatgaatatgatgcggtatttattggcgcaggtacctatcgctccatgaaagcggatctgccgaatgaagacgcgcccggcgtttacgatgcgctgccgtttctgatcgcgaatactaaacaggttatggggctgctggagctgccggaagagccttacgtcaataccgaggggctgaacgtcgtggtactcggcggcggcgatacggcgatggactgcgtgcgcactgcgctgcgccacggcgcaaagcaggtcacctgcgcctatcgtcgcgatgaagccaacatgcccggttcgaagaaagaggtgaaaaacgcgcgcgaagagggggcattatttgaatttaacgtccagccggtcaccctggagctgaacgaagaggggcacgtcaacggcgtgcgcttcctgcgaacccagcttggcgcgccggatgcacagggacgccgcagcccttcgccaatccccggaagcgagttcgtgatgcccgccgatgcggtgattatggccttcggtttccatccgcacggtatgccgtggctggaatcggtgggcgtgaagctcgacagccgcggccgaattaaggccaatgtggaaagtcgctatcgttaccagaccactcatcgtaaggtgtttgccggcggcgatgcggtgcgcggcgccgatctggtggtaactgcaatggcggaaggccgccacgcggcgcaggggatcatggacttcctcgaggttaaaccgatttcgcttcactaa

SEQ ID NO: 174653 - DNA, 585 bp, Klebsiella oxytoca
atgtcactcaatatcaacattatcaaagataaaatcctctccgaaaactggttcgttttgcgcaacatgacctatgagctgacgcgcagcgacggcaacgtggttcgccataaacgcgaagtctacgatcgcggcaacggtgcgaccatcttgctgtataaccgccataagcagaccgtcgtgctggttcgccagttccgcatcgcgacctgggtaaacggcaacgaagacgggatgttgatcgaaacctgcgccgggctgctggacagcgacgagccggaggcgtgcgtgcgtaaagaagccattgaagagaccggcttcgaagtcggcgaagtgcgcaaactgtttgaactgtttatgtcgcccggcggcgtcaccgagcttatccatttctttattgccgaatataacgatacccagcgggccaacgacggtggcggcgttgatgatgaagagatcgaggtgctggagctcccttatcatcgggcgctggagatgatggccaacggggaaatccgcgacggcaaagcggtgatcctgctgcaatatttgcaaaactccgggctgatgaacggggatctctga

SEQ ID NO: 174654 - DNA, 1068 bp, Klebsiella oxytoca
atgtggtatcgggttattttgtttctgctttgcggtttgctgccggcatcgctggtgcgggcggcgccggcgcaacagctcttcagcgactggcaggtgacctgcaacaatcagaacttctgcgtagcccgcaacgtcgggctacaccacggcctggtgatgacccttacccgcagcgccggagcggcaaccagcgccagcctgcgtattgagctgggaggcgtgggcaacccggtggcggcgctggcgccgatagcgccccggcttcagctcgatggcaaacccctggccttgagcgatacacactggcagattgccgacaaactgctgaaaactgacgataacgtcaccattgacgcattcctgcagcaagtgcaaaacgcgcagaccatcacgcttgaaaagggtctccagactatttctctgcaggggctcaaagccgccctgctgtttattgatagccagcaaaagcgggtggggagcgagaccgcatgggtcggcaagggggaagagccgccgctcagcgtaccgcctgcgccggcgctgcgatcggtggtgaaaatggagggggcgcagtcgcccctgagccgcgatgaacttaacgatctgatggattatggcaatgagcgcatgaacagcagcgcctgttcactgaatccgtttcgccgcgaggtacgggtgtccgcgctgaccgacgagaaggtcctgttgatgaccagctgcgaagcgggcgcctacaataccatttggctggcctggctggtttcgcgccagcggccatatattgctcacccggtacgactcacgctgcccttccagccccccggcgatgcgccgcgtgacgtcgagctggtgaacgccagctacgacgatcggcatcaggaactggtgaccctcgataaagggcgcgcacccggcgattgcggtatccaaacgcgctggcgttatgacggccagcggtttagcctggtacgctacgcgcagcagccgcagtgcgataactggcaggggccagacgcctggcccacgctatgggttacccgttctgtagctcatccgctacgctga

SEQ ID NO: 174655 - DNA, 1995 bp, Klebsiella oxytoca
atgtcccgtagagaactagccaacgccatccgcgccctgagtatggatgcagtacagaaagccaactccggccaccctggcgcgccaatgggtatggccgatatcgccgaggtgctgtggaacgatttccttaagcacaatcctgaagacccaaaatggtacgaccgcgaccgttttattctctccaacggtcacgcatcaatgctgctctacagcctgctgcatctgacgggttacgatctgcccatcgaagagataaaaaacttccgtcagctgcattcaaaaaccccgggtcacccggagattggctatacgccgggggtggaaaccaccaccggtccgctggggcaaggactggcaaatgccgtgggtctggctatcgccgagcgcacgctggcggcgcagtttaaccagccggaacacgaaattgtcgatcacttcacctacgtgtttatgggcgatggctgcctgatggaggggatttctcatgaagtgtgttccctggcggggacgttaggactgggcaagctgatcggcttctacgaccacaacggcatttccatcgatggtgaaacgaagggctggtttaccgatgacacggcaaaacgctttgaggcctatcactggcatgtggtgcatgaaattgacggccacgaccccgaagccgtgaagaaagcgattctggaagcccagagcgtgaaggacaaaccctcgctgattatctgccgtacggtgataggcttcggctcgccgaataaagccggcaaggaagaggcgcacggcgccgcgctgggtgaacaggaggtggcgctggcgcgtcagaaactcggctggcatcacccggcgtttgagatcccgaaagagatctaccgggcctgggatgcgcgtgaaaaagggcaaaaggcgcagaaaagctggcaggagaagtttgctgcgtatcagcaggcccatccgcagctggcggcggagtttacgcggcgcatgagcggcggactgcctgagtcgtgggatgaaacgacgcagaagtatatcgccgatctgcaggctaacccggcgaaaatcgccacccgtaaggcttcgcaaaatgccctcgatgcctacggcccgcacctgccggaactgctgggcggctccgccgacctcgcgcccagcaacctgaccatctggaaagggtcgacttcgctgaaagaggatccggcgggtaactatatccactacggcgttcgtgaattcgggatgacggccatcgccaacggcatcgcgcatcacggcgggtttgtgccctataccgccactttcctcatgttcgtcgaatatgcccgcaacgcggcgcgtatggcggcgctgatgaaagcgcggcaaatcatggtctatacccacgactccatcggtctcggcgaagatggcccgacgcaccaggcggtcgaacagctggccagcctgcgcctgacgccaaatttcagcacctggcgaccgtgcgatcaggtagaagccgcggtggcgtggaagctggcggtagagcgccatagcggaccgacggcgctgatcctctccaggcaaaatctggcgcaaatggcgcgcacgccggagcaggtacagaatatcgcccgcggcggctacgtgctgaaggacgcaggcggcaagccggacctgatcctgatagccaccggttcggaagtcgagataaccgtgctggcggcggagaagctgctggccaaaggggtgaacgtgcgcgtggtttccctgccatcgaccgatgtctttgatgcgcaggatgaggcgtatcgggaatccgtcctgccctcggacgtcagcgcccgcgtcgccgtcgaagccggtatcgccgactactggtataaatacgtggggctaaaaggaaaaatcgtcggtatgaccggctatggcgaatccgcgccggccgataagctcttcccttacttcggctttaccgttgagcatatcgtcagcgtagcggatgagctacagaacgggtaa

SEQ ID NO: 174656 - DNA, 2280 bp, Klebsiella oxytoca
atggatgagcagttaaaacaaagcgcccttgatttccacgaattcccggtccccggaaaaatccaggtctccccgacaaaaccgcttgctacccaacgcgatctggctctggcctactcgccgggtgtcgccgccccctgtctggaaatcgagaaggatccgctggcagcctataaatataccgcccgcggcaaccttgtggcggtggtgtccaacggcacggcggtgctgggactgggcaatatcggcgcgctggccggtaagccggtaatggaaggtaaaggcgttctgtttaaaaaattcgccggtatcgatgtattcgatattgaagtcgatgagcttgacccggacaaatttatcaacgtcgttgcagcgctggagccgaccttcggcggtatcaacctcgaagatatcaaagcgccggagtgcttctacattgagcagaagctgcgcgagcgcatgaatattccggtcttccatgacgatcagcacgggacggcgattatcagtaccgcggcgattctgaacggtctgcgggtggtggagaaaaatatctccgacgtgcggatggtcgtatcaggcgcgggcgcggcggcgattgcctgtatgaacctgctggtggcgctgggaatgcagaaacacaacattgtggtctgcgactcgaaaggggttatctataagggccgtgagccgaatatggcggagacgaaagcggcctatgcggtagaagacagcggcaaacgtacgctggatgatgtgattgacggggcggatattttcctcggctgctcgggcccgaaagtgctgacccaggaaatggttaaaaagatggcccgcgcgccgatgattctggcgctggctaaccctgagccggaaattctgccgccgctggcgaaagaggtgcgctccgacgccattatctgcaccggccgctccgactatccgaaccaggtgaacaacgtgctgtgcttcccgttcatcttccgcggcgcgctggacgtcggcgcaacggcgattaacgaagagatgaagctggcggcggtgcatgcgattgccgaactggctcacgcagaacagagcgaagtggtggcctccgcctacggcgatcaggacctgagcttcggcgcggaatatatcattccgaagcctttcgacccgcggctgatcgtcaagattgctccggcggtggcgaaagcggcgatggactccggcgtcgcgacgcgcccaatcgccgattttgatgcctacatcgagaagctcagcgagtttgtctacaaaacgaatctgtttatgaagccgattttctcgcaggcgcgcaaagagccgaagcgggtggtgctggcggaaggcgaagatacccgcgtgctgcacgcgactcaggaactcgtctccctggggctggcgaaaccgatccttatcggccggcccggcgtcattgagatgcgtattcagaagttggggctgcagatcaaagccggcgttgattttgagatcgtgaataacgaatccgatccgcgctttaaagagtactggaacgagtattacaacctgatgaagcgccgcgggatcacccaggagcaggcgcagcgggcggtgatcagcaataccacggtcatcggcgcgatcatggtgcagcgcggcgaagccgatgcgttgatctgcggcaccattggcgactatcacgagcactacagcgtaatacagccgctgtttggctaccgcgaaggggttcatgcggcaggggcgatgaatgcgctgctgctgccgagcggcaacacctttatcgctgacacctacgttaaccacgatccgtcgccggagcaaattgccgaaatcaccctgatggcggcagaaaccgttcgtcgattcgggattgagccgcgggtagcgctgctttcgcactcgaactttggttcttcggactgcccgtccgccagcaaaatgcgccaggcgctggagctggtgaagacgcaggcgccggatttgatgatcgatggcgaaatgcacggcgatgccgcgctggtggaaagcattcgcaatgagcggatgccggacagcccgctgaaaggttcagccaatatcctggtgatgccgaatatggaagcggcccgtattagttacaacttactacgcgtttccagttcggaaggcgtgaccgtggggcctgtgctaatgggggtcgcaaagccggtacatatcctgacgccaattgcgtcggtacggcgtatcgtgaatatggtcgcgctggcggttgttgaagcgcaaactcagccgctgtaa

SEQ ID NO: 174657 - DNA, 336 bp, Klebsiella oxytoca
atggataaagaacgcatcattcaggagtttgtccccggcaagcaggtgacgctggcgcacctgattgcgcaccctggggcagaactggcgaaaaagatcggcgttcccgaatccggcgctatcggcattatgaccttaacccctggcgaaaccgccatgatcgccggtgatttagcgatgaaagccgccgatgtgcatatcggttttctcgacaggtttagcggcgcgctggtgatttacggctcagtgggagcggttgaagaggcgctgattcagacggttagcgggcttggtcgattattaaattacaccctctgcgagttaactaaaagctaa

SEQ ID NO: 174658 - DNA, 480 bp, Klebsiella oxytoca
atgaagcgtattgcatttgtcggtacggtgggcgcgggaaaaacaacgctatttaatgcgctgcacgggaattattccctcgcgagaaaaacgcaggccgtggaatttaatgaaaaaggcgatatcgacaccccaggagaatattttagtcatcctcgctggtatcacgcattaattaccacgctgcaggatgtcgatacgctgatttatgtccacgcggcaaatgataccgaaagtcgtctacccgccgggttactggatattggggcgaataaacgccacatcgccgcgattagcaaaacggacatgccggacgctaacgtcgccgcggtgcggcaactgctgtacgagatggggtttcaggagccaattttcgcgctcaacgctcacgacccgcaaagcgtagagcagctggtgaattacttgagtgagctcagccaaaaggaggaaggggcaggtgaagaaactaatcacagctaa

SEQ ID NO: 174659 - DNA, 693 bp, Klebsiella oxytoca
gtgaagaaactaatcacagctaacgatattcgtgcggcccacgcgcgaggtgaagaggaaatatcggttgtgctgcgcgccagcatcatcaccccggaagctcgcgaagtcgcggagctgctgggcgtcgccatccaagagtgcgatgagtccgcgccagaagcgacggtaccggtggaggagggcaaaaccgaaagccagcgcattcgcgaaaccattattgcccagctgccggaagggcagtttaccgaaagcctggtcgcgcagctgatggacaaggtgatgcaagaaaaacagtcgctggcgctgggcgatatgcagcccagctttaaggcggtcaccggtaaaggcggcgtcaaagtcattgacggcagcagcgtgaaatttggccgcttcgacggcgcggaaccgcactgcgtcggcttaacggatttagtcaccgagcaggacggtagcagtatggccgccggatttatgcagtgggaaaacgcctttttcccatggacgctgaactatgacgaagtcgacatggtgctggagggagaactccacgtacgccatgaaggtgaaaccatggtggccaaagccggcgatgtgatgtttatcccgaaaggctccagcattgaattcggcacgccatcgaccgtgcgcttcctgtacgttgcctggcctgcgaactggcaatcgctatga

SEQ ID NO: 174660 - DNA, 804 bp, Klebsiella oxytoca
atgaaagattttattaccgaagcctggctcagagcgaaccatacgctcagcgaagggacagaaattcatctgcccgccgacgctcgtctgacgccttcggcccgggaactgctggagagccgccgtttgcgcattaagtttctcgatgagcagggaagcttgtttgtcgatgacgacgcgcagcagccgcagccggtacacggtttaaccagcagcgacacacatccgcaggcctgctgcgaactgtgccgccagccggtcgaaaaaaaaccggacaccctgacccatctgacggcggacaaaatggtcgctaaaagcgatccgcgcctgggctttcgcgccgcgctcgacgccaccatcgccctggcggtatggctgcaaattgaactggcggagccatggcagccctggctggcggatatccgctcgcgtctgggcaatattatgcgcgccgacgctatggatgaaccgctggcggcacagtccatcgtcggcctgaacgaggatgaactgcatcgcctttcccaccagccgctgcgctatctcggccacgatcatctggtgcctgaagccgctcacggccgcgatgccgccttgctcaatctgctgcgcacccgggttcgggagacggaaacgatcgccgcccaggtctttattacccgcagctttgaggtcttacgtccggacattctgcaggcgctcaaccgcctctccagcaccgtctacgtgatgatgattttatgcgtggcaaaccatccgctaaccgtcagccagatccaacaacgcctgggaggggagcaatga

SEQ ID NO: 174661 - DNA, 1017 bp, Klebsiella oxytoca
atgattattcaacgcgctcgtcaactggctttgcgttcgcccgcccgggtggtgtttccggatgccctggacattcgcgttcttaaagcggcgcactacctgcagcagcaggggctggcaaagccgattttgatcgccagcccttttgctctgcgccagttcgccctcagccaccggttgccgatggacggaatgcagattgtcgatccgtacagcaaccggcaaatgcgcgccgcctttgcccggcgctggctggatcgggccggggaaaaaacgccgccggacgcggaggaaaaactcaacgacccgctgatgttcgccgccgccatggtcagcgccggaaaggccgacgtgtgtattgccggcaatctctcctcgacggcgaacgtactgcgcgccggattgcgcattattggccttcagcctggctgcaaaacgctgtcgtcgatctttctgatgctgccgcagtacgtcggaccggcgctgggatttgccgactgcagcgtggtgccgcagccgacggcggcgcaactggcggatatcgctatcgccagcgctgagacatggcaggcgattaccggcgaggagccgcgggtggcgatgctgtcgttttccagcaacggcagcgcccgccaccccaacgtcgccaacgtacagcaggccacagagatcgtgcgtcagcgcgctccgcagctgatggtggatggcgaactgcagtttgacgccgccttcgtgccggaggtcgccgcgcaaaaagcgcccgacagcccgctgcagggacgggccaatgtgatggtttttccatcgctggaggcgggcaacatcggctacaaaatcgcccagcgtctgggcggctatcgtgcaatcgggccgctgattcaggggctggccgcaccgctccatgacctctcccgaggctgtagcgtgcaggaaattatcgaactggcgttagtggcagccgtgccgcgccggagtgacgtaagcagcgattgccgcttacccatgcaggttgaatga

SEQ ID NO: 174662 - DNA, 291 bp, Klebsiella oxytoca
atggaagcattaggaatgattgaaacccggggcctggttgcgctgattgaggcctctgatgcgatggtaaaagccgcgcgcgtgaagctggttggcgtgaagcagattggcggcggactggtcaccgcgatggtgcgcggcgacgtggcggcgtgcaaggccgctaccgatgccggcgccgctgcggcgcagcgtatcggcgagctggtctcggtgcacgtgattccgcgtccgcacggcgatctggaggaggtgttccccatcagtttcaaaggcgacagcaacatctga

SEQ ID NO: 174663 - DNA, 288 bp, Klebsiella oxytoca
atgaaactggcagtcgtcacgggacaaattgtctgcaccgttcgccatcaggggctggcgcacgacaagctgctgatggtggagatgattgatgctgcgggcaagcccgacggacagtgcgccgtcgccatcgacagcatcggcgcggggcccggcgaatgggtgctgctggtcagcggcagctcggcgcgacaggcacaccgcagcgacgcgtctcctgtggatttgtgcgtcatcggtatcgtcgatgaagcggtggccggcggccaggtgattttccataaatag

SEQ ID NO: 174664 - DNA, 1404 bp, Klebsiella oxytoca
atgaaccaacaggatattgaacaggtggtgaaagccgtactgctgaaaatgaaggacagcagccagccggacagcgccgttcatgagatgggcgtctttgcctcccttgatgacgccgtcgcggcggcaaaggtggctcagcaggggctgaaaagcgtggcgatgcgccagctggcgattcacgccattcgtgaggcaggcgaaaaacatgccagagaattagcggagcttgccgtcagcgaaaccggcatgggacgcgttgaagataaatttgccaaaaacgtggcccaggcgcgcggcacgccgggcgtcgaatgtctctccccgcaggtgctgaccggcgataacggcctgacgttgattgaaaacgcgccgtggggcgtggtggcctcggtcacgccctccaccaacccggcggcaacggtgattaataacgctatcagcctgattgccgcgggcaacagcgtggtgttcgccccgcatccggcggcgaaaagagtctctcagcgggcgattatgctgctcaaccaggcggtaattgccgcgggcggtccggccaatctgctggtcaccgtggcgaacccggatatcgaaacggcccagcggctgtttaagtaccccggcattggtctgctggtggtcaccggcggcgaagcggtggtggagtccgcacgcaagcataccaataaacgtctgattgccgccggggccggtaacccgccggtagtggtcgacgaaacggccgatctggcgcgcgccgcgcagtccatcgtcaaaggcgcctcgtttgataacaacattatctgcgctgacgaaaaggtgctgattgtcgtcgatagcgtcgccgacgagctgatgcgcctgatggaaggccagcaggcggtgaagctcagcgcggcccaggccgagcagcttcagccggtgctgctgaagaatatcgatgagcgcggcaaaggtacggtcagccgtgactgggtgggacgtgacgcgagcaagattgccgccgccatcggcctgagcgttccgccgcagacgcgcctgctgtttgttgaaacgccggccagccatccgtttgccgtgactgaactgatgatgccggtactccctgtcgtacgggtggccagcgtcgatgacgctattgcgctggcggtgcagctggaaggcggctgccaccatacggcggcgatgcactcgcgcaatatcgacaacatgaatcagatggccaacgccattgataccagcattttcgtcaaaaacgggccgtgcattgccgggctcgggctgggcggagagggctggaccaccatgaccatcactacgccgaccggggagggggtaaccagcgcacgtacctttgtccgtctgcgtcgctgcgtgctggtggatgcgttccgcatcgtataa

SEQ ID NO: 174665 - DNA, 840 bp, Klebsiella oxytoca
atggcgcacgacgaacaacgttggctcactcccaggctacaaaaagccgcggccctgtgtaaccagacgcctgcgaacagcggttcgccgctgtggctgggcgtggatttaggcacctgcgatgtcgtgtcgatggtggtcgatggcgatggccagccggttgcagtgtgcctggactgggctgacgtcgtacgcgacggcatcgtctgggatttcttcggcgccgtcaccctcgtgcgccgccatctcgacgttcttgaacagcagctcggctgccgcttcacccatgcggcgacctcttttccgccgggtaccgacccgcgtatttcgatcaacgtactcgaatctgccggcctggaagttagccacgtgctggatgaaccgaccgcggtggcggatctgctgcagcttgataacgccggcgtggtggatattggcggcggcaccaccggcatcgccatcgttaagcagggtctggtgacctactccgccgatgaagcgaccggcggccaccatatctccctgaccctcgccggaaatcgtcgcatcccgctggaagaggcggagcagtacaagcgcagcaacgcgcaggagatctggccggtggtgaagccggtgtacgaaaaaatggcggagatcgttgctcaccatattgaaggacatggcattgccgatttatggctggcgggcggctcctgtatgcagccgggcgtggacgcgttgtttcgcaaacgcttcccggaattacgggtgcatttaccgcagcacagcctgtttatgaccccgctggcgatagccagcagcgggagagagaaagcggagggaatctatgcaagctga

SEQ ID NO: 174666 - DNA, 1188 bp, Klebsiella oxytoca
atgcaagctgaactgcagacggcgctctttcaggcgttcgataccctgaatctgcagcgggtgaaaaccttcagcgtgccgccggtaacgctgtgcggcctcggcgcgctgagcgcctgcggacaggaggcgcaagcgcggggcctaagccatctgctggtgatggttgatagtttcctgcatcaggcgggaatgaccgccgggcttgctcgcagcctggcaatgaaaggggtgacgatgaccgtctggccctgtccgccgggagaaccgtgcattaccgacgtctgcgcggcggtggcgcagctgcgcgagtcgaagtgcgacggcgtggtggcctttggcggcggttcggtgctggacgcggcgaaagcggtcgcgctgttagtcaccaacccggagcagacgttaagcgcgatgacggaaagcagcgtactgcgcccgcgtctgccgctgattgcggtgccgaccaccgccggaaccggctcggaaaccaccaacgtgacggtgattatcgatgcagtcagcgggcgtaagcaagtgctggcccatgcctcgctcatgccggacgtggcgattctcgacgccgccctgaccgaaggcgttccgccacaggtgacggcaatgaccgggattgacgcgctgacccacgccgttgaggcatacagcgcgctcaacgcgacgcccttcaccgacagcctggcgattggcgcgatagcgatgatcggccggtcgctgccgaaggccgttggctacggccaggatcttgccgcgcgcgaaagtatgctgctggcttcctgtatggcggggatggccttttccagcgcgggtctgggcttatgtcatgcgatggcgcatcagcctggcgcagcgctgcatattccgcacggccaggccaacgccatgctgctgccgacggtgatggagtttaaccgtatggtgcgccgcgagcgtttcagccaaatcggtcgggtgttaaccggcaagaaaaccgacgatcgggaggctatcgccgccgtacgtgagctgattgctgaagtgggcctgagcaaacgactctcggatgccggcgcgatggccgaacatttcagcgcatgggcgcaggcggcgcaggaggacatttgtctgcgcactaatccacgcaccgccagccgggagcagattatcgatctgtacgcggcggcgcactga
